United States Patent Application Publication US 2014/0057251 A1 - sequence listing, part 189

SEQ ID NO: 385666 - DNA, 787 bp, Cannabis indica
atatatatatatgagacaaataatttagtaaaagggtcacttttgtctttataaataagggcatctagtttatattatttcttctttttctttttagatagaagtgtcttatattacattttcaaaattacacagttgggatttgatttcatcaactcagacactcctaaataacatggggaattattttatatattattttttaattatttttatttttacaatttgagttgttccaaaatttttatgtaaattgttatatgggtttagattgcaatttaagttgctctattattattgaagataaaactttaataaccatattgaagataaaactttgataattgctaagtgattaaatctatctaaaataggattttccatccctttataactacaatgtgtttttttttttctcaccggccttccttaggcataagagcgacttggtcgggattgtattttattatagcgattcaatttttgctattgcgattagttttgtctctgtgacatggttttgagtattttagtcttacttctgtgacataattttgagtgttttagttttgtctctgtcacttagttttgagtgttttaatcttgtttctgtaatatcgtttagtttagttttgtttcgttgtcttcttgttctttgatagcttaccatccaattgttgttagtgtggttgagaataacaagttctttgtgaatgaaagggttgttagtgcagttacgtaccttgcacaatagttaagtgtttaagctatgaggttgaatgaacct

SEQ ID NO: 385667 - DNA, 1717 bp, Cannabis indica
gtcaaacatatttatatttataaactcatatcttaacaaataaagaaaaataattacaaaatcaataaaatataaaattattttgaaaataaaaaatcaaaccgaaattatagagaatctagtaaataatttaaataaactaaacttatttatatttataaactcatatcttaacaaataaagaaaaataattaaaaactcaataaaatataaaattattttgaaaaaaaattataaattaaactaaaaaaaaatgttatgtttacttaaacaaatctaaattttttaagaaaaaaaaactactcaagtttattcccgtaaaaattagtttttacaaaaattaagttttaaaatatatttttttaatatctaaatgaattttttaataaaagatatataatttatgaaatcacttaattaattttaaaattttaatttgttgtttaattttcttaatcatttaaaatgatttttcttaaaatctaaattaattttttaagatttactaaaaagatattaaatctttcttatttttattttgagagggtacaatttgataattgttaaagtttcgggggcaaatttactaatttaaaagaaaatacgtaagcatttaaacggaataatgagacgaaacctaaagattaaatttctgtaaatataaaatttcagaaaaaattcttaacaagctgtatattttaaaaagcaaaattaatattgtttaaaatttaatggaaaaattactaattattctaactatcatatataaaaaaaaaaattaaaattataatgccaacttgggtgtggtcccacaatttgtagccaactattacatctttgaaaatgtcaactttataccgtacactctaattaagagatactctaaacagatatatacgcggcagatcactaaagtctaaaactatataatcttacttgtaagttgtttgactagaaagatataaccataatcatgtgagaaaaaaaaaatccttaaataaataagttaatcacaaaaaaatacatataagtttatgaataattatatttgtatttatgattaaatatatttgtagtataaacaaacacacatagtttatgattaattataaattgacaaaaatgaacatatagtgtgtatagaccttttcttagaggatcaaatatatttgtaagataacttctgtcctctaatataaagttccatccctttgattattaattcaacaatgtcatgctatatgtcgagttcttttcatattcttagaggaaaaaagttatcactttaaagattccaagtcacatcttaacaacctttgaactgattttatataagtttaatatctcaaaaaagatgtaatgataatgtgtacaaaagttatttattagatttaccaaatattaaccacatgcacgtatattgaagggtgttgggaccaacaaatttttattactaggataaattttaatttaataaaattatatttaagtctaaattaattaataagcaataaaatttaatattaatgaactaatttttaaaatttcgtattttaatattccctgttttattatttaattaaatgcggaataataaaactggtactgaaacagttttctgtagctacagaaaataactctctaactccaaaagaaaccagtaataaacagtgcagaaaagtaaaaatacacaatgtacgtggtttcaacaatcctt

SEQ ID NO: 385668 - DNA, 1323 bp, Cannabis indica
acagtggccattttttgtgtacatagtagatgtctatggatccagcaccatgtcatgtcacattcatccaaacgttaaagatgcttttttaaatctcattcagcattccaaccaacaaaatctcttattaagttaagaaaccaaacctaataatgccaattcgtagaacatacaaaacccaattcctaaaataacttgatttttatcaaacaccgaatcatcagaataattatatataatatataagaaaataattacccaaaacaaaaaaaaaatcatcgaacttagaacaatctttagaaacaacccgagaaggtgaccacgtgttaaacgagacacattcacaaaacgtattgctgaaacataaaacatccatacaaacaggaggtggatataagagaatgagatcttacaacagcatttctctcgttgagaagcgaaggattctcccgaagaagcttctgaaatccactaagatcaccggagtgggcgtaggcatgaatggtggtgggtttagtagatcttgaacgctgatctcgagacctctgcatctctaatggtctcaaaatccgtccttcgagaaagaaaacgaaagaaaatgagaagaagagaattgatttcgatgggtggcgccggaaaggaaatggactctctccgcttccgactcttgcgtccgaatccaattctaaacacaaatctctctctctgtgtaaaaaaaatatatatatatataaattggttaaaatgaccaaaatagccccactttggatctggagctggagccaactgccacctcttcaaagttcttcccactaaagatggaaatttataccgcggggatgggtaactgcggggacccgcccctaaggggatggggattccccgtcttggtagttaatgggacggtagaagaggacaatttcaatacccgaaacggggatggagcgagagcgggaataatactatctgcaccatatccgaccccgatatagatatatatataattttctttttatacttaatatatatatagtatatatatgattaataatcaaaattattttgattatcatccataatcaaaattatatatcatatgctcaaattatgaagatctaatgacgatagtgaactgatgatcattgtgaattacatgtgtaaatatattttcttctcgacttttaatttcatctttaattactttttaatttgttgggaggcttgagtggtatgagactatgatcctatactttgagacatatttggatcacaacaaagatatattttttttgtttttttttcaaactttgagacatatttagt

SEQ ID NO: 385669 - DNA, 2230 bp, Cannabis indica
tttgaacctccaaattttgacttacatttctggttaacaacggtgaaagggatggcgacactcgggagttgaggtcgtcggcccctggggatttgaatgtcccgacacgtggtttcagatggtgacatgggttgtcgccgttggtggtagttgtgggtttttctttggtatttgaagagagagagagagagaggagagagagagagagagagagagagagagtcgtcgtggtgtagtgttggtttcgttgtagttagaagagagagagagagagagagagagtattttgttattgattgtgttgagagagagagagagtattttgttattgattgtgttgaattttcaaaagaagtatatatacaattgatcaaacactaactacccaactaactctaacagaacacacttaactaacagtgcagggtagttaacagtattaactaactattgtaactaacctatacccttgacaggccccttcaaactgagtgtggttttggaaacaacacacagtttggttctaaaattagaaaacttgatgctcgagattggtttagttaggcaatctgcaatctttgcagtagctgagacatgtttgacatgaatgtgtggttgtagaactttctctcgaacaaagtataggtcaatttctatgtacttcgtgtgtgcatgaagtacatgattagtagccaaaagaactgtgctctgcagaaggaattgcatcttgagaaatttgcaattcatgaagcagacattgaacccaagtcacttcagcaacatcattggtaaggcttcgaaactctgcttcagaagatgacctactgatggtagcttgcttctgagatttctaggcaataagattgccaccaaggtagatgcagtagcctgaggttgagcatctgtcatctggatcagatgcccaatttgcttcacagaagacatcaagagaaaaatctaaaactagtttaagcatcaagccatgatgaagagtgccagcaatatatcttagtattctcttcacaacattccagtgtgtgtgcaaagaattttgcataaattgacacactttatttacacaaaaagctagctctggccttgtgattgtagcatattgcaaggcaccaacaatggacctgtacagagtagcatctgtgacaagttctcttccatagttacacagtttaaggccactgttcatgggagtattttgtgtgttcacattttgcatatcagctttggttagaagatcttgaagatacttagtttgagtaagcaagatcccagttggtgttttttagtgacctgaatgcccaaaaaatagtcagcaaggccaagatctttaagggagaatgttgaacttaaatcatgaatgagttgttcaaccaaagtgttatcactgccaatgatgagaatgtcatctacatagacatggatgtagatacatgattgaggtgtgactcttatgaacagagactggtcagcttttgaaaactaaaacccatgctgaaccagagttgtagacaacttctcaaaccaggcccttggtgcctatttgagaccgtaaagagtcttattgttcctttacttttttttttggtaattatatgggacatttccattggtaatgtctgagtggagttgtaaagagtaaaattcatctttaaatttgtcttccttcttcaggagtgaaacaagttcataaaaatactaaatttcagtaagaatgggagcattccaccctcgattgatgtaaaaaataaataaaccaaccaacagtctttacccttgcgaaataagttggtaaggggcaagccccacgaaaacaagaaaattgatgaaatagtcctagagtggaagatttgccctaaacatcaaatgtgtttggctccaacctccgaaacccccatagttttgactaggggtttcttggtctcgagggagctgatggaagactccttcttcaggatgaggggaaatctcgttctccaccactatcttcttaagttggtgggcacacttcttggaggagtacaattcattggcctcctaaccagtagcacgtgactcatagtgtagtaagggagttggccagtgcatgacaacctttaatgtaacaaccaagggagtcgtgtttttaggtctctgggaagaacttttctgttatattatttttaatataataatatgtagattaaaatgtggtaatatataatattatgtgaataat

SEQ ID NO: 385670 - DNA, 1742 bp, Cannabis indica
taacaggaaaaaaagactcatttagacctgttagaaattgtaggacttgttcttggttcaagaaagcaagattatcaatggaggcagcacaagtaaggaattcttggacgaagttctgaatttcatcccacatgcatttgagtttagtgaaataggaacttacagtgtcatcaccttggtgtaaagtgattagagtctctgggagttcgaatattcgaggtccattcccttgatcatatcgggagctgagttctttcaacatttctgcagcagtgtccaagaacatgatgctgctcttgatgtctggtgaaacggagtgtaatatccacgacatgaccatttgattgcagcggttccaatgatcgtggagtggatcatcagctggtggttgagccaaagttcctttgaggaaacctgtcttgtttcgggcaccaacagataactcgaaattgcggcgccatggttgaaagttcttgtctgaaagaggaggagacacaaggatcaggccagggtgatctccagagttcaagaagtaagggcttgagctgtcttcatgaacaggacgaacatgaacaagaggctgttgagcagtatgttctccagtgagattcgaagctggaggaatgatcgaaggattttgtggagcatctggtattgtcgaagaggtgtgtggcaatggagtttggccggagcttcgggagccagtagctcgagttctcgccatgcaaaggggagaagaaaacaaagagaatcagagagaattagaagaaacgtctgataccatattagtgaaatgaatcttaaactttattattgagtaaagaatggtttatatacatgaactaagtaacagaaatctgttagaagaaacaaaaaagagcaaacaatatacaactggctaaataacagaaataacagaaaatatgttctctgtaataattatgtttcaatttttacaatattaataataataagtgtaattattaattaatcaaaattcaatcatcccatctaatttttttacacttataaattaaacataatcatcaaaatatcaaatttttaaatcatgatttgagaagtttaaatatacatatattgtatacaaatattttgtaaaatttaactgtccacaccattccataagaagataaaagtataaacttcacaattgcaacttacaacttataaatcatgtgcaatctatatagttttacttagtttaagtgtaccattaactagtttatgtatcattttaatttggttttaactttattaaattctaaccttaacaaaaaaattatgagaattagtggtacactcaatgtgaaatgagctgtgtaaaaatatatttcatgtggtcaattgtataaaataatagatatatattttaaaaatattttatcatgcttttttattatgataataactgaaaatttgaaacttacacccttattatataagacgaacttttattttttttatgtcaaactttattcaataaatatacattctttttgtttattaagtgctaaagtaaaaagaataaaaattattttattttatttttctcaagcactttaataaacaaatatgtaatattcaaatatatatatatatatatgaaacacatctcaataggtattattcatgaatagttactaaacaaatataattataaatataaattgggtgtctacacatttagtaccctttgttttattctaaatacaagtttggta

SEQ ID NO: 385671 - DNA, 1453 bp, Cannabis indica
tttacttcttgcaagcttttgaaaccgaaaaatttcatttcgagaatgccaaagttgaaacacaagagctatcatagtagtcgagtacaccaactttttaaacttgctgatattctctgaaacccttgcttaagaggttacagtcaagttccatcctaattagaatttaatactctaaagacaggacctactgatatagaactcgaaaaagagatgttccatagttttatttaccaaattacacatcaaacaagtaggatcgacagagatatgatacctgaatagcctgtctttagtctttagtttaaccaacacaaccaaccacattataaagctatgtcttgggaaatttaaacgcctccacacctctttattccaaacaactcgatccttcttagaatttctagcctagttaaggtcatgtcattcagattaaaaaatgcaagagccacttaccaatgcctcgtgaatgaaatattcgaacactagattggtcgcaacagttaggtatatgtggacaatatgttagtaacatcagttaaaagcaaagatcgtgtggttgacctcatggactgtttcttagttttaagaaagtacaaaatgaagccaaacctaaaaaagtgttcatttggagtctctttaggaaaaattttgagtctcatagtgaatgcgaggggaattaaagctaaactagaaaaaattaaaggccttgctcgatatgccttcaccaaagaaataaaaagaagtccaatcattaaccgagaagatggcagcactgaacatgttcattttgaaatcaacaaacaagggcttactattttttaacatgttataaggcaacaaacagtttgaatggacagaggaatgcgagaaagaattttagggaattaaacagctcttgtcgacccgacctatgctttcaaaactagtaattagagtgatcttatattttacctatcagtatcagaaaatgcaataagtgcaactctagtgcaagaagaaggaaaagcccaattaccagtatattacgtaagtaaccgtttattggggtataatcaagatacccatctctcaaaaaattcgcacttaattagtctaattcatgcctcaagaaagttaagaccttattttcaaaaatacccaattcatgttttgaccaatcaactattaaggccagttctatcaaaacttgacgcctcgagataattgataaaatagtcaactcaattaggaaaatttgacataacctatcacccatgagtagccatcaaagggcaggccttattggatttcttgatctaagggataaattttgaaacaaatagagaataaatcccaaatcaaaaagcatggaaattatttgttgatggctcatcaaacgaaaatggcttgtgtaacgtcttcgcttcaagcctccattgggtcctcacacccacggaatgaatggctctta

SEQ ID NO: 385672 - DNA, 1612 bp, Cannabis indica
taacatcccccctcaagttacacgtagggaatctaagtgttaacttgtctgctaggaaaacaaactgaggaatagccaaaggtttggtgaaaatgtctgcaatttggttgctggagtccacatatcggatgtctaattgttgagcaaggacccgatctcgaaggaaatgaagatcgatttcgatatgttttgtgcgggcgtgatagacgggattagaagctaaggagctggcaccaagattgtcacaccagatgattgggcagcaggaaagacttatgtgcaattcaatgaataatgattgtagccaaataatttctgttgttgctaaggctaacgatctgtactcggactcggtactggaacgagctacaatgctttgtttcttagagcaccagctaagaagattgttgtcaagatagatgcagtaacccgaggtagatttgcgatcgtctaagcaaccagcccagtctgcatcactgaaaccatgaagttcaaaccgagtagcaggtgtgaaatgaagacccaagtgcattgtacccactaaatatcgcagaacccttttacaagtagcccagtggtgtgatgttggagctttgacaaattgattgagacgattgacagagaaggcaatgtcaggccttgtaagagtaaggtattgcaaagcgccaaggacactgcgatagagagtgggatcttccaagggagtacctgctgcaagagttaatttagcactagagcacataggtgtgggctggggtttggcatcaaggagaccagttttgactaataaatccttggtatacttgctttgagtaaggtatataccagttgagtcacgggtaacttcaaagccaagaaaataattgacagaacccaactgtttcaaagcaaactggtgctgtaaatcagatataaccttggtaatttgagccttgtcttgaccagtaataagtatgtcatcaacgtataccaagagaagaattagtttaccatgtttcttagtgaaaaacaagctgttatctgccttagaattctgaaatccccattgcaacaaggcagattttaacttgtcaaaccatgcacggggggcttgcttgagcccataaattgccttattaagtttgcagacatggttggggaacttggggtcaatgtatccctgaggttgagacatataaacagtctcattgaggtcaccatttaaaaaggcatcattgatgtcaatttgttgaatatcccaatcataggtgacagcaagagtaaaaattagtcgaatggtgcatggtttgacaactggactaaaggaaacaagagcagccaaaaaccttcaacatgttataatcaggttttaaatgaaataatttctcataaggggagaggaagtttaagataggggtgggtagcctattgattaggtaagcagccgaggcaaaagcttcccaccaaaaggtgagaggcatgctagcttgagcaagtaaggtaagtcctacatcaacaacatgtctatgttttctttccactcttccttgttgttgatgagtgtgaggacatgaatttcttctagagattcccaactgtgtaaacaggttgtataaaggtaaatattctttcc

SEQ ID NO: 385673 - DNA, 3561 bp, Cannabis indica
tggtttggctccaaccaagaagctaaaagcacacacccttccaacttttggagcactctgaagatcggcaggcatgatctcgcatgtaatgccagtagagtttgaccatttggtaagggcgtgagctgcccaattgctcccctctttgcacccaagctaagtcccacgaaccaaaagttacaattttttgagagaaccattgaagcagccaactctaaggaagaaagatcaatgattgaaagagcttgaatatctgttggaaaagtataccatcaatcaattgtgctaagaaaatcaagcattctaggatatggtattattgtccaaaactgacagtatttgaaaaactgaaagccccaacaaaagaagtgaaaagaaaatatgtcgaaacaaattttcaagttgccgatataatcattaaagcacgcacattacaaaggttcaataaagcaatactatcacagctcaccttaagagaaggtgttgaagagtccttccaccatgaattcatttgctgtcatgaaaaattcttgagctgtcatcattagtactatggtacaattatggtgccattatttcacaattgtcaagtgtttcaatacatgtgtgcatttattctagattatccatagtgtatgcataatcaccttgaaattgtccctcatatttgctcctgcagtttattactcttcagtggtttttttcacacaccactatgcaccacaaattaaaaaaaaaaaaaacacatacacatgtacatagatgcatcaaatagagaggccaagcacacacatcagacaaatgtctcaatatcacaccaaaacacattttaaatgttcaattgtagtctcttagtatgattgtttaatctcaagctgctctttaccttaggcccacctgcgtacaaagtaaggatgaacatgaactatccttattttcattaacaccatgaccctacagcttgtaacttatattgatttggtacataacatagaacaaaaatatccaaagggataagtgctatctacagtaccaaagtagacaaggccattagtattaaaaataacttttccaacgttttccagatataactgtaaaatatctatctattacttaaataattggaatttcaattataatcttacaacttcaatctaatgctggaaagataacttttgtcccttacaatcttcgcataaaatccttcccagtctgtcaaaaaaaatgcaaaatgtcatggaaaaacatagctctgaaacagagcaataaaaagaagactaaaaaaaatgtatattaatttttaattgcaaaagttagtaacatgcatttgaagcaattaagattacccatgagagagagagagtacacaattaaccaatcaatgtttttttcctttatcattaagggtcaaaatatgtcctggaaaaagcttcttatgttaagatttataaatcacatacacaactcgttttgctgggatctaaagagaacatgttactcctatctacatggtccttagctggctcctaaccgagacagtgtagtgctaatcccagaagccaagtatgcagaacagattgctgaatttgctggtgcacttggatggaagttgactgatgaagtaataagtgagttgaggtctttatctttagaaatccaacctgttattagtccctagttgagaaactatagatattcctataaaataatttaccaccacacacattattctccatacatgatttgaaacatcagtacagaatgaaggagctactcttatataaaaaaaatacatttatgtaattttcttctcaaaaaacttgaaagaactcaccggagctgtccagagttatcggaggcagagaatgatgaatggtgccaaatttggggatgagcatcataaatctcaaaaaacttttggagtttgccgctaactattagtgactaaattgatttagtcacaaaaactctagtcgctgaaagcctattttcttgtagccctgcacccaggtttactttgggaactctaggataaaagtttagacttcaataacttgaattcaacttattatctttcagtattttgtaacacgaagacatgaagcaatctaatccaaggcccgggagctaaaattacacgaacctacaacccggaagccaacctgggcacatgaggtttcacccggtgcccaagttgacatcctcaactagggtttcagtttccgggactgtcttagtgcaaagtgcccaaaacttgcattgggacatcaattagacataccatagacatatgtgaggcatcataatcaaaatcagagcaagttaatttttttgagcacccgaggccctagggcctcaagcacccagcgtccaagttgacaatttgacaatttaggcaccttccaagtgtccaatcgaagatctgacttttgcattaaatgaattttcattaaaatggggaaataggtcctttcagtgaaaaacaacaatttctgggcacaaataacaaggccaaatgcccaggttgacacatggggctggccctgcccccaagttgacaattcgccaacctgggccacaaaaagtggagttttttatgaattcttttgagcatcatctctgtctttagaaaatattaagatttaactatttttggggaccaaacataatttttgaaggggcaaaacttggacccagcacccaggttgacgcctgaggctgggcccatcgcgtaggctgacattttgtcaacctaggctgtttccaatctagttcagcaaaaagtgttccaaccattttaccgtcatcagaaataacaaagattcaagtaaactctaggagaaaatcacaaatccataattttttttataaactaccaagtaaattatattataagatttatttttaatttatactcagcaacaaactcatgaaatattatcagtattgatgtaagagttaaatattagatatgaataaagcataatttgaatattttggtgaaaaattaaacattatatgaatatttaaaaaataaataaatatattattataattattttttaaaagtattaaaattttaaaaataaaattatttgaatttaatataaaacattaaattaaagtaagtaaaaaataataaaaatatctatgtctaagagtatggacataatattgctcataaagtaaaaatttagggacgaatttattaaaaaataaacttgttaagacgtatatagtttgagaactaatttattaaaaatataatatttaaagaccaattaatcgaaatcttataatttaaagacctgccaaataaataaatctatttatattattacaaaaccgctatatttatatatggctgtacttttaatgagtattattcatttatgcgtaatattataaaaatttcagtttttatgcttagtttttctatctaattaaaaaaatatcttatttttatattatatgaattggggttgttccatcgactaaaaaaaattaaaaaaaaaagtttttcgacaaaaaaaaatttaaatttggcttaagtattttgta

SEQ ID NO: 385674 - DNA, 1152 bp, Cannabis indica
ggttccccttaaccggtagaccaattcagtgcaggaaccactaaaaatgtctccaacacttcaaatcaaccccaaacttttcaatattctccagaatacctgtatacactccaacacagccaattcaagcaatacatctccattttaagcacataaatcataatgggtgaagccaaaagggttttaccatgaattagggttttcgaaacctgctggaatctcacctagcagctgaaaattagaaccctagatgattctctagagaattcaaaagagagatagagcttggtaaaagaaatgactttttctaagtttttccatgaaagacaaaacatatatcctttcttttatttatttaggtttttttttgtaaccaaaatcagattaccctactacatattctcacaaaagacaaaagattaaaaaggggaaaatactaatttacccccaacataactgtaagcttaaaggtcaccaaggacaatttggtcattaataaaccacgacaatttcctgccataaccaaaacctaacaatgatgccccgataataaaacgctccaaaccataacaaacacgactctctaatggcccaacgtcatgctccactgctaccaaacacaaaaacagaacaaaacgaggaattcacataaataacatagttaatacattctaaatataagtaattaatcaccacaggcatgcaaattaataactcaatatcataattaaccctaattatttaataatccaatatattgaacttaagcggtctttacagtgttattcattgtaagctctccaatagagggaaaagggaaactaaatgtaattctcaaattaccataaatactcagtgaattttttagattaagggttgaattctcttgcaatacttactcacgcaaacttgagaacttaaatttattgtatttcgaaagacttttcaagctaaagaactagttaataacatcgactcgtggactaaagctagttagcgccctcacctcaccacgtaaaaattgcttgtgtctttcttactttttctcttttaatgattatttataattagtttttcaaaaatttaggtaaatagtttaattaattttttttttcaattgttagatcaaatactttatcaatctatggctca

SEQ ID NO: 385675 - DNA, 696 bp, Cannabis indica
gatttttttattaatttgttttaagtattttaaagtttcttctatttcattattattccaattcgcattcccatttatatttttatgtttttattcttcccaatcaaatgctaccttatttcattattatcaaagaataaatagaggcataaatattcaaaattttagatttttatgtattataaatttaatgtttctttttagcggaataaataccaaatatttataaaactctaatttttatctagtttcattagtagagactttattttaaaattattaaaggaatatttaaaagtaactaatactacatgtttttgtttaaactcaatgatctagaatctgcgccttatatgtaccctatttaaaacaataacagagtatgtactaaaaaaattagagaataaatacaattttataaatattaagtacttatgttgttaaaaataaatattaaatttatgttacttataaatttaaaattttaagtatttatgcaactaattattcgagaaaaaatatggcagcaaaattttttcgttttaccaatgtaaattttttagcaaaaaaaatccattttattacaatattagttctttattattaccaacttagaaattaatattacaaccaagattgagattttactgctaaatataagggtttttttttaattttaaccaaaaaaaaataata

SEQ ID NO: 385676 - DNA, 856 bp, Cannabis indica
tgtggaagacctcaaacacaaagaatgtcatgtagctttaaaaataaatcttagagattattttaatgagcgtaccgtcataaaacgagaatgtgaagtcttatttacaaagtgaggtttgtggggcaccttctaatattgagaatgaaaatattagtttggttaggaaagatatgacagctataattattgatacattagtgtcattagatgcaaatgacatggatatgaagaagcttatatattattattattattattattattattattattattattattattattattatatttttaatttatcttaatattttttatggagttcaattttgtttattgagaaaaaataattatggtccaatgttaatatttatatttgtttagttatttttaatttataaaattaataactaagggtaaaatttaatttctattataaatattgttacatatttatataatataaataatttgaaaataaattataaataccactaaaatttttcactagtaacacttttgaaatgtcactaattaaaatgacattttaaatactaaatttaatattttgtgtcatttttacaaatgtcactattaatttattcttgtgatatttttaattgtgatatttttaatatgctactaaaattacatattcgtaaattagtgacacttttgataaaatgttactaaaatatatcaatagttacatttaaaaaaaagtcactaattaaagtgtcacttattctttttttgatttaatatagttacattttttaacaaatgtcattaaaatattattattgtgacatttttttaaaaaaatatcactaatttaggttgttggtgt

SEQ ID NO: 385677 - DNA, 695 bp, Cannabis indica
tatttggttggagaagacggtgatgacgaaaagaacagaaagaagaattcggatcggtcctaaaggggagctcgaatcaggtgcgatgcctttattatatttgctttgcatccaccttatgtggatccaattgattgggccgacatttcaaaggcatatgcacgttttaacttttccaattaatttttgagataagataacctcacgcataaattactcacaaatttcaacaagaaaatttgtgaattcccctaaccatattttgaacacaaaaacatgctactaacaatatttttttttctttttaattaaaagatagaattttattgaatcaaattagatgacaaaacatctttaacattaaaaaatatagtcaaaaataaaatgaagtgctctagctaaattatgaacaatcttattagtagtaagattacacatcgagcgggttttttaagtttcagtttcgaataaaacatgtggaggtaagttccttatgccctgtttgtcttggtcgtaaagaatcaatccttcacttggtaacttgtcttgctaccaagctctgttaggataaagtcattagcactaatctgccaccagatacatctttcttagattggtgcatatattcttttaagctggtgaatgttgaagtgtttattgctaatggtgtgttggccatatggggccccgaaatg

SEQ ID NO: 385678 - DNA, 1597 bp, Cannabis indica
gtatttgtgaaataattccaaaagataaaaataactgaaaacgaagttgatattagttataaggtaatatgcttgttaattaacacgaaatataaaaaaaaaataccagatcggggactgaaagaaaaagtactttagagattcctaaagaaacacgatccactagagtccctgcaaaacataaaaagatttttagaacaataactacttcgcaagattccaactttttacttagcactggaaaattatcacatacaaaaaacaactaaactcattgttctaattatagaatattaaatactcaaattaattatgatggtgatggcatttagtttggtactttttgccacaaatatattattgggcacttagacttatttgtcacaaacagatctaatggtaccaaattgtactaaaacagaaacgaaaggtaacttttataaaagtaataagcattttcatcacaaacatcttctttaaagatccatgaaacagagcatcacttaatgaaaacaaaccatccttttcaaaaaaaaaaaaaaaatgaaaacaaaccagaaactgaaatagttgttgctccttcaatatttactctcttcacaactagaggatgaccatatgtgcaatgtcttacagctgatctttctctgtatattatacaatatacacacacacgcaagtaaatagtggtcatgagctagaagaatgaattcggtttaccaacatggtcctgtgctatatatgaaaattaatataacttacgagtcaggtgcacaaacttgaacaacatagcgactagtggagactagaacatgaaccagagctagcaatccccgggcgccaatgccgtcgtcattcgtaaccatgatcaccggcctattaccggagatcaaaccgccattttccatatttttccagctgaagaagaagaagaatttaacaaaagtagtaaaataaagatgctttataaatatatgtacacgacctcagcccattggctttttatgttctttgatgcaaccataaatctgattcattacatatatagaacacgtatgagtctatgaccattaatttcgacgttggttggaagatgcttcgaatttcatagtaagatgacattaattgtggataagcttgctaccgaagaaaacacatagaaatttcttatctttgttttgtttgtaggaaagacaagggtcatcttccaattactttttcgtattttttttaaatgaatttattattgttagatttctataagtagccaatgataatatctaactgaggattagactatctctaatggaagatttaaaatttgtgctaaatttgtcacaaaaaatgagtttgtactatattttacctattatttacaaatatgctccaatacacaaaatgtaaaataaagaaaaattaattgattatattaatggttatttcatattttaatatacaaaacttattattttttattcttttattatttaaatgctaattaggatttttggcccctaaactttgacatgtaccaaatcatgccttctgaacttttaaggtcgtgaaaaatgccccctgaactattgagattgttcga

SEQ ID NO: 385679 - DNA, 612 bp, Cannabis indica
agtcgtgctaagaaaaatcattaaaaacattataaataaagatggacattataaaatttaatgtatatatatctattaatttactggttttcaaacattataaacaattccaaagaatgacatattcaccacaaagatggacataagagattttgagcacttgtcaagcattaaatgtgaaagagtgtttattgtccttgaagaaaaattagggtttcttgttcctaaatttatagctatcgaatgttatcttttttctttggccagacccgttggccttctttgggcttaggtgcaacgtggtcaggattgtgttttactactacgattagatttttgctactatgattagtcttgtctttgtgatatgatttttgaatattttagttttgtctctgacatggttttgagtgttttagtcttatctctgtgatatggctttattttgttgatttttctttgttcttctatgactcgctatcaaatcattgttagtagttggtaataacaagttctctgtaactgaacgggttgttagtagtgcagttatatacattacacaatagttgagtgctcaagctacgaggttgaatgaacctacaacaacagttt

SEQ ID NO: 385680 - DNA, 1035 bp, Cannabis indica
atattgacacataagagggtgctaggtaccaccagtactctttagcatttttcatttaaaaaatattaagtactattagtgcccaataacaatgctccatttaataagtgtctcatacaaaatataggagatatggaagagtattgcagcatgtgggagaccacaccacgatcccctagtccccccaatcaactgcttagcctgttagaagaactatttgcacgtgagatcatagttggatttttttattttttgtctgtcaagacttacgattacgacgtcgttttcatgtgtttggcatgcacaataatattcatgcaatgtgcgcttaccttttttatatatgcctttaggctttaatggtggatcaattcagatcggtggagtggaggatgcccatgttcatattctaattctatatacagctggtataattaatatatatatgtggaagaaacaagcagtatttataaattatggaataatttactgtataaatatttaaatattaaattttagttgtaaataaaaatataattaaattttaactatataataatacttaagttatatttttagaattttgtaagtatctggtatttaaatgttaagtgattatctacttgttatttttttattagtatatttaaactaaattttttttaaaaaaataaataaattcaaattacacggtatctactttttatattctattttaatttttatctttattttactactctttaatttatactcaatttttataagttatatcctcattatgtgcattaagaactctaattttaataagttacgtaaagttatatttgatactttgattataaaaaaaatatttatcaattgaaatttttcaagtaatatttgattaatatgtaataaaaaagagtagtttatttcaacttaaatattatcatgtgatagtttacttaatacttaaccgtcaagtatattccagaattataaatattattacagtaaaaattaaatttaaatatttatttacaactttaaatt

SEQ ID NO: 385681 - DNA, 2870 bp, Cannabis indica
ctctctctctctctctctctctctctctctctctctctctctctctctctctctctctctctcttatacacgctcaaagggatttttaccctctctttctcatacgcctccaagctttcatctctctctctcattagagatctacctaccgattcatactttgtaaccctaaagagagctatatcaaatctcacatatagtaatctgaatagtattacccataagtattaatacaacttaaaagagagtaggttattacccactaacaaagggagtcgaacctctataaacatctttgtgttattttactttctaaatctaattgtgtaacgcgtggcaaacattagtttaatacgaccccaatgtcagttggccactttttgaggtcaatagttttaatgcctaaatctaccaacaacgataattgcacaatcttaatttcactcaaaaatagaacatacaaatacgacatgtagcagtaaactcaaagaacacaatccaagggcaagaatttgaataaatacatacccaatagtgaaaatagagacgttaagctgatcttcgcttggttcgattaaggaagttgatcaaacctttcatgaagataagatgcgagggcaatcaataaatcgatttctatatcaaaatccacattcataatttcttctagcataaagctctcgatcacttgggtggatggtttggaaactctcgagccctaatcctcagtagaagttgaatgcaaagattgacgacacgttctagattgatgtaggttgcttgggtgtgagttcggttctaattctcaaagaatgcagagaaagcttgaagttctaagaagtcaaaaatttgaaattaggggaaaagtggtaattgaaagttgtgaagggtatttatacccaaagtggcaatccacgtgaaagagaatggacgatccacgataaagtctccagaaacgtaaagtccatctaacggttggggattccaacagtctaagtgtgtaaccacaattaatgctccctgaaatcgaggcacaaatcaatgatgaagatgctactttttaattttcatgccaaaaagtgaacaaccgtcaaaataaaagcgattctagaaagtaactcctcgttaatcttggtcttccaccactaggcgactgccacatagatgtactgcaagtgaggatggaagtcaccttccatgattgattaacacctagtaagtcatgttattacttctaattctccacatgtcaacactaatggaatgatgcaagcttccaccatacatatcattttggaagcttgtgggtaaacattatctgtgtttcgagcaagggacacgtggaatctaggtcaacatcaaagactcgctagtggttccctaaagaagacaaattaggccaagtccaacttatacaagaccttccaggaacgtgccttggctctgtgatcaaacgaccttccaccaatgacagcttgtatccgaaagcaagtccaatatcgcgatgtcgaaagagtcagacaacatgttcctggaagaccagtccagtttcccttttttattcctttgcacagataaggatataattgtctcctaaatatcgacagaagatcatatcaagttaaaaagaaaaacttcctaaacagagatcaagcaattagttcatgattagttgcccacaattcaaccgcatctcatttgcctagtcaataaatcatctcttccatgggctggacttcacgagacagcgcaagttatgtaattcaatgtaaactctccaatagagaaaaaaagggaaactaagtgtaattctctagatattataagtacccaatgaattctgcgagttaaagattgaattctcttgcaacatttgctcaggcaaacttgaggacttatgctcattatattttcaaaggcttttctagctcaaagttacataataacattgactcgtgaactaaggctaattaacgttccaattgcgtaaaaactgtttgtgtcatttctacttttttttttctttcacttgtttatttcttcaggtctgattatttataattagttttctgaaaatctcaataaacaagtaacaacaaattgtgatttttgcgactaatacatgtagctacaaactttttagtcactataaagtaatgatgatttataatttgttataatttttttacttttaattataaattttattgtgactgaaagtaaaatcttttttgtaatatccatagattcggagacaatttgtctaacttgcaataagtaataaattaatcatattagataaatctttagaaagattcatatatattttgataaaagcattatcacaatacaatgtacaagtttttgatacatgttaaggttaggggcaaccttgagggtaggcgagtcaggagagcgccgcgggctcccaaaggcttaatgtcctaaaattgtaaaaaaaaaaaaactattagtatataaataaaatattaaataataaaaaaaatataataaatattatttagtgttgtggtaaagattcttactttaagctaagaggtcaatatatcaattccacctctacatttcaatttttttacattgtactaaagcactataactataattttgataattttaccataataactatggtactatttggttgggaggaatgaaaatatagaaataggaatgagaatgaataggaacataataaaatttaaaataaattttttctcttgttacattagaatgttatttccttctttttttaaaatagaagtcatttagaaagagcattccattaaaatgtcattccaatactttaaaatgcaaccaaacaaaaaataaaatgaaaattatttctt

SEQ ID NO: 385682 - DNA, 958 bp, Cannabis indica
tgaaggttatcgagaactatgagaattatagtaaaaatagtataatgctttactcttgaaaggtggctaatttgggaggatcaatcgaatattaaaaacataatgtgagcatatttaataagggttagattatcttcgaataatttctttcattgacgaagtgttggtttgaaagcgatgattaaatgtaccattggttaggtactttaatgagtgtggtacgagaaagatgttggacacatgttcactagagtaacacaggtggtagaagaacatgatggaccgaaaagttccaagaaacttttaaaatcatagagtgagttcaaatatatactcgcttcaataagtacacagaaacaactatgctgatttgatatgtatggatattaaatttttagccagagactcagttttcttttagcatcaccaagggtgctttgattaggaatgaatggaccattacgtcttagatatatcaatcctttttagatattggagtggataggcccgggggccgaaccaatagttttaccacctgtgttgtccatggtgcataatgtcttccacatttctatgtttagaaagtatgtgtcagatccaacacgtattttgagttacgatgatattgaactctagaaaacttattttattaggaagcaataggaattagagtcgtagatgtaggaactgtatcccgagttatttaggtaaatttttagaataaaattcttataagggagggatggttgtaatatcccgataagtctaatggtaaataattagggtttataattatagtatgggctaattagataataagtgggattatgatccaactaatttagttcagcataaattttaaattcactataagtgagtaaacaatcgtaatttataaattatagatatttatatagcatctctgaatgtaatatgagctacatgtgaaataaaaata

SEQ ID NO: 385683 - DNA, 871 bp, Cannabis indica
cggcttgcagaactcgatggtacaacgatccgaagggctcggaatggcgaaagtctcaagtattattatcaatagtactcgcaatgtaattatacttagccaatttattttgataaatgtcgtaagtatagggggtataacctacctttgtactattgattattactataataaagattctcgaattctcgaaactttaaattttttgcaagtttaacatttgtaagttattacaccaagctgtaatagtaaaaaaacattgcaaacagattaaataagaccagttataattatgcgagtacctctataccgcttaaagacaaaagaaaatatcctcgaaaggatacatattgttcgaaagaggaaaaagctgaaatttgttcaaagtacaaaacgcaggtacctatgtaccgctgaaagagttcaataactaaggaaataaaaacttagataaattaaacagttggagcagtagaaccagccgcaaccttgctggcagctccatcagcgaccttcttcagcatctgcagtttctgcctcctcagggaagagattacctccgcactcttgggtctgagtaggcgacatagcacgaaaagcttcaaccatctcagtagcttccgctccaagaatagagaagtcgaagtctggcaccttggataaagtcgtgtatatatagtcggaaacagcttggtcatactgcttcttcccattttccttcttggtctccaagttgcgggccaattcctcgacctttgactgagagcttggcttgaagttccgcctgctctttggacttctggaggttctcgagatctttgtccttagaatttgcatcctgcttcagcttcttgttgctctcttgaagctg

SEQ ID NO: 385684 - DNA, 590 bp, Cannabis indica
ggggatatccgagcagagtatgcgacaacactcaacaaactttcattgtgcaggcaactcgcatacactgaccaaagaatgggagctgtatgtttttcaaggatatatcccatatattcacaagcttgcaagttacaacaatacccctaaaattatgagatagattcgtagtagcaagaaagaaagaaaatctacttagtttctcattttgtttattgtaattatagaaagtaagcagtttcctattttatttcttattagttttggaaaactaattggttgtaatgcctccctatagatagaggaggcatctcacttgttgacctcgcttttagtcattgacagtgggtcttaattaaagcgataagaataattaaataacagaaagtaaagagcataaaataaaataaaaaataccagattttatagaggttctgcccttatgattggtaatagcctactctcattttattgtattgacttgtgagaagggagagcgaagaatgctctaatctctctcgaaagttcttaatatgatctctaagcaattcaatcttagttcaaggtttcactcttgagtgctttctctc

SEQ ID NO: 385685 - DNA, 2319 bp, Cannabis indica
gcatctaggtggtactttgggtctgttatcccttcctaaggtaacatgtttggttctttgaaattcgtaggcaatggttcgacctgaatttcaatttagaatggggattcctcatcaaaatcatcctcctccaattacattcttccaaagcggccgacgctattctccgttgaatatcctccatttccttgtttagttcttttctcctcttagttagcttctctcagaggtctagtggtgtaggccttgttcttctcttgtcccaagagaatctactgagggtgctcgtttctcgaccgcaattttttgacgaagcttttctcttaggtgaccttggatttccttggactcggtgtttttaggttgcaaatagggttccaaatctttgcgagataatcctcttcgtggtgaagattctggggtgccactcatggaatacttggacattccttcttctcttatctcacttacgcctttctttctttcttctggttccctttgcccaactaaaggtgcctcagagtgaccttttaggagttcttcaagttctctctgcatgtttgtgatggtttttttctagccgcatgttgcttgtccttaactcattcttctccttgttgtgaatatgagatcgagagcttaaactcactgagtaagccagcttctccttcccttgtcagtggtgtgagattctaggatcccttggtatcggcggttgaggtttccttatcagtgactgaacttttttcctttgtgatccatttccaccatcagacgtgatggaggcagtcaccccatctcgttgcatgttaattgggttttcctcatggtggttttcctcttctcttactggaggcttgtgactgtttgtgcctccttctctggcttcaggcctctggccatttgtaccttctcccccaatgacgggtggtgctgtatcttgccttgaaataaatagttgagtgtcgtcaaggaaaacctccaattcttggacacgacaagaacatctttacatttttttatgatggtatgtaaggaatcaacttagccttagcctactcccacaaacaacgcaaaatgattgacagtaagaactcgtcaactaattaattaaggaaaatctaatgttaagaacttgaaatagaagataattaagagagttgctcaaactcttcaagaaatggtaagaaactcagggttccaatgatattcaaagttctttctaccagaattttccctccactttacatttattcaaatggtctatttatactagagctactgaggctttgaattacatattctccccaagttaatggagggatacaaaattcctttagtaccatgaagatcaggtggatagtggtgaaatggtagtcggatgtcagcttgtacctctaatgaggcaagctttgtctccactatttgtacttcgagtgagataagctttgtctccactattcgtatttgtagtatgatcactacctcatagaggcatgcctactccaacggtctcatccttggttatccatcatttttgtccgtccctccttattctcccatgttcaaggtattatgaagacatacaataaatttggactaagtgttccacttgatgttggttctcacatctagaggctatgtacatgatgggatggtcttctgagtatttgagagagtatcttaggagaaggaaagaagggagagtggggaaaggagagaggagggagcggggagtggggagagaggagagcggggagcagggagcagggagagggacgggtggggagaggggataggggataggggagagcagagagagaagagagggggagcggggagaggggagataagggtggcccgcctatttacccttttgaactttttcggtgggctttggaatctttttctttctctaattatgtggcctctttagaaaatatactcggtgaatttttggggttcacatctattagcgttgaaagagggtgaaccactataaaatatggtgataattatttttatttatgtactctttacatttatttctgagttggctattttcatagtcacactactatatcgtaaattatgcataaatttttaaaaatgggtgggatgttgtaataccctggatttaggaaatggattagcaaaaccctaattagacaattatgaataattgaggaattatattattatatagttcaatatatgtgaattaatatgaattttaatatgttaagaccccgttggtgaaccaggagcattttagtaattgtgacccaagaagggtaaaatgatgaaattaatttaatt

SEQ ID NO: 385686 - DNA, 1022 bp, Cannabis indica
cgtacgtagacattaagaagaagtatgtagtagctaatataattactatgatcagattctcgatctgaaactaattttccagtctttataaatatatattcgtttttttttattcacgtgcatatatgtatgaatattcgatgcaaattgagatctcgattcattcatatatatatatatgtagcattgataatttcatagttttagaatttattacacttaatttatcttataaatgttaatattgccacaaaataataattatatatatgagccacatatatgtgtagaaatactacacatatatatgagggtaggctatagaggggccctcgttgatcgacaaaggtacgggcgtacttaaacaaataatgaaagtaagtgatggatatggatctatatatgatatatatatatatatatatcaaccagagattaataattatagatccaatgtatatatatattatatataaataaaagaaagatcgagaagagagagcccactgattcattgctatatatatatatataggactagtacagggtcatgatcacattattatgtactagtgtagtgtgtgtatagtactactaatctcttactgcctagatctttagtcgtcggttgagatgattcatagacaatgcagaagattaagtgggtcactgctatctgctacttctagctcactgtgtgcagacatttatatatagccaaggtggttggagtactactccaactccaccttgtggttttaattaagctcaggtggcatggcccatggggttccagcacaatgagaaaccctccatatatatttgtatatatatcgtatatttataagccaaaccatttttttatacttaatttagacatgtgattgtttctattgtttctatcgtatattgataagggaaatttgaaattctctttaaataccctataatttttcccctaaatgtataatcattaaaattggtcatatatgaccactttaatgattttcctaaactacccc

SEQ ID NO: 385687 - DNA, 1685 bp, Cannabis indica
gtatatatattagaaggaaacaactagtcagatctcacggttattacagaaaatattactcggaatagtagagacttctaccatttcagaaatattgttggcaaacgcccactttaccacattatgggccgagggtggtgttctttcatatgaatagatagatatcttagagaaaaagaaagccaattactctagcgtgatgatgaatatatacaaactccaaagaaaaacttagacaatgctaaagctaattattataattatttaattgatttagtaaataaataaacaaattaaatatatatattatatattatttattatttattattttatgggaaacagcttatgaaaggtatatatttgataccctattggcccccactttgattttcttaagaaactccaaaaagtcatgaaataataaaaaggataatgaaagagaaagactacaaaacaaaaacatcactattataatcactatactattttcacttaattacatctataaatatttttatattttttttattaccactaagacattattagcattgttgaaactagtcttgtgcgccaataaatatataaatttatataataaattaaattagtagagtcactacttaaataattaataacaccaataatattatttatccactttatttaactatagtaacaattatagattgatagtgtaattgatttattaggtcaaataattagttataaaaccaataacattgtcagtctataattgttgctatagttaaattgtcaatttataattgatactacatgaaccaatcttgttcatacataaaattaataagtgttttatacatgtaataaaataattgtatgcataaataaaatttaacatataaatatatataaatcatatacggattaacatgtacaaactaattttcgttacaaattcgttaggtcataatatttgaacagatgtttttatattactctcagagaaaatacgaccagcccaaaaacaagaattgcgagctagacaatgtgcggtttttgtttgcagatcgtttaacatgacaaactttaacattattcaaagaaaaaaaaggagattttcgcactcttggacaagaagaccaaagatagatggcatttcaatagagttgttaagagcttgaattgcaacaaaacagtcagtctctaccacgacattattcaaactcttcctttttatccaacttaaggcttccttgatactcaccattcttgcgaaccactagttgactatgtagcaaaagcctccatcataatttttttaagttcatctataacgattaaattaatacaatttttcttcaggaacaaattaatatgtattaacctgaaatataaaatagagatgatagagaaaaggcctttttattattgttaaattttattttagactgtttattttgaaaagagtaatttgcggcaacccctctctccaaactatcaatttacttgcaaaaaaccatctaatctcatattttagtggaaaaatcctccaaagtactattctatttatatttttaaggtgtcgtctatccagcctcgttaagccctgattttgcccatgtggcaataacaggtcactaagaaattatcctacgtggccaattttacaaataaaaattaaaatgagtaattaaaat

SEQ ID NO: 385688 - DNA, 813 bp, Cannabis indica
agaaataagtggagcacgtggagaggagttgattgaatattttgatgtagtcttcaaatgtggcacttgaatgtttacttcatgcatgaggttcaaattttcaaataataaacctagtccaattggaatacttacgtggaagcctttgagagttaatctctctaaaattcaaaatttgaagactaagttatagtcatattacggctcactcaagtgaattagttcattgttaatggttttgaccgagtagtatggaggggttgagagattgtagttaatagatgaattattttattagttaatataaattaaccacagttagattaaagccacgatatatggttaagggaattgttaatgttgaacttaaggcctataaatagaagccatccctcacatttcttctcacactttaaaaaaagccaaactctctcattatcacactaattctctggtcccttgtgccttgtatacatagtcacatattactctacatcccacatcttattccatataagcactatatataggccatccatacaccatcattatttcccatatcttccataaaccataatagtgcctacaaattctaaaatcattatcattttgtttctaaatttcaagatcatctcaaactactcgtgagcttacacaaggcttgggctcgggtagctagatcttctttaagagctaaggtatattgtcttgtcatttaaattcttgatttaaggttaagtttaaatatttatgtcaccataatatattctaaaataaaaatacatgaaaactaggttttcataagaagattat

SEQ ID NO: 385689 - DNA, 743 bp, Cannabis indica
gcataaaacccaacagtctcatgtatggaatagtcagcaccaaacctaacctgacatataacatgagtttaaggagctgattcattgcaaatcctggagaagaacactagacgtcactcaaatggatgttgaggtacataaaaaggactctcaacactggtttagtactgggaaaactaggtaatttcaatgaaaatatgactaattatgttgacttagattatgctaataacatagacactagaaaatccttaactcaatatgtgtttgatgtgtttagaggccgtgtgagcttgaaatctaacctctaaaaggttgtttctctatctctaaaaggttgtttctctatcatccactaacgttgagtatatggcaacaacaaaggctataaaggaagccatttgccttacagggttcacaaatgatcttggtatcagcatagatgagctcatttatattattctataaatctaattataattaattaaggcatattttataaaatatggattaaaaatggtataatgagtaagactatgatcttactaatctaattctgtgggaattagagaattctatcgtaaatgattaaataagcgtaatttatttattacaaaaattttattagaatatgtcagtaacatacacacgatttataaaataaattttcttaagttcgataaccatagagactcgattggtcgctagaaatatcacaacgattttaatttgtggtattagtg

SEQ ID NO: 385690 - DNA, 1783 bp, Cannabis indica
tatatataatgtatatatacaagttcctacatagataagtattttaccaaagtatatttataatctcaaattttatatttttcaattgtataaggtataccgccctagtagtgacatattagtgactataattttaatcacaatagaaatattttgaaaataaatgatcatattaatttagtcatatgattatgaaatcaaatttagtcacaaattaattgttacgtatagctatttattatatgttgatgaaatttgtaaaatgagactaatactaaaaacacataaatttagtcgcaacaaaattttttttgacattggtggtgtagaaggagaccaggattttgacgtggttggagatagaaagaatcggagggtcggtcaggtctgttaggcgagagagaatgaaagaattagagagacaaatatactttttgagagatttttgaaaaaattaaatgggaatggtagtttagataagagtgagatcattatgataaaatagtatagtataattaggggtgttttttttaagtatgaattatgaaatttctcaatatataattatatatatctatgtatgaatatctatgacgtataattgttagcagttttttactatctttattaaagtaaaataatattaaattataccaataataatattacatttccaatataatattttgtagcaaggcgcagtgtatattaatattagtatatttaacatttctcataaaaaaatatagtagatgcatgtaacatattttagagtactcgatatataattattaatggtatatggaaaactatgtactaattaatatacccatatataagtaaataaaatatatattcggagaataaaagaaaaatagacatacgcaacatgcatgtgtgttagtataatatataatgtcaacaattcacacgtatatatgaataaagtatattaaattgagcagtttttctgggattatttcaatacgatatatatttataaatatatatatataggtcttattgaaaaggcaaaatctggacttttctgttcaaagatctaaggcagctagcagagattgaataaatataaataattaataatgggaattaaggaggtgcaatgttttgaccatattattaattatatacagtagcttgacaccatatataatatatggccatatacatatatatctatattattatattatacatgcaaatgcaaatgcatgcagcgtgcgattttactaacaaacaaaaactttcaaagttatagcttattttaaaactagtaaaacttaattatatattgcatgcgaagcagttttccatgcatgcatgacacaacaaccagataataatggcttcctaggaagattttcattaataatcacatcttacattttgatatataatatataatcgtaattgttgctttcttaattaatatgtatatatatatatgttttgtatcataatttctttacttaatcccgaagttgtaatacgtacatgcattaaaacatgtttggtaataaaattcagcactagctagtagcatgcacactataaaaaaaaattattttaattataaaaatcatgaacatatatgtgatcactaaattaaaatttaaggtagtaattaaaaaaaattctctctaaattttaacatgtatcaaattatgttttttgaattttttgcgcgctaaaaatcctccttgaactatggatattgttggatttaagaacttttgtccaattttattaaattttactaatt

SEQ ID NO: 385691 - DNA, 1553 bp, Cannabis indica
tatgaagaagatacaatgaataataaaaattgcccaaagtttgtcatggtatcaagcgccaccacctaaaaatatcaaaataatgaccaccaaagatggaccaccatcctttccgattacacaaacagaggcaaagattgatgctagtttgccgttttatttagggctgcaggatcgtctgggagacttcatcacaccggtgcggctccgattactatcaattcaattcaacaaatgagtttgtgagatgactgggatctttgcataaatattagaatataaagagaaaataaatgaaacaaaagaaaccaactaactaattaaacaatggctcacataaaagggattacaaactaatgaataaaaaacaaaaatagtaaaacaaacaccacaaaagaacataaactagaaagtaaatgcaagaatcacaaggaaacaaatttgaacagaaatattacttggttcggtagacaaaggcagtgaacctttgctactaacatccaagggtagaaagctaattagttttgttaacaatcaagagatcatacagctcaatcaccaaacgagtcttgctcctattacaaacgaactctctccccagaattctccatcaaaacaaaactttgggcacttcattaactaaataataccatgatgtagctatctactcgttgcttctcaagtcatgttaagtctattgtgttgagttaatgctgagtgtaattggtttgggcaatataaataaggctggacaatatgtgtcaaatccattaataaattaaaatctatttatatctatatataatcctgtacgactggtttctccttcatcaaaaaaaaaaaaaacgaggacatgtttctttatatacaatcttgtttcaacttcacactaacacacactcacactgaaggagaggagaggagaggagaggagaggttttaatttcaacaagtaacagaaaagtgagtttaatggctatagatgaggagaatatcccagctcaaggtactttttgaatttcacccaagtatataaactatagagaattattaatatgagcttttataataataataataataataataataataataataataataataataataatactgtaaaataaggcgtttatttattatctcatattattgtcatctttgtttttttggaaatcaggatctatatctatatataatgcttttgtttagggcaataatgtggcagcctaacagaactttataactgtttgattttctaattttttctatttaggttaagattttattaagtttttattatgtttctcttttaatttttatgctctaaaatctaaaaatactctttactttcaaaaaaataatctaaaaacatatatgtaaccgtgaaaaccgtattctattagtcactcatctttttaattactttttatggtgaataataatttctcacattgtcttgatgtatcaagcaaaatagcagaggcagctgctaggcctcaacactgtgcagtgaagagtggcagaccacattgttagaagacatgtcc

SEQ ID NO: 385692 - DNA, 2225 bp, Cannabis indica
tattggtcactcggaaagactatgtccgaagcgtttttaccaagactttgatccgaatgtgaaaccttatggtatcagtatgaaagctcaaatgcggaggaggaattaccagattggagcacaatggttaaggacaggtaatgatgagcctgtgccggcaagtggtggcgatgttcgtcggaatgaggctgaagaacagtcaaccgatatcactaaaatcatggatgttgatcccatgttatcagggagtaatgggaggggtatagttaatgtagaaggaaatcaagggataaaggagctgatcgggtagctggtactttaatggggaatattactaaaaatattcatggagacatagtcaaaacaatcaagagttgattcttgttttggaaaataaaaagagacgtatggatatgggaggaataggtggaagtgtagatgtggcagctgatgtggagattaatgtggaaatggaaaaggaaactggtgctagtgttgggccaaaaaacttattgaaggtgggtcttggttcccaagcccaccaagcattatgagtcttttatcttggaattgccatgggcttgggaacccatgggcttttcaattcattaaagaccttgtggtccaaaagaaacccaatattgtgtttttgtgtgaaactttatcaaaaaaagatgttattgagaggcttcgtgtgtctatgggctttgagggtgcgtttggtgttgatgctcaggggagaagtggggggttgctatgttgtggagagatgctgaagaggttcaagtgcttggttatggcgtgaattacattgatgtgtgtgtgaaaagtagtgactatggggattggagactcacaggcttgtatggcgagccaaaccgtagccttagacagagaacttgggagttaataaaaagcttaaagaaggagcaggaggaaccgtggtgcataataggagacctcaacaatgttacttctcaacaagataagcgtggtggaaatgcttacccaaattggctcatcaatgggttttgtgggatgcttgatgactgtggacttcatgacttggatttagaaggttatccatacacttgggagcggggtcgaggcactgacgactggattgaagttcgtattgatcgagctattgttacacaacaatggcttgatatttttccaacgggcaaattgcttaacttagaggtatccacttctgaccattgtcctcttcttttagctactgtaaatgctactgctactgctggaaaaaaagtgtttaaattcgaaaattcgtggctaaaagaacctctttgccataagattgtggaggattcttgggatcaatctttgggtattccgattatggagaaaataaagaaatgttccactgtattgtttgaatggggtaaggattacactggtaattttaagaagcgtatccaagagtgtaaggctgaaattcgtttatggaagagaggaagggatgccgtggctgttagtaattacaaagaagctcaggttaaactccataacattctgctgcagcgtgaagtcttctggaaacaaagaagtaaacaactttggcttcgggaaggagatcaaaattccaaatattttcatgctaaagcaacatcaagaaggcgtaacaacttaatccagaaactcaaggattcgaatggtagttgggttggctgggaagatgagttgccgagagtagtcattgactattttaagcagttatttagtaatgagagtgttgattgtggagaggttttggattgtgttcaagctcgaatttcagaggagcagaatggaaagctattggaatttgtaacagccgaagagataaaacatgcgctttttcagatgcatccagagaaatcaccaggtcctgatggtatgacccccggattctaccaaaaattctggcatattgtaggcgatgacgtggttagtttggtaaggaattttttcattactggaatgttccctactaatcttaatgaaactaatattgtgttgattcctaaaaagaagtcgcctgagtttatgagtgatcttcgtcctatttctctttgcaatgttctttataaagttatttcaaaggtcattgctaataggttgaaaactgctcttccggatgtcatttccaataatcaaagtgcttttcttccggggcggttaatttctgataacatcatggtctcttatgagattatgcatta

SEQ ID NO: 385693 - DNA, 5027 bp, Cannabis indica
tcacctaggacttgattcataaccagttgagaattattgaatatatctatgtggttagcccgtacatcatgtgccagcttgaggccggctattaaggccttgtactcagcttcattgttcgagactttaacgacaaatttgattgctccatgtagttactacccctaggtgttgtaaaggtgatccctgcaccgaaaaattggtcagtgcaacttccatcaacacagagtttccatgttagtgatttgggatttttgttattgctcttgtttttctcctgagagagatctcaagagttgagtcggtgcactcagccacgaagtctgcaagggcttggccctttatggctattcttagttggcatgtgatctcaaactggccaagctcaatggcccatttgagtagtcaccctgatgcttcaagtttctgcaaaacctggcgcagtgattgattggtgtaaacctttgtggggtttgcctaaaagtagggccttagctttctaaaattcaagggcaagctgtaggtcagcttctgcatgagtcagcatgagtgggtaccaacttttgttaccgattagccttttgctgatgttctttaacagctaggtacacgcctagctcttcactatgtaggggtttagaaaacataggttgttgggccaattgttttttcaactcctagaatgtgttttcacattcctctgtccagtcaaatttattgttgcctctgagaatgttgaagaagggaacacatttgtctgtagaattggacacaaatctgcttaatgcagcaatgcatcctgttaggctttgtacttccatgacagttgtgggcaaattgatgtccaaaagggcttgaatcttgtctttgtttgcttttattcccctggtgttgacaatgaagccaaggaattttttcaagcttacaccaaaggagcatttcagggggctgagcttcatgttgtagctgcgaaggattttgaaacactcgcataggtcctccacgtgcccccaacctttttagacttgacaatcatgtcgtccacatacaccgccaagttgcggccaataagatctatgaacatcatgtgcaccagccttttatacgtggcccctacattttacaacatgaagggcatgactttgtagcaatataggcctaggttcgtcatgaagctagtgtactcctaatctagtggatgcactttatttgattgtaacctgaatatgcatccatgaaacttgggatttcatggccagctgtggaatgtacaagctagtcaattctaaggagtagaaagtagtcttttgtacatgctttgttcaagttggtgaagtcgatgcatactctccacttcttgttgggttttgtcaccagtattgggttggacacccactgaggataaaatgcctctgttattaagtcatgggctctcagcctttcaacctcatctttgagcgcctgggcgcactccttgtccaacaaccgcctcttttgttgaaaaagctagatgcttgggtcaaggttgagtgcatgggtcatcacggagggctcaattccgacaatatctccatgtgaccatgcaaaaagttctaggttttcccttaaaaattttatcaatatcgattatatttctagagttaagcctttcccaatcttcaatcttcttgttggaaaagtgggatcaacctcctccttttttaactcttctataggcacgaagcttcctaaaatatccttaaagtgaggatctatgtaagtgtccctgccttcggctagacttcattgccccttgtagggttcattttctgggtctttgcggagcatcttttctttttttcctttgatagggccaatttgtaatagtgatagtgacgggcagacagctggtctcccctcacacatgccaccccgtgctttgttcgaagtttgaggcataggtggtagatagatgttactgcctttaggtcgttgagggccggtcggcctatcatggtattgaatgttgatggaatgtcaatcgtgacgaactgtgccatcagtgttctagtcgttagattttctccaactatgaggggtaatcttatatacccgacaagtgtgatgcattggccaaagaagccatacatcaattggttgcaaggctctaggtcagtgagttggagccccatcttttcatgtcttgatttgaaaaaaatgctgaagcaggctctgtcgtacaccatacatctttctacagttatgttcccaatttgtacagtaataaccagggggtcattatgcgggaaaattacttgaggagcatcttttttggtgaagaagattgtgggatctataggctttatttcttagagctctggtctttgacaactaggatatcgtttttgggcttgttatagagtattcgagcatagcgctccctagctttgcaagtttcacctgtaatgtggggtcagccaataatgaccccctcgatgtcctaccactggtggttgcattggatctctattcttgggcgccttgtgcatgagtttggtcgtcttagacataacgacacaagtggggttcaatgtccctcttcaaactttgacactcattggtcatggtcaaagtcgttgtgatatcgacaaaacttttacatttccctctagcccatctcctttttgataggaaagggctttcgatatgggactgttctttgagtggccatgaagatggcctcaagtttctctattaggagggttaaccagatgtacttctcctccctgatcttttgtggtgtgggagaagtgttaaacttcctcctcccaaagttgttggtgttgcgcttgattcaaatgtttttgccactataggcctgagcagagttgttagtgtctccctatgcgcatggtgggtcatgaggttgctggatgcctcgtgactgcttgttgttgacatgccccgcctgggcctgtcgtatggcttcttcaagttttgataaaattgtcagctctatcaaggaactctttcacgttgctggtagagatcctctagatatcttttgataagtcactcaatgggtgtatgtgccccagtatggtcgtatatcggccttcttttgtaaagccttggactttggtagcctcagccataaacctctcgatgtaatccttcaaaggttcccctttcattgtttgactttgacaaggtcttctagttgcgttggtacaagtctcgaggacgaaaattttgtctaaaattcttatgagaactcagcccaagaattgaaccttcttgcggtgagtttgaagtaccattattgggccgtctccaacaatgtggttcggaatatgtggcattgaacatcaactgtaaccttctagagatcgaggtgcatctcgaagtatttaatgtgagctagtgggtcttctcacttgatatacatcttccatacctgccttttgaacttaggcaagggcaaggtatttatatatgccaagaatggtaatccccttgaccaatcaaatttaagtctgaaggctttggaccagctatgccatagatcatgtccctcagtttgtccttctgtgcttacacagaaggatctgttgctatggggaattaactgactaaccctccttggggaagcattagattctggagagataggggctaacagctataccctgtgagacagaatggtgaaggtcggccagacctttgctgaattataaaccctgcccagccattcccaagtacaggagttggccttggctggtcaggcctacacctagcttttgtgcttggccggccaaacctacattgggcagggtctggccccccagtattctttcgtggtcggtcatacaaggagagggtagggtcgggccatctacaatacttacatggccgaccaaacctacaaaggcaggttctggtttcccgtgatacttgcacgatcagccagacctacaaagggcaaggtctagccgcccgtgactccgcgttcgactgatgttggttattaataggagctatatcatgacaccgattgctagagtttggttgatttagatgtctgaaatgatcagtttcacttcgtgaataactattttgggtgtttccacccgctcttggtccttgtaagtttaagattgacttctaggcacctcgctccctttgggaggaagtgtagtactctggctggccaagggtgcccctgctgatggttggctgaccattgcctgtacaataggagtgttgctgagccagagatccctggtcggcctcccatgtcattggttgccgggatctggccgtttttgtcgtttcacctttgacgaaaggtctgtcctccctgtagcaagggatgatttgtcctagttcctgaggaactgggtttatcaacatgtcgatagaccctccctaatcaatcaacaagtcttccttgaagtagatctcagatgagatcctggtctcttctatcagttctctagttgaattgtcttatcagatcgctagcctctcggttgcggcgatctaactctgcatggtgagatagaaggatgtactcttggatatccgtccatctcaagaatttgcatctctactgagcaaaaaaatcacaatcagcagggcgttgttcttcagttaggcttgtatggcctacagcatctctgagtctggctaactcgagaccaagtcaagatggagctcgccaatcgtaggctcgccaattattgggccaatctctccagcataatgtcgaagacgagatgcaattattattccaggggttgttgcgcctaggtccttcctttagtaggaggtgccaatggtgggtcttcccttggaggtaagggccagctacttggatccaccgagatgcttgtatcagtttggccagctgtagtggccagacttgtgacgcctgttttggtgataggattcaccacatctgtagtgttcatgacgattccagttgtgactggaacctaagtatctggatcttctgtttgtagctcttgagggagacccaaagatgc

SEQ ID NO: 385694 - DNA, 1366 bp, Cannabis indica
tctcaacctacacatctccaaattcgatgttctacaatagctgataatctttcaaaccgtagatctctcgatcagaaaccaattaagaatggtcctagcctgtttaaacaatctacttgagatcaattggaggttaagagaaaatacaaacaacaattagtaatcttaaaatgaaaaagtatgctaatatttggagatgttttagaaattaatgattggaaaacataaaatttgagtatatttttttagaaaaaacatctttaaatttttattgaaaataaaatagtaaaccattatttaatgtagaagcaatcgactacaaaaactaaagatcatatacactagctaggattgttatttttttgaagaaaaaaaaagctagaattgttattaacgcttttaagggatgatgaagtattaataatttatgttaggcattaatgagaatcatggggttccatctcaaaaccaattggcaatgggtggagtagcccatattcttatatatggctcaattctctaccatttattgtatgtgggacattgtccacaataggcattgtactagattttctattttatttttaaattgtaattttttatatgtttctagaggatataattttgtagtttataaaataattattgagtttttgttcatatgactgaattatcactaagtacttatttaagaaaaacaaaaataaatttgcagcgaaatctccttatgttttaatttttatatacttaaccctttatttgttttttttggataaaactccttcatgttttaatttttatatacttaacttctttattttttatttttttggcaaaactctcatgtgttttttatacacttaatgtccttatttagtttttttttttttgtggcaaaaaccttttttagatttatttggcaacaaattgctcaaaaaaatctataaaaatcttaaaagaattgtaaatatgtaattttgtaacttttttgccatttttagatattttcaaaaatatccctttcttttaacgaaattccaattaaatggcccagtgtatagtctactcggccgttcttttcccactactcaaattttctttctagtccttaatatatagtaaaattagaataaagtccctataacaagacccgactaactagactacttagtggggttcaccactcgctgacaaacggctacctccgaacttcacgtgtcagtttacttcaatttctccccacacgagtcaccgatattttctctcatcaccaaacgatattttcaattttttattatttagatatattttttttctttttataattaattacttctgttaataattaaaaaaaaaacgtattaac

SEQ ID NO: 385695 - DNA, 884 bp, Cannabis indica
atgatagagtgtactctatccacagcatcacgcatctcctccctcatctattccatcttttttcgtcgaaagtatctcgttctccatataattcggtacttggcatatatccttaatgtaaaaaacaaaaaataaagattgtacctttctaattttcattatgaaattatacatttgtatatctttttttataaagagtatacgtatcatctaattaattaatccctcatactaaatcaatattaaaattctgatatatcgatttgtaagatagatttaattacatgatatatatcacacctaataaaataataaatattaaaatcttctatttatgacaaaatatttgtgtcaatctcaagtacctttaaagaaataaaaatatgaagagtgataataaagaacatttaatttcaattttttaacaagaaaatgtatgacgaagtagttttttatacagtgatatttgtcataattatactatcattttgttacattgtttaaaaattcaaaatatctaaaagaataatgtaatatttttgcatgtgtttttagatgcacaattaagtatataaaagaaatatataagaaatatatgtacaattaagttgagaaataaattaaaataagtgattaataataatactccttaagtatataaaagaaaggggtctttttaatattataccaaaaactgattttatttataaaaataccttcaacaaatttttttgcgcatataccgatgtgccacgtcagcctaagtaccgaaattcaaaattattaccgaaaataggaaaaccttgaaaattctcgcttccagaattttcagtgttttgcaagttttaaaaaaaaagcaacgttttggttgcttttgatgtaaa

SEQ ID NO: 385696 - DNA, 1333 bp, Cannabis indica
aaatttttaaatgattatattatgagaactaataagaatattatacgtgtacagttgtgtgtaaataaatagtctagtttagtatttaacaaaagaaaacttatagaatagtaaacaacatagaagaagtgaggttttgagggttttacgctataaaatttatttgtggggttaagtgtcacaaattgtatagacaattttgccaccaataacccttatatagaaaaatttcagagagattcacttaagaacacaccataggtttgaacatggctcaataaccactactacaaaatactcctttgatgatccttttcatgtgttgcttagttggaacaagtcataaggttgtgggaataatgtttaacatgaaataaatataaatgacataattatattctatatacatatatatactagttagagctgaacgtgccgtgcgttaatgttattttaatgtaaatttgttaaatttttgaaataacataataattttatgaaaaaatcagtgtaagaaagtagaataaaattcacttcaaatctacacgaaaataataaatttagcaattatcagattgggattctatttttcatgaactatagaaaataataatatacgcttagcaatttataacttttatttcacaatattacaatcggcaaaattttgcaaagggagcaaagctaaaattatagatggtagggatcaatattgagtagtaaatcttagtaattaaaattcatttttgaatagtatatgtcgattaaggaaaatataatagctattaattttagaaagtttttttatttttacattttaaaacaaattttttttacatttttataaaaattcacatagaaactcatatagcaactactatagaaatttaacaaccaaaatccatatagcaaccctcatagaaatcactggagcaatctaaacggtaataaaaaaaatgttaaaaaatagtgtatgggataatactattattacatttcaaaataattttttttgtatatttatggaaatttacataaaaactcacataacaactaatagagaatctaaatcttaaccaaaatttacataccaacccatatagaaaccactaaaacaaccagtgaaacaacccaaaccgtttataaaaaaaataaaaaataagatataggataattttctaattttataaatattttatacaatgtttaaaaatataaatcaagtaagtaataaataaaaaataaaaatgtgagtaatactttaaaggggaattaacctctatactgtttttttaacttttttttttttctaaatttacgtttgggtttctaa

SEQ ID NO: 385697 - DNA, 4629 bp, Cannabis indica
aggacatgaaaaattgtttcatactcctcattacagactggacagattgcatttacagggatatgtctctgctgcaacttaacacaagtaggcagacatcccgaaactgctctccacaaaaaattgcagaccttgggaggcaccttgatattccagagagtacgccagatagttatcgattggtcagtaggccaagcccccttcaaaacctgcatgtgtttgtatgcactattaaccgtataccctccatggttctcatacttccaataccattgatcctccacagtagtatcacttagttgaatagaataaatgagagcttgatctctttcctcaaataaatcctggataatatcatcatcccaactacgagaataaattctcatgagactactaaccgactgatgcatcaaagcaggatggttagaaattacaaaaggattaatgtcaggtaaccatggatcattcataatagaaactgttgttccagcaccaattgatcgactaacacccgaaatcaacaactccttagcctcgaacacactgcgccaaacaaaacttgggttgtcacccaaatcagactttaggaaatttgctgcagggtagtatcgagctttaaacaccctcccaaccagagataaatcatgagtcaataacctccacgcctgtttcccaaggagagcgatattaaaatcacgcaaatcacgaaatcccaaacccccagcatgcttgtgtctacacatgcgtttccaactcatccaactagtacccctggactgagatttgcccgtattccaccagaattttgccatgagcccctcaagctctttacaagtatcaacaggtaataggaagacacacatagcatagtttggtaatgcttgggcaactgattttagtagcacttcttttcccgcccttgaaagcatccttccttcccaaccatttattcttttcctaagtttatctttgagaaaacccaggatggaatttttatttctgccaatagcatatggaagccccaagtaggtaccattttcatctgcctcaaatattcccagcaagtcacatatagtatctcttaggccagcaacagtgttattgctataaaaaacagaagattttgtaaagtttattttttgcccagaagccatttcgaaagtatgcaataactctttgacattaaaggcttcttcttctgttgctcaacaataaatatagctgtcatccgcaaaaagcatatgagaaattactggagcttgacgagcaattttacaccccgtgagtagaccactttgctcataacttttcaagagacatgatagaccttctgcacaaagaataaagagataaggagacaatggatctccttgtcgaattccacgagacgctccaatagggcctatttcatgtccaccatgaacaatagaaaaagacacagaactaacacagtacatgactaaattaatccaccttccatcaaaacccatccttacaagcatagctctaatgtagccccattccaatctatcataagctttgctcatatccaatttgagagccatgaacccctctcgacctcttcttttccttttcaaaaaatgcataatctcataagagatcatgatattatcagaaattaaacgaccttgcaagaaagcactttgcgtctccgaaataattgtaggcaagacatgtttaagtctatttgcaagaacctttgaaattattttgtagagaacattacacagtgcaatcgggcggaaatctcccatatcaagaggttgctttttttttggaatcaaaaccaagttggtagcattgataccagtaggaaaatggccagattcgaaaaaagaattgacaaaattaataacatcattaccaaccactgaccaacacttctgaaagaaagctggagtcataccgtcgggtcccggggacttgtcggggtgcatttggaatagagccttgcgaacctcctcacaagaaacaggttgcatcaaagattcattctgatcatgagtaactcgagattgaactgcagcagtaacttcttgccaattcgtttgggccgaggtgaaaagagttgagaaataattcatcatcacatcaggtaatcccgtgttccaatccacccataagcctgactcattttgaagtttctgaatggaattatttcgtcgacgagctgaagccgaagcatgaaaaaacttgctgttgttatccccatcttgaagccacaactgctttgatctttggcgccaaaaaacttcccgctgtgcataagtttcaaccaagttcagttttgcttgtttgaagttcgtaatagacaaatcatctcgcccaaacttccagcgcttcatctccttcttccaacgcatgattctttctttaaagtttcctgtatattcctttccccagccctgtaactgagcactacaagcagccactttcctttgaatatcactctcaacacagccctcccaactgtccttcaccagctgcatacacatgggctcccgcaaccaggcattttcaaatttgaaccttccaatcgtagaagttggaagctcagtcgttaagtccataaagatcggacaatggtccgatgttgagacttccatattaaaaagtttggcagcagagaacatatcaagccaagcttgattaaccaaacccctatcaagtcgcacttcgatccaattatccgtccctctacccctctcccaagtgaaaggatagccacataagtccatgtcctgcaaaccactatccgttagggcctgttgaaacccctgaatcaaaaaatcagggtagcgattgccaccttttttatcatcatgagaactcacattgtttagatcccccattacacaccaaggaagattagaactagcagaaagagagcgaagtaagtcccaagtagcctttcttttgctacgatttggctcaccatagaggccagtaaacctccatttgctttgtcccacaacattaacctccatatcaatataattttctgcaaaccgaataagagaggcttcgttttcatgtctccaaagaagagcaatgcctccacttctgcccctcacatcaacagcaaacattccatcaaatcccagagaaattcgaaccttttccacttggtcatgtctacaaagtgtttcacaaagaaatacaaagttgggcttcttttggaccacaatatcctttaggaattgaacattccatgggttcccaagcccatggaaattccatgataaaagactcataatggtaggtgggcctggaaaccagagcccaccaaatccacattttttgaatccatttgaacttgggccttattctttccttctaaagtgtcttcagaaattacaccactgcccatctcagttctacgcctttttgaatcaataaccataaggcaatcttcctcaacattaatgtccttattttccccacaattagtgccagtcaactctcctattacttcaattgttgatacacccttctgtctattagctgcctctttattacttgattcgtgtcccacgattttctccttcatcacagctgcttgagtaggatgaggatacgacattaattgtcccaccggagctgttctggaagcatgatctgagctcggctggtctgaatccgtctggcattcctccataaccactctgaattgtttcagccatttcttgccaatcatatggctggtacgttttggtttgactctcatccaatccccataaggtttaaccaatgattcggtggttatatcaaaacgtcgtgggcagaaattttcagagtgtcccataatcccacatatgaaacaaaaaatagggagatgttcatatttgaaattcgtccaaaactcgaccccagcagtattccgaagcgtcatacgtcttttgagaggcttattgacatctatagtgactcgtactcgaagaaagtccctccaaaggcccaagaaatttttctcatcagattccacaaatttgccaatgtagttcgctacatctttagccactgtagctgttcgaaaccccgaccgtaagtcatgcagttgacccaaaaatccacctcattcagagctaccaatctgggattctctccaggcttcaatcttgtaaacaccagaagaacttattgaaagtccatggactccgatcaattacgcttttgatgtcaatttcgtgataaaattgaaacaaataacgatttgtatctaattccttaacaaacataccttttcccggttgccataacgaggccaatagatgttgcatagcatcaaaatcgattgacctctctgttaaaaacctccctacaaggcaccatcggtcgtcatagtctttctcagtttggtcattagtgtcataatccaaaacaacctctgattcttcatcaagccatatattgtatccatcctcctcttccaccagtccttgccgactactagaagccatgataaacacaaatgctaccaaaagatgacaaaaaagaactttttcaataagaaacagaacacacagaataatatttctctagaagaaagagaacacaaccatgtttaatttttctaacatgtggtatcagattgcctattgtatatga

SEQ ID NO: 385698 - DNA, 1224 bp, Cannabis indica
atatctattttatttgggaggcaaatataaaataattatacaatatttttttcttttacaaattttatatacaaaattgtgtaattttcttatctatatagtcctaatagtttggttgattacaagttctctttttagtattacactttgatatacaaatttcatatttatataatttgttaaaattaattctataatctaaaattctaaatatttatatagtaataatttatctgtaatattttttttaaatatttgttttttctgattcatttatttagtgagttaaacatatcaagctgattacacaaaaatagtattgcaacataataaaagatacttagatagtttcaatatcattctttgttgttgaagaaaaaaaaagtctaaatagttctatgcatcatcagtcacaagagagtttattaaacttaaaaattattatcttttatttattttattataaaaacatatgccatttctctgttaattctatcatttttaatatttatcataaaattacaatctttctacatattttgacaataataaattttgtttataatttcaaaaatgttatttcatttataatacatatattaaaatattatattttatattatatcgcttaattaatactgaaaaaattaaaatatataaagattataaaaattgggtaataccgcgcgaagcacggcttagttccctagtttattcataaaaagaatcataacattaacaaatagttattgttgactgggaaaattatcaactgactcggagtttaataaatgttgattaatcaccaacaaggagttaaggataataaataaatagaaataacacacaaaattatagatgtttggtcccgttagttataggtagtgacctactcccctttgtggatgttattgaagaagaaatcaaggctcgtgtagccttgctcaacattcctggtgtcgtttctcctagtcggcatattgactacccggccaagccctttttgagacttatcttccttgtgggatttcttgtaaaaaattcctgcaaggtgagtcaatttccccttctccggctagcatgttgacggcccagccagatagttcttggaaggaaatttgtagctcatagatatcagtctcatataagatttgttaggtatacttctgcccagaaatcccttgtcaagtaaagggttggctatatttgttggaatatatttta

SEQ ID NO: 385699 - DNA, 591 bp, Cannabis indica
ttagagtttcattaaataatttgttgtacaatggaaaactgtataagggaaaactgaatcccatctttattttataatcctttaatttatgcttgtggcataactttagtcaaagatattacgatcacctaatttaatattgcgtgcttaatgaccacttgtcacacctctttatggctaaatagcttccaccataactcttatagttcttagccataaatactttagttgaatttgtcgctaaattttattaatggtctggatatagaattattaactataaggcctggtataagactctataatacatcatatatatgatgtatcctatgacttcaattaatggaagtaataattaagatttttcatgttacaacttactggtaatcttaaggacgtaatcaatattgatttaatgtaagtggttaactatatttccataatgttagttcatcttaataaagtatgtatgaatgtaatctttaatgtatctcaataaagatactttattactttgtatgaaattataaagggatctaaacttatgttcttctgatactacttaactgttgggctttatgccctaaataa

SEQ ID NO: 385700 - DNA, 1893 bp, Cannabis indica
aataactaagtgtatcaacttgggaatatgaaggacatgattgtccagtctccaaggccttatggtcaaagagcaattcttaagtttgctcagcacactggtgctcatgtcattgctggaaggcatatgaaccaaccaagtcatcattggtcatccatgtacaaagcgagatgcctctaatctatgtacaaatcgagatgtctctacctacgttagagtcaaccgcttgaagataagaatgataaacggttatgttatttttcagtgttatttacacgtgtttatgtggaacgtgagcaaagcccacgatttcatgaaaaactgttatgcaattcaaatttaaatgtaaataactaccaacctatattcctataaataggggccgattatacagaataatggacgataaatcttagaggagaaaagagatcaaaaattataactttgtatctagaaatatcttagataagatagactcgtggattatgtagagttaactgcaaaaccacgtaaaaacttagtgtcagtattactattctacttattaattttcttatatctctgtttaattttattacgaaataggctcattaattgttaattaaaattgcgttaacggatgtaaatggcaattttttttgcttagcataatgacaaatggaaaaataaaatagggaattagaatcagcatgaaactttaaagctttattcaaaagatgagtttttacacaagaagggtggcccaatctatagtgtcaaactgtttcatttgaaactattgtatctaaaatagaagaataaacagaagaaaagtttttattactagtctgattacaatttaggtaatacaaattgctaaactttctacgcatcccaatcaccttggtcttcaaagtgtcctagatgacatagtttttatgagagaacaagaaagtacaattaattgtagctattaaataattgatagataaaaaattgtatttgaaagagggaacataaagaacattttcaagaacaaggtcaggtgttaaaataactgttcctaggcaagatatttcagtatgtaaaccattaggcaaaagaacagtttttagataaaaatcaatgtaggtgtttttgaacaaaaaaaaatgataggacacacatgatgtgtggctcctgtatcaatgatccaattggcattatgaacaaaggaattcttactaaaaaaatggaaaaccacaagttgttcatcagaagcattaggagtgttagtctcagttattttttaaacaagtaatgccatgagtttctggcattgcacacatggcaaactagaaataagatctctctccattggcacctcctctagttttccttcatccatgcctgaacaatccacactaataaacttccctagaggtcatttagcatctcgagtaggaaaccttccatgaagcttatgactaggggatatccattgagcttataacacctttcaattgtgtgtccattcacaccaaaatgtgtacaattgtactttgatcaaaaaggttaaacagctctagcaaactgtccagagttgctcgatgatgatttgtccaaatctgatgaactattgtatccactagtcaatcctctttgtctctcttcttgaacaacaacaacaacaacataggctttgttcacgcttggaagaggatcacacatcaagatttgagatttaaaaaaattgttagaatcattcaatccaacaaagaattctagcaagtgatcctcctcttgatattcttgaatcaccttcatagcaccacatgtacaaacattttgtggtccatactctctgatctgatctcataggactttcaatcaactgtagtaagtagtcacagtattcgatccttgagtaagact

SEQ ID NO: 385701 - DNA, 1447 bp, Cannabis indica
aacaacacaaaaaaaataaaataaaatgcacatatatacatgacaaacaaaaaaaacaatacaaaaataaactaaaaatatacaccccataacaaaaacaactaaaaaataattctacaataaaaaaaatacataaaaacaactataacacaactatagaacacctaaaaaaaaatatgaccgcgatacctagaacattacaggtttcgtggagctatcctcgatacctagaactatcatttgtaatgaccgcgaggtctaatcttatttatataacgctttgatttacaaaaaaaaatatatgaaaaatataagaacaaaaaaaaaacctagtttttttttttttttttgaaagaaaaaaaaccagttttaaaggaaaagaaaaataacaaaactatacaatatatatgaaagtaatataaaccgtactaccctaaaaatagtataaaatttagtacgtaaaaaaaaggcacaaaaatatatgtgattgtgacgaaaaagaaggacaaaaaatatttaccaatatgagagcctttatggaagttctatcaatagaaaatccaagcgagttttccctctgaatccaaagcaaaatatccacaaaatctttctcttcatcatcaacattcttatttgtattcatatggtcatgaagaacaccttccagaaactcatcgaactccttagccactttatccattctaccatccaaaccactcagacggctcaaccaaccaagcttaggaaaatagtctcttatatagaaacccccaagtagctccgtaagctcccccagaagctccttaaacctcttcccaccactttcttcaccgtactttctccccaaggccaccctacaaacgacgtcgttggttagccttacaaacaactcgctcaaattcaccccagtcccacaagactttcgaatcttctcaaccatgagcttggtctcctcttcccttacggctctataggactgaacccttttattattcaacagatgaagcacggaaacgctctttatctgcctccagtactcgccataaggtgccgaagcaatgtctctgtagttgtagaggagcttctcgagggcacaggacttgggtcggttggaaaaggcaatgtcgtgagtcttcataatctcacgagcggcggtggcagaggagatgacgagaaccggcacgctgcctagccggagctgcatgacggggccatagcgcctgctccaggcctgcagcgttcggtgagggtacaacccgagctggtggaggtttccaattattggaagctttggaggcgatggtggagaatttgttttaatagagaaccatgatttatatagcaggacaaagaataataaggttgctaataaaatggtaaaggaagagagattattactggttaagtctaagaaggacatattgtaatggaataataataacatttg

SEQ ID NO: 385702 - DNA, 557 bp, Cannabis indica
aaaaaaaaatcaatggtttcgtaacatccccattatatattacaatttaacactaatatttaccacattaattcatttcatctagttatattgcattataaaaaaatatagtagaatatatatataatagggtgcaaaaatataatttaattatatatataaaaatatatcatttaattgtattgtaggaatcacagtcaactcaagagtgaggttgtaggagcccacacagaaccacctaagcccagaaaattcttttacaaaaaggcctaaaaactattttttttaaaaaaaaagagttaattgcggtaaaattttaataatttcactttgcttgtaattaacccttaaaacctaaattttcacagcaaaactcccaaaattacgatactgttagtaatttataattttttttatctaaatttagctgttaactattatgttggattatttaaatggacacaattttattaccacataaataattatatgagaaaattaaaataaatagaaaatatatatttttttcctaccatatcatattttttttgaaaaaa

SEQ ID NO: 385703 - DNA, 1263 bp, Cannabis indica
cttcctctttctcacaccaccgagacaccaagacccaggcaccgagaccaccaatcaccaccaccgaacctcctctcctccaccaccgaacctcctcatctacccaaaactcaacccaacaacctccaaatctcacctacccaaatctttctctcttcctcctcctcagcttatctcaaccatcattaccattcgtcaccacccccacgaatcgagactaagatagaccaccagcagctcttcctcactctctcttcttcttttgaatttgcatggttttctagccaaaatgtgattatcgatgggttatcgatagttttgtctgtgcactgctatttttgagtgcaaacagaaatcatcaataacttatcaacaacctatcgataacaaatcgataaatgtcatcgataaatatcgataaatgccatcgataaatgtcaatttgacaaaattgtgttacacaaacataaatcatcgataaacctatcgataagcatgttttggtcagaaaatatcataaccacaaccatctaaggtctgaaacaaacacaaatccaataaaaaaaacaaataaacacgaagatgaaggcaaaatttggtgagcatctagttgggctcagagacgaggtcgccttctcagtatggacaacgctcgcagacgaagacaaagaaaggttctgggcctttgggtttttcaatgcttgagtactatggaggtctgagtcttgggcctctgggtttcgtctggatttttgagtagatggggaggttcggtggttggtggtctcggtgcctgggtctgggtgtcttggtggtgcgaggaagaggaagaggaagagacacagagagagaaataaaagggagggtattttagctagaaattgaaaataatagcatttaattgtataaattaattatgattctaaatttgttagggggtatttttttaaaacatgtaaatgaaattttctttgtaaattagtaattttagcccctaaactttgacaactatcaaagcataccccctccctcaaaataaaaaaataagaaagcttcaacattttttttagtaaatcttaaaaaattaatttagattttaaataaattattttaaatgattatgaaaattaaaaaaataaattaaattttaaaactaattaaaaaaaattatttattttttattaaaaacttccatgtagatattaaaacatgtattgaaaattcaatttttgtaaaagctaaattttacgggagcaatcttga

SEQ ID NO: 385704 - DNA, 2876 bp, Cannabis indica
gagcagggagtgcaggcagtgatgttccacgagcttgagaatgccttatcccctgcggaggatttatagtgttctatatcccaaaacaaccatgtgctcgtggacgaccccctgtccaggataaataattggaatccagacccattatcccatatgtcccactcgaaccaaagttacaatctcatccttcggataatcacactcgttggtggcgtgacccttctctccatgatactcgcattctttgttctgatcatgtctattccttcctttgtgtgacattcgcagaggctttctgtaatggaccatgttgtaggttactttgtagatgttctctcatgtgtcaattaaagtagtatattcagtatactttggatcatactccttcctcggcttttttgaggagtcattgcgattattgcccttgccccctcttttattttgggagtggttcatagttgattctgcaacctcgatttttacctatctgggagcctcaccacaccccgtctgtgccatcctgtgcctggaaaaatgagtctgtgtaggtgagagatcagaggtagtgggtccgtaaacaattggggaaagctgagttgcgagaagagtcaaggctggggccagaacttggggtatgaagctgggcgtagctgtggaaggggttagagccagagggactctaaaggcttgtatgtaagcatcttcaaggttaataataccttgagcctttaacataaactcacttaatgtttcgactctttttctctgcatctctccccatagcaaagaaccaatagccagtccgaattgaagggcaagggccattagcttcatgtcatcgctgactttggtcttggcagcaaccttcatcatcctttgaataaaagcctttaggcatttgttgtgttactggttgacattggtaagagagccaacttccatgtccttatcacgtgcgacactaaactattcgttgaaggccgattgtaaatccttctagctattaatcgatcccggagaaagtttcttctaccagtcttctgcagacttggtcagtgttagggaaaaacataaacacttgccatcgtcgctgactcgtgccacttgcatcattttgttatattttgctaagtgtgctcgtggattggtccttccctcatacaactcaatatggaggcattttaaagttttctaaatgtgggcattccgcaatcctccttacacatggtttcatgtccatatcttctgaattcaagagggctatgcttttctttttgaccagcttggttagagcagctatcttctcctccaacctttttgtgtcacttttgggaagatcacgtcccctcattttatcacttaggtggttcttaaggtcacccccacgtggccttgccttttcacttttatacctctcgtacttggcgtccaatcgtcgtcggaggtctatagtggaccaactgtcctcaaaattcccaatagttatccttctgtcctagttgacagaattgctagggtggttcctccgccccttgagcttaggtgcttttgtacttttcccctttggcacgattttgcctctaggatcagaagggcgtccaggctcaaaagcaccagtggccttctgtgtcctcgagggctggccagccagatttgtgtctttcaaaggaggttttggagcaaacttttgtgggggcttatttaccttgcctttacctttattcttgcgaggattcaaggtttcgacctcagtttgcctgtgagcaagctctttggccattacttccaccaaagggtcattgtcaaacttcgccaagtctttgaacttgttttggaggtgttccatcattctcttcatttttttagttgagcttcctctattttactaactctgtctgtgtagcctctagttctttggtcactcatagcaagttcgggtcctggtcatagtggtaaccatctttgtaataccagtccttcacgtagccatcgccgtcgtcctcctattccctatcctcagggttttggtcatcgttgatgccatcgaacacgttctcggcatcctctctttggttctcagcattggttgtaccttcttatcttacatcgtctggctagagactggaggcgagaaagtctgcctcctccacaacggtatccaaaggagttttctttcttacgttctttcaagtgttcacaatggttgaggtggtgtggcgactagcaaacttttctcagctctcaatggaagcaccaattagagatttttgaaaactaataaaatagttcttaagaaagaaataaaataataaatgatagacatgtgacttttacgtggttcgggcattaataatccctagttcacaagtctgttgtattaaccttacatgcgagtatttgaatattacaagtgtttactatataagccctagctctttattccttttgtttttcttgaagaataagaaagctagtaggaattttatcataggttcggtaagtatgaaattgttcaccctttgtacatagaaaatgagggtatttataggcttacatgtgggtaagggcattccctttacccacctagggtttcgtactactgcctattgtaagggtaaaagaatacaactgtaaatataaccgtccggcattgaagaaacttcttgatcgtgcgatgcgcggaggcagtggattataccatttggataaaagacacgtgttgctcaaaggtttctcctttgtagaatactctgtagacaggccgttgggaaaaagacatgtctagaggttcgtatgcgcactacaatggcctcgcatgacggataagatctgatcctgtgtcaaaaaaatgtgtaaccgtctgtaggtcgatttcc

SEQ ID NO: 385705 - DNA, 891 bp, Cannabis indica
tctctctctctctctcaatgaacagaggggaaagcataagcatcaactgcaccatgttatacagttgcatggagaaactaattagattagttacctcattctgatcccagagatcctcgaatttgacagggtcgccggcggcagtgaaaatagtaacatcgccgagaatctccgcaatacttggatcaaactcagaaaccgcagctctcgtgacgaagcgggtggcccatcgtggatcaggtttaggggaatacagggaggaaaaacttgaggcttgagtggtgaaggtgagaagaggttgagaagaagggtgggaatagagccgttgagatggtgaggaagagaagaagagggaggagcgagcgttgacagcgagaggagagaacaaggccattctgattagggtttcaaagaagtgaaattcaagagactctgctatgctatagtgtggatttgtggagtaggaactaggaaggagcagaaaaaaacattagtggcgggaggactttcttctatgatgtgcgacagatatcaatacgacgccgcttcattcaccactcgatttgtctttctttttttttttttttttaaaaaaataagcttctaatatattactaggttaaagttaggcataatgcttaattatttgcggcaaaagtccccaaaaagttcacgttgatacagattagtccccaaggtccaaaaatagcggcaatagtcctcaaggtcacactttttatttgtccgttggtctccaagttaacagatccgttaaacccaattcaaatgccacgtgtcgaaatattattggtggatattattattttaatttaaaaaaataaaaataaaaattaataaataattttaaaaaaaatttcttttttttttctt

SEQ ID NO: 385706 - DNA, 1043 bp, Cannabis indica
gcaaattactattaattttcctttttctttcccatatttgccaggctcttgaaggtctaggagagagtcaggaagtaaaatcacaaggaattgatcagtcaagcgcagaccttactgctgatgctactgaatttgatgacaaggagagagaaaacctccccacatcaaattctggaaatactaaagagtttcccgcatttgctggtacttctttggatgataatgaatggttatctccaccaaatagtatctgcagtagtggttctgaatctgatattacctcacctgaagcaagttttcctggtgaagaaatgggacaactttcacaagatcttgggaggagagaatcgccggcttatcaagattctgttcatgtagctcaaattgactatgaagaaattccactttttggaaagtcacaacctgtagcagagattgatgagacttatactggtctgtttaattcagcagctaatgaaccaagcgaacatcagaaaactatagcttcaccaagtgatcgtaaacttgctgctcctgatgctttgcattcttcaagtaagagcacagaggaaaacttcggaggcagtgatgaaaaagcttcgctgaacaaggttaaaattaaagatgaagattgtgaatctctttttcctaatacaagtgctgctgctcgagcaggcaggggtgagtatgaataacgatcatataaaagttctttgatctaaactctgttgcatctttcttgccatttaacaatgttttcttggtcaatatgcttcacgaattgtattacatcagcaagatgaaaatgatcatatagttggctgcttgtggccttgcattaggaaacaattattcagtattaaaacaatataattaattctttgctactattacaatatacacaaacggcagaattgcaatgctgagaaatcattgttgctgacttcaattcatggaagtcatgactaatgtgtgacgaaatgcaagaatagttgaataatagaagtaggttacttgtatgttctgttatcagcaggttataa

SEQ ID NO: 385707 - DNA, 1243 bp, Cannabis indica
ccctaaaaactattatattaaactatatgggacccgatgtttagttggaccaatagcgatattaacacataggagggtgctaggcaccactggtgctctttagcatttctctttaatataataattttttaagaagtatcgcaagccaatcgcaaagcagcacaccaagaaagtactaggcactactgatgcccaataacaatgctctataattaagtatagagtctcatatatcttaaggaaataacttttaaggaatattagtaaccaatcgtaaaacgccatctataaaaggtgctagacactagtgtccaatagcaataatagagttgaaaaaaaaacgtacttaattttttgactttagaatgaacagaaaatgaaaaacaaaaaaactttacaaaataatagagttgaaaataaaaataaaatagaaagggagataaaattttgaattttgaattttaaaaatatatttaaaacatataaatttcaatatataatttaattttcaattttaatatacaaaacctattttataatgtcttatgttaagattctaattttatatcataactttttcttttaatgactataagtgagagatacagcgatgataacgatgatgagtataagtaagatacggcgatgacaacgattatgcatgactataagtaagacacgataataacaatgataatgactataaatgagatacgatgataacaactgttgagatacaataatgacaataattttaaatgataaagatataaagatcatgcattatgaaaaataaatatttacttaaataaaaaataataacactttaattgacagcccaagtttcatttggagaagcatatttgaagtaaaaaatctgatctaagttccattgccactggtgaaaaggtttcaattctaagggtctgtttggaaacaactctgtaattactatgcagtgtaattactaccctagtaattacactgtatagtaattacattgtattttgaaatacaaggtgtatttggatgtcaagtggtaattacatgtgaattcctaatatcatgtttgacatgatagttagtaattacacagtaaattaatattataatatttaaaaataaatttcatcaattaataatatataaataaataataatctcttcataatataaagtcaaaactataacaatttagtagcaaatatttaaaataattttttttaagactatctaattgctc

SEQ ID NO: 385708 - DNA, 3047 bp, Cannabis indica
caatccaggaagatgatgctgcggctacatcagaggtgttcttggatccctgcgaagatctcgaaccagaatggaaggaagaggtatcggtccctgcgatttagaacccatcagcgagaagttgggcggacgagcctgaagctcatgatttccaggagtcggctaagattgcttggagtaaattcaaagtgaatcaggtgagaaccctttcttctcaacttaatttcactgaaccactaaaaataagtgatcaggtggtagctaaacttgatttagaggaagtagaagttgaagcatccttttggagatcttcaattgtctgtattgtcttgggggctaaccctccattcaaggtgtttgaaggcttcattaagagaatttgggggtatttgggagttgaaggaatagtgagaatgcactctggttttactttggttagtttcaaagatgaagttacaagagatataactctagaaacgggggtcattcaattcgataagaagctagtggtgttacgaccttggaccgaggatatggatgctactcagatgattaggtctgtcacggtttggattagattgaatggtttggggttacagtattgggggaagaagaatttgagtgctcttgtaagcactattgggaagcccattatggctgacaaggtcacattagaaaggttgatgattaagtttgctcgagtgttggtggatgttgaaattaaggatgatcctcgaagaaccatagcttttgttaacgagaaaggtcaactggtggaacaacaaattgagtatgaatgactgccaacaaaatgtgcagcctgtggtatgttgggccatattgtgtcgaattgtaacaagggtaaaccagttagttggaagaaaaaacagcagagggagaaagagaggaatggaaacatagaggacatggctgttaaggagatgccactaaatgataaaattgacaatgcttcagctgaaatggcagtcaaattctcagctgttagtttgggagctaaagagaaacaggttattcaaagctctaaggagtcccaggccatacagagttcgaaggagggaaatgataattggattactcccaagaggaagggctccaaattggttgacaatgatcagtgagaggtaaagactagtaatggctttgaagctttgaaggaaacagatggggtcttgatttctaatcctgttaatggatagctgtaatatcattgggtagaatgtgagagggctgaacaaagtcgagaagcaacgagagttatttgattgttgcaagttaaataaagtgggttttggggctctctttgaaaccaaaattcatcatgatagagtagaaagtttagtcaataataacccagattggaaattttattctagtcaggagatttcgtttagaatcctgttattttggaaggacaagagggtgaaagtgaatgttttatttgaggataagcagctagttcattgcaaaatcaaaatggttggttttaaagaggagtttttcctcacagcggtttatgggaagaatcagatgagtgagaggaaggacctatgggacaaattggagggaattggtcacttgaatgagccttggattatccttgggaatttcaatgccatgtttagctacaaagataggtgtggtgggaggaaaatcaaggatatagagatccaagatagcagaaactggcttgctcagggtcaggttgaagagcttaaatcttcaggttctttctttacttggtccaacaaacatgaagatgggagtttagcctactcgaaattggatagagtttttgctaatgaaaattgggttgatgcttttccgaacgttgaagccagctttagatggggagctatatcagatcatagttattgtctcgttaagcacattacaatcagcaacaaaggtctcaagccgttccgtttctgtaactactggacctctaaagctgactataaggtgaatgttttaaacacttggagaaagaggagtaccacagaccttaaaagtctttatcatcaattacttaggatcaagcatgttcttaaaaactacaatatttctaagaatgaagatctgagcaagagttataaagacgctaaagaagcttacagaaaagctcaagagcttgcggcaaatgatcctcttagtgatgctgcagcagagggggaaaggaaactctatgaggcttttttggagacttaaaaacagtatttaagctatcttcgacagaatttaaaggtgaattgggttagatatggggataaaaaacatgaattacttccatgctatcatgaaaaagagaagggttgagaataaaatttgttcctttagtgctaatggggagcttattgataattacgatcgggtcactgaccacttcctttctcattttcgtagctatatggggaggaaaagtacagcaactagaagtctagatttggaatgccttgacaatggaaacaaactgaatctcttgaaacaagtgagactaactcaacctttcactaaaaaggatgtgaaattggccctatttggaattcactcttcaaaaagtcctgacccggacgattttggggctggcttctttaaagatctttgggctgacctgggagatgagatttctacggcagttttgggtttctttcagcttggtcatcttccaaaggaggtgaatgagactaccatatctctagtccctaagtctgagaacccccaaaatgctagtgactacagacctatcgcttgttgtaataccatttacaaatgcatctctaagatgatctgttcaaggctctcagaagttcttcccgatcttattctatgacaatcaaggtgccttcattaaacgtaggcttcttgctcataatattctgatcttgcaggatttgttgaaaggatatacccgaaagaacttatctccaacggtgtatcttaaagattgacttatgcaaagcatacgacacggtggactggaacttgttgctgatcttttaaaggggctttgctttccatccaagttcatt

SEQ ID NO: 385709 - DNA, 1981 bp, Cannabis indica
tttttgtgtatttgtaaagtaattcctatattctaattaagtaattaaattaaatataaaaattcattttttttattattggtcattcaatcaaaatctaatagtttaatatttttaaaattaatatttatacttaaatttatttattcgttattgaattaaaatttaatagtttattattttaaaattaatatttttagttaaatttatttaataacagtgattaacaatcattaagaaatatttttcttatatatatgatggatgtaacatttttgaaacttatatatagtatagtagtaaaaattgaaaataatttcagtcctttcgaaatcatattaaaaaaaatgttaagaaatatgtatattttttcttttttgagatttggtattattattattttttttttggcatatgttagccaaatagacaaattggaaaaataatgagttattcagacggcaaccgacgttgaccatgaggatgggaggggagacaggtcaatctcaagggcagctaataggctttaaaatttaaaaccccaaaatccctcttcaacaaaacgcgttggttcatagttgtaccatggaccatcaataataataataataaattccattcttagtctaggctcttacttcattttgtttcagtagaaaaattaaaagtagtgaaaaaaaaataagtaattcatttggtttggtaattagtaattaagtaaactaataataaataagtgtactatataattagtaaaatttaaaacgcaatatgcattgcatatgcatgtaccttaaatataattgattgcgttgtatatatatacagtaatttctctaagtatgtctcctttcacgtttgtgtaagttacgtgtacaatatggataggaaaaaaaaaaagaaatttaaagagcattagtagtttttgagatttttttaaatgggtatatatactgtattcataattagaatgtacggacattgatatttttctttgtttttgtcatgttaatatgtgtgtgttttattgaatttgtcaaaggaacctgaaaataatattttggggccagtcaaaattcattatgtgaggttttaaatttgatgctatacgttatacctttttctgtggatttttatacgtttactttgaccatacaaaaattaaaagtttggtcgactagaagtgagtaattttcttcaacaacatttttctctgaatcaataataaagattcgaaaattacaccacttacacaagtccatatatacaactgcagctaatcaacaagatatatttgagtaaagaaaaataattaattatatttttcaatgatgggaaatttatttgattggtgctgtgactaaattacagtatatcacaattggaagaccagataaggaaacgtgaaattcacttaaagttatttgatcatcggcgtgtaagtgtccatgtcttaataattattaatataactgtttttttttctctccatattgtagtaatatttttttataactatttttttctccaaggacgactaaaagctccaatacaaaaagatattagctttgttcacaaaaattgtgtgtgtgtgtccactgtccagagacggaagccttgattggggggccaaagtgtaaagaaaaatttataggggagtaaattataaattttgaaagaaaaacctataaaaaattatgaaaattaatacactaaaatgtctttataaatcaaaactttggaagaggtatagggtaataccatggtaggacctagcaaaagtttcccactggtaggaaactttttttttaccgttgattttagatcttgtggttattatgatgtaaggtatatactcttactataggactgcttgtatacaattaaaactttatacatattataataatatttaataatatatttattttaaaaaataaaataatattaataattaaaaaatttattaattcatctcaaa

SEQ ID NO: 385710 - DNA, 1115 bp, Cannabis indica
accttgctttatatcgtgcctctcgtacacctagtatgtattctttatatttgtacacccttttgtatccgataactttaccatcttccggcatcgatacaacatcccaagtctggttctttcttcagggagtgcatctcttctaatatagctcgattccatgtcttttggtctttgcttttcattgcttgtgcatagctggtaggctcttcatgcacaattagcaatatgaaatgcaaatgcgattaaatcacgatgtctgtatctttcaagagcctttacttctctccctgctctgtctctagccagtttataatttttcaaattatcacttttggaatcatcttccgaatcatcacttccgtgatctacaagtgttttagtctccactcttatcaaaggctccacctcaagctcagttcctgaagcttcaattttatctcggtcagtatgggcttgacttccagcaggtttgtcaataaattccataacatatttattaaaagttacatccttactaactatatgtaatgccctaacccgtaaaggtgctatatgtatgctattataaattagtttttaataataaactaacgatttatgaaagtgtgggctaattaaaatttttaataaattaacttaatttcataattaaaacttttattacaaaataccctggttttggggatccccttgtttataaactctaacattttactatacagttattacaaaatagagctcattttcaaaatacagtcaaaagttggatcctgtccactaagagctaagatacaataactgatatgtacattgccgagagactcctaactcatggttggtccagctttcctttactcatacatgcaccacagagcacctgtgagtcacaaggactcagtaagaaaagaaagtagaacacaaacatcacataaaatatatatcataacaatgcacaacttatgaacacatcacacattataaggaattattcatttcataaccaatatcatataaacaattatatgtcttataagataagctgactttgatgccctcaaagcatccttacaacttgttacaaacgagctccatatgtcactatcattgcccga

SEQ ID NO: 385711 - DNA, 1120 bp, Cannabis indica
gggtaagattttggcaaattttacaatacactttttaaaagtgatacactggtatatttttatttatttgagcgatttttttaattaattttttgttatgttcgtgtatattatagttatttaagacattctgtcaaattttgagaaattttgaaaaatttaatgcgttgaaaataaattttaaactatctgttacatgcatctcttttattttatacgcgtgttaaatagattgtttgaatattaccttctatattgtaaattatttcttaaaattttacgaggtgtgatattaaataactataacgcatacgattatgaaaaattaattaaaattaattttttttttttatagatttcaaaatagataccgcgtatcaatacacctaattatatgaagttataatatacaaaaaattaaagagaaaattagctgtaataatttttaaggttatatttttttgtttgtctgttggtagttaattaatatccaattttaattactctgtatactaatttagaattattacgtgttgaaatattattagtacatgtgacaattaaaaaattaaaataataaaaaaataatataaattattaaaaatctttaaaactattattatttcttttcttttttcaatttcttattcttacttattcttcgttttcttcctcttcagcatacactccgactccagccacattgccaccaccaaaaccaaatctccagccaatcgttgccacctaaaccttcatctccagttgcaaaactcctcgacatgtgtctctcctccctctgactctctcaatctctttgccaaaacagccctcaacccccgattcagccgtgtggatgaactacgatcaccacaatgcgacccatgatttttccatgcctccttcgtcactcctccgacacttgcaaagtcaaaagttagggttttaattttttttattcttcttcgtctccccgcctgtataaaaaaaatatcgagacccaaatttcccttactattccctcacctcaccctactctcatcatcatcaaatgcataaaacctgatggttagagaaatattattatcatctaatgatttttttgacattaccatgcatcatt

SEQ ID NO: 385712 - DNA, 794 bp, Cannabis indica
gatccactcacatctacataattgattctacctaagatcaaggcacacattaatgatgaagatacaatttttcaatttttgcgccagaaaattgaacagctgtcaaaatatagccatttttggaaagcaactcctcattggttgcgcccttccaccatcatgtgatttacacggggatgtactacaatcaaagatacaagtcaccttcttgggatcgagtaacacctaaaacctcatgatattatccctcatcctccacatgttcatattgaaggagtgaagcaagcttccacatacgtaacattctagaagcttggagtgtaaatgttatcagtatttctagcattgaacatattcatgtttacataatgggcccattagtaggttcctcagtccagataaagtgggccaatcccatttagacaagtactttctaggaacctatcaagctctgagaccatagagcattccatcattgacaactcattcgtggaagcaagcctggaaccgtgagggcggaagggtgagacagtgtgttcctagaagactcatccattatccgttttcattcctgcacataaataaggaaacaatagttactagatcttgaaagaggatcttatcatgctaaatgggaaaacttcctaaaacggatatcaagcaattaattcacagatgattgcccataatcaaagaacacggtgttaacaaaatccaagcaaatctactctacctagtcagcaaatcctctccatcatgggctggacttaacgaagcagcccaagtgtgttatt

SEQ ID NO: 385713 - DNA, 876 bp, Cannabis indica
accgagtctaatctgattatgcaattttgtattagtattagatttttcttgtttatcctttttgtgcattaatatataaattttgaattaaaaaaaaaagaaaacacataaatttatttatatgtataatgattaaggagaggaatttgaaaaacaagttacacatgtataaataatctgaaccatattcgaaatttatacttaattcggttgattaaacactcattattatatatatttgtaataataatccaattcatgaatatatatatgtctaacaatttctaattatgtagtataacaattaagtccactttttgaaggaccaataatatatgaatgtgtattctggacgatgaggtcaattaattaagggaataatccccaaagttgaggggcttgcttggcagatgtgggttagataagctcgtgcctaacttctgttcctgatttggtagttgaatcattctgcaatgacaaacttttaaatgttttatctatcaaattatagaaggttttattatgtgccaaaaaaataaaattggaagtttttatattattgtaaacttccctttttataatcatgagatgatgttgattatttgggtacgtataagatttttctttctttgatgtgaccatgtacttttagcattattaatttaataagacaagtatatttgttaattaagctgatcactaattaatactgtacatgtaaagccaattataccatgtatataaagaattacaatatggagcataagattgtgttaaattttggaatatgataaatgaagtttatttttaaaactgttataaaataatataaaataatataaagtagatgagaagaaagaagaagaagatgaagag

SEQ ID NO: 385714 - DNA, 1154 bp, Cannabis indica
taaaaaatccgagacatcccatcaattcctggtgcttttagagcattaatttgggacagcgccacctttttatcaatttctgtgaactcggcaagcagaagttcattttgatgtcggctaagtcgtaggggaacaatgctttgaatggttgctaatgtagtttcttcatgatcaggtgctgaaaataaatctttgaaatggtcacatatagttcgctcaatgtcctccttagtattcatccattgcagattgttatcaaagaggccttttattcggttcttttttcgcctagaagtcgctttttggtggaagtatttggtattgcaatttccatgggttaaccaaatggctctacttctttgtttccaaaaaagttcctccttctcaagatgtccattgaggtccctttccctttctttcagcttggcaaatccgtggctggtatgatctcgagaccacttttccacttcttttttcagctcttttattttggcttggttggttttcctttggcttgtattccattgatccaataaagtaccacaaatgtttattctgtcattaaggtctgctgccgagcctatatgaataacctcagtccaagcgtcttgcacaatttggtgacattctttcttatccgcccaagccttttcataatgaaatctgtgtccccaccgttgttgagtcttcgcatcacatggcatggtgttaaaggttactagtaatggactatgatccgaacaccatctgctaaggtgtttgactttagctattgcataaatctgccaccagctgttgtttaccatgactcggtctaatctttcgaaaaccatgttggttgcccttccattgcaccaagtaaacttgttgccattgtattctagttcccgtagtgcacatctatcaattgcattattaaagttcttcatgagataaccgggtttgccaccaccaccaagcttctcatgaatcgctctaatttcattaaagtcgcccccgcaaagccatggaccattattattttcagcaagccgtctaagtagttgccaagagtgtgtcctttgagatggatcgggatctccatagaaacccgtaaaatgccaattaagatcctcatccatggtaatccaagcatcaatgtggtaagcattaaa

SEQ ID NO: 385715 - DNA, 776 bp, Cannabis indica
tttaccgcaaataaccctaaataatattattgcacacaatgtacgtatagtgaaatattattgagcctctagctagtataataaattcctatattaaaacatgaaatctataataataataataataataatcataataataatatattgactagctctatttgattaattactctatgcactgctcgtaaatttgaattacagtagaatctctattcaagaatacacttcagactaagtaaattatattctaattatataataataataatatattattattattattattattattattattattattatagtttgtttggtggatgatcaaattgaatctagtgaaaaattgacgataaaaaaagagccggccctaaaaatttatgggcctaagacaaatttaattttgagacccttcaaaatatatataattttttttttttgaaaaagagtgttatgggattagaattgtataatatgccatacagcttaaccagctaagctatgaatatttgttgtttacaatacacttaattttacttaaacaaaagcctaataatttttttttattttgggctcccgaaagatgtgggccctaggcacaggcctagcctgcctatacatagggtcgacccttgctacatatatacgttataagagaatataatcccctcaagccaacctaccaccagggctggcccaagcattgggcagcttgggccattgcacaaggctcccatttttttaaggcccaatttttatttttatttttt

SEQ ID NO: 385716 - DNA, 2475 bp, Cannabis indica
acagttgcggtacggagtgcatttgttcagtagataatgttaaggggtagtgaaacaacattacaaccactaatacgagatgagtacttaatgtatgtagtacaacactcatttgtacttaccaacactagtacaagatgagtacttagtgcatgtggtacagagttcgtacttccattaagaacgttcttgatcagttgttaagccttgtaggtagatgtattggcacctatttgcaagtcagttttatgttatatattttatgcttttcttattgagtctattgacttacaaatatgtgtccacatgtacgaaaagaaaaggtgaaggctgagcatcaatgagtctagagcttgaggatgattgtacatatcaggatggttagacatggagtgttcggtctcaagacaacatgggccttcattttgtagttgcagagtgacacatttgtaaaatgtattttgaatactattttaaacttataaacaggatctcagatgttatgtaaagtcatgtatttgttaaagtttaaagtttaattaaaagtttaaatttgacacgattttcgaaaaactctttgattagcaaaggtgggcacaatagttagaaaatcactgtaacgtgcctaataaagttgggcattagaatactaggattgatggtaaacttggacccttccatccttgctatatacaccaaattaccttccatctggtaggggcagtacaacgtctttccttccttcaggttgaggagggaagttgggctgatcattcctatcaaggtaatggcccgaaaaaaattgatcatctaccaggcgaccaactattcgatcccgagggcctagagtgggaaggtccatcccgcctaggcgtctaaacatagttggttggatgttcctctgacctgtactcttgtcttcacacaaaatgtagggattctttcccttatgtgcatctcgtctgggtggatggttttctattacttgcccctagtttgttgggtgaatcgtttgatcaggccggtagcttccttagagcggtgatttatctcttcatgttggacgcatggactgagtttgatgacctatccactcctataacttgtgttgtttttgttcaaacacatggttcacaatggtacgtgttttctcttggttatgatgaagtgtgttggaatgcattttgacttgttcgactgcaccttgcaagttttccgattcgagattttcccctagatcgacttagggctcccgtttagatggttgactggtgccagatccagtttctccagtgtacggagtgtcggttatcccaacttcttgaacactaagtttgatttcgatcagaggggttgtgattctggtcgttctagtattagttcccgcagggactgaaccaccaattcttgtcctcatggatgggttgcccaaaggaggcagcctggcattagggttgtctattcttgaatcaatgggtgcttgaacattaggatttgttgctaggatcacgtggctcagtcgatgagaatatccttatcagaaccacaattgccgattcaaaaatggattgaagatcgtaggtcatgctagataatatcttacgctctcaatgaaagtactaaaatgttgatcttgcttttagtcaataacattgagattttaaagcgataataactatagagtaagtaataaaaaataagaacaatacacgaacgacacacaatatttatagagatttgaccccttataacggtaataacctattctcctttttgttgtattactatgaggatttatcaatatcacaaggtctgtccatgtgagtttcttaataattcttagaaagtgtacgattatttttgcaagtgcttgatcttttagaatgcgaaaaaataattcctaaacagtgatatgacctcactatttatagggaagtacaattacatttaccacgaattaacatgagataaattagggagatttgaatacagaatcctatatatttctctatcaatcagattaattcaatgaaaatagggattctaaatgagctataattgtggaggtatttaaagaaaatatctcagaagattcttactcatcgagtacctcttgtcgataaatggcacttgttctgcatgcttggtttacttggattattatgagatttgagatctatctggatcatagccgccgaaggatctaactctagtcaatttggctcttacttgatttggatggtacaatagaaggatatactctgcttatatccaaatatatacaacacttgtcaccttgcttagtgtgagtcattgcctattattgtttgttgtcaactcaggtcgacaatgatatagtaatatcgatcatctattatctccatatacatcactattacaaaaagaactttttgcttaggatttaaagtgacacaaacaatttgcttcggtttgtgtaaccgacgttattgccgt

SEQ ID NO: 385717 - DNA, 1842 bp, Cannabis indica
cataagcacgttaataattaattcatcattttacccttctcgggtcaaaattactaaaatgcccctagctcaccaacggggtcttaacatgtcataaatcatataaattcacatatattaaattatataataatataattcctcaattattcataatatctaattagggttttgctaatctatttcataatcctagggtattacaccaccactacactgttgtcacagtagagcacaagtgcgcaatagggcagccaaggggatccgaccaaaccccttaagatggcaagttcattatctcttcatctcggttaagtatttggaatcctcgtcaactgatatgttgtgcatgctaacttggtcttcttgctgacaagctatactccacgtggtatgaattttgcccatatgggcatgccacgtcatgtgggcaaaaattgggataagaattatttttgttgctgttggaaaatatgagatatatctcatatctggattttttttgtgtcagtttaaaatcgaagggtaaagtgttagcgaccatttaaaacagtcgcatattttatcctccttttgctgtcggttatgaacagtgaggaatgctcaataccgaccgtttataactgacgccaataccatctcgtttggtgtcagtgacaaaggcatcaattttaggaatcgacgaaaattctatatgtaagtgtttaaaacagtcgcccattgtattttttttttgtagtatatattaatgagattacgtgatcttaaaaatataaattgtttatagattgaatagaaaacttttgtatagataactatattagaatattttatttattttttgtataaataaatttatacgtgtatataatacaatgaatattttatatttattgaatttggtcacaattaattagttgatattctatctatggtcagattacaatttaataaacattttattttccgatttgattttctaaattaattgttaacatattctgacaattaattgtgacaaaaactttgatgaaaggtctcacctatataaatatagggtctcagtccctgagctaactactcgttctgtgaaacagtatatccttctaaaaagagtatagagagcttgaaagcctgattatccacactaatcaattttcttttcttttgtagatccaaagctcgtgtgggattgaagctcaaaaaatcaatgactcgaggtatttcgatcctttgttcattgtgcatatatattcgattaattctatatttcatacatgatcatatatgtttcatatcattcatataaatttctaacagactatgtatgctcctactcaataatgtgtatattttctgctgcgtactctgattgtgttgtttcccatagttgaagcactagggggtacgttagtgtactcttttttgggggtgcactgtagaagctccttttgtatgtatgtatatattggaaaattttataatatagctccctaaaatggtatttcggtagacttcttatatgtttcgacattcaagagagtttttagtccacattattttcataatcgtgtacgttatagttatttaagaccatctataaatttttcaaaaaatactgaataatttacattgtcaaaaataaaattcaaacaatttcttaccacgtgcatataaaaaaacagtcacgcttgtaagaaaatatttgaactttattttcgataatatatatatatttttaattttttacggtttgagtttctaaagtggttgcagcgctagttgcaataggggttttcatacgattttttattgcaatttaagttacagtgctagttgcaa

SEQ ID NO: 385718 - DNA, 2509 bp, Cannabis indica
atagattagggcgttacacttttcttcctgatctagtgtgaggggagataacagtagacatatcagaagtagtaacatcagaagaattaggcaaacagaatcagaagaagattgagagatacgtgctatgtgtgaatcattgaattctgcaatgtgaggagatgcaagaaaaaaaaaattaatgtgtaaggggaatacctccactattaacaaaaggaaaatgtgttcataaaagtatacatcacgagaaatgaatgtcacatttgtgtttaaatcaagcaacttatatgctttcatggagggtatccaagaaaattcatggaacagacctaggtgaaaacttagacttggattggctcaaagtagatgcataggcaagacatctaaaagcttttagatgttcataggcaggagctttagaatgaagaatatcaaatggtgatttgttttgaaggttgggtgtaggtgttctgttgattagatatgctgcagtagcaacacattctccccagtacactaaaggaatgtaagactgaaatagcaaagccctagtaacattgagtaaatgttggtgctttctcttaacaacagagttttgttgaggtctttgcacacaggaatggtaatgcataatcctaagttcattgaacaagtccttgaattgcaactcttttgcattatcagacctcactcccttaatggttttaccaaagtggttttgaacaagcttaaagaactgaggtatggcattttgagcattagttttttgcttgatgagtttgatccaagtgtacgtggagcagtcatcaacaatggtaatgaaatacctatacccttcagttgtcatggtgttataagggcccaaatgttaacatggatcaaatcaaaacacttttcagcaatgttatggtttgaaatgaaaggtaattttctttgttttgcaaagtgacaaatggaacagtgaaatagggaattagaatcaacatgaaatttcaaagctttattcaaaggatgaacgtttacacaagatggatggcccaatctatagtgccatacagtgtcattagaaatttttgaatcagaaatagataaagaaacataaacaaattttttgtcactatttttataacaattcaagtaatacaagttgccaaactttctacccatcccaatcaccttggtcttcaatgtgtcctagataacacaatttccatgagaaaataagaaagtgcagttagttgtggtcgttaaagaactaacagacaacaaatttcacttgaaagtaggcacatataaaacattctcaagaataaggtgagaagttaagacaattgttcctatgcaagaaatttcagtatgtaatccattaggcaagagaacaatttatagattgggatcagcataggtatttgtgaataaagaaagattaggacacatgatgtgtggctcctatgtcaatgatccaattcgtattatgaacaaaaaaattcttactagagaagtgagaaactacaggttgatctttagaagcattaggagtgttgttctgagtagttttctgtgcaagtagggccatgagcttctgacattggacacttgatagactagaaatgagatctctctccattggtgattcctctggttttccttcatctgttcgtgaaaatttcacactagcagacttccctgtagttcctttggcatcacaattgggaaacgttccatgatatttatgacaaggggggatatccattaagtttgtaccacctctcaattgagtgaccattcataccacaatgagtacaattatactttaatctgaaaggttggacaactctagcaaactgtccattgttgctcgatgcttctttatcaacatcagatgaggcattacctccaccagttaagcctctttgtctttcttcttgaacaatagcagcatatgctttgttcacacttggaaaaggatcacacatcaagatcggagacctaacaaatttgtaggaatcattcaatccaacaaaaaatttgagtaatcgatcctcttcctgatactcttgaatcaccttcattgcaccacatgtacaaacaggttgtggtctatactctttaatttgatcccataaggccttcgatcgagtatagtatgtggtcacagttgagatccttgagtaaggttctgtatcgtcttctttgcttcaaatatacgaggtgcattcttctcattaaaccgttcatgtaactctatccagatttctgcagcattgtcatgatacatgatgcgattggcaatttcatcagaaatcacatgtaagatccaagaaatgacagtgctattgcatctacaccagctatcatagtcttcgtgatcatcatctagttgtggaagctttccattcacaaatttcactttgtttctagcaaccaaagcaatcaacattgatcttctctaggtgttgtaattctcactgcctttgagaatttttggaacaagaacagcacctggatt

SEQ ID NO: 385719 - DNA, 861 bp, Cannabis indica
aaaagtaaaattttttgtaatgcttgggatatttttgaggttattacttatgatatcatattagaatttggcatgaagatataagaatttcatctcaaaactaattaacaatgaatggaataacttataaattttatatatgacattatcttttcatacattaattaagattctataacataccataaatggaaaacaacccaaatgaaagacttttatggtgttcccatattagaactgtccaatgattgtatggataggcagaaagataaatataagataatatttttaattaattatttaatagtttgcgtggattcgtaataaaaaaattggataaaatattgtatagacaaatttgagtgagatataataataagagaacgaatagaggagaaaggaaaaagtcttttgtatattttaaacaaatataaaatcaattaggtagatgatcaagtcagcttgatgaaattattattttattaaaaaaaacgtgtcgtgtatatatatatttccattattaataattaaatcagttaatttcaaaggcaataagtgttactgttggatggcatcatggccaataatgagagccattttgtatataaattgtgtataaaattcttatggtataggaatggtggcccgaaacaatgatggtgtgcttattgaagccaaaactgtgctctctcacagtgcagttgatccccctcttgccgaagccataggtctcaaggaggcctctagttggatcaaagacatacattggcaaaatgtttctttggagtctgattgtcttgtggcgattcaggctattcgtagctcgttaaaaatgcattctttgtttggtttagttattca

SEQ ID NO: 385720 - DNA, 1177 bp, Cannabis indica
aaaaaatattaactaaaatgaaatcaattgtataaaatattaactaaaatgaaacaagttatataagataaaaataaaaaattaaatttggacaaaattctaaaccaataatacaatgaaatagataaaaaaatatatatatatatatttatctcttacaaaatataaacaattaaatcatactagcttctacaagtatccaaatcaataaaagattcaaacaagccactaagtaaatataaaatgacactcagtcaaatattcaagaaaccttggccagtttagaaaacaaaaaagaaacagttataactaaagaaaacaatacataagaatgtcattgttagaaaaaaaaaaaaaatcacttcaaacacctattaaaaatgtgaaaaatatattcatgtcatcaaatatttgttatagaattcctattaaaaatgctctaacaaccattagtgtgttggaaacttaaccaaaaaataaaagaccgtcttgcttatgtggtaatgggcccattttttattatttcattaaaatagggtcgtcggtcctggtccatataatttaatgtagtaatttttataaaagattactaactaattgtaaaacatctcttctaaatagtgttgagtaccactaatatctaataacaatactctaaaaataataattaactattaatttttcatatatattatatgacttatttataagaatggtaagacttatgtgttatagaaatgaaataaaataaaaaacacaacctcaattggtgaacacagtacacgactcaagtgatgagatgcggctagtgtgatagtaccaaataaattctagtgttataataaaaccaaaattaattttcaaactgcaattaaacctgatatcacatacatatataccatcttaggttggaaggttaaattcaactcaatacgtgattgagtggtaggaggggaaaatatacagaagagaattttcaacattgacacactacaacaaattttatgtttattttttttttttttttttttttagaataagcatttatatcataaattcaaataagttagacctctcggtcgttacaaaatatattattaggtaaggaggacaccgggatagtcccaaacacctgatgagcaaatgcccatctagccacattatgaacggcaaagtt

SEQ ID NO: 385721 - DNA, 1053 bp, Cannabis indica
aaaattactaattagccttctattattatattaggaatttactaaaaaaaagttattattagtgcaatttttagtcacaacaaattttttttgactaaatgtgacttttagtcacaacaaaaaagttatttgtgactaaacatagtatttagatacaaattgtcactaatttaattttagtcacaacaagtattatgactaaaaatacatttagtcaaaacaaattataatttttgtgactaatacttttagccacaaacttttagtcacaacgtaaaaataataatttataattagtcacaactttttcacttttagtcacaagtgttcttgtgactaaaagtaagattttttgttgtggctaaaatgtactattggtgcttagtacctttctcagtattatatcgctattgttttaattaagtatcatatcccatataacttaagaaaataacttctaaggaatatcgaaaaccaaacgtagagtgtcacctatagaaaatgatgggcaccactagtacccaataacaatgctcactgttaacggtaagaactcgtcaactaactttattgctggaaaattagaatctaaagcaaaactcataaaaaatatgaaggtgaactgaaatgcaagtttaaatggctaagagatttcttaagtaagagaatgattctttctattgcatttagtatgtgaagttacacaattgatttttcaacatttgcgaatggagtatttataggctctaatcgcctgagttacatggtggccctaaggagacaagctgtcgttttcggattgcaaatcgcaagagcaggaggtggtcttgtgcctcgtacccttgtctagtgttaggtggtcccaggttacaaaggtggtggctacaacgtacccttggtcgggtccttagaccttgcaggtgcagtgccttcactactcgtacctccttgctttcaaaacttgtaggaggcgtggttgtacacttttcccttgcacgccttgtcttttactttctcctctaacgacactcttctcaatgcacattcaaattt

SEQ ID NO: 385722 - DNA, 2003 bp, Cannabis indica
ctcaaactgattttcagcataagctttgaattgcataaaagcttcaccagcttctgccttggttttcaatggataaatccatgtaaaccttgtgcaatcatcaacaaaatgaacataatacttatagccattgtgtgacatgattggggaaggtccccacaaatcactatgcactaaatcgaggacatgtgtggctttgctgttcgaaattttaaagggaagtgcatgtgattttccaaattgacaagcatcacagaaatgattcatttcatttttaggaatattaacttgacatagactcaatacttgactcaacactttatgtgatggatggcctaatctcatgtgccaaacatcacttttggaaattgaaagacaaccagttttggaatgattaacattcgacttagccttgacagcaacaccactgaacagagggcttttacttttatttgactctactgaactatgagaaagagaggctgacttgaagcttggtgtttggagttgatagagtccatccttaagcatcccgcgaagaagaaccctccttgttagtttgtccttcacaacacaaaaatcagagtgaaattctatgagaatgttgttgtcatgagtgagtttggaaacacttaataaatttttggatatttctgggacaagtaacatttcttttagaagtaaaggttgtcctgtatgagtaggaagagtaccattgccaagatgagaaatgaaaagttgagtaccattaccaattgtgactctctccttaccaccatagtcttgtttgtgagtcattgatgaggagtctgcagtgatgtggttgctggccccgctgtcagcaaaccaagcctcactttccaagagttctggagcagcaacaaaagctgaagggttgctggttttgttttgatttccattgtttgggtcagatcccatgtagtgttcatcaaagcgattgtagcatattgctgctgagtggccatacttgccacagacttggcaagttggcttagagttgttggatctacctccaaatctgcctctgcctctagatctatttccacttcctctgctggtttgtctgccaccatgctgttgagagtattgattcgagcctcttccttgtcctcctccatgtggtttctgagcaaagttagcttgtggatccagcagattgtgagagtttttgttgttcgaagataaggcttggagtctttcgattttgctgtcaaaactcagcagcagctcctgaagttcttgccatgttgtcttggttcttgcttcgatttgtagcacaatagagagatagttcacatccaaacccgagaggacattggtgacgagttgagattcagggtaaggttccccagccaaagcaagtaagtctgcccagttctttttcatagtcgcaaatattcaatcataggagtggttcccttccttgtgacctggattagtgttcttgtttcatccattttggattttgaatgtgcaccatagagttgttcaagggcttgccaaagtccagcagcagtggaaacacccatgacctcggtagctattgtttctgtcatggaactatacaaccatcccattaatagttgatcgttcacaatccaattttcgtaggcaggattgatgatttgtgagacatcaccatccacactttccatgacagtgcctgcatcgacatactctggtggacatttgacagatccattgaggtatccatccaaacgatggcctctaacaatggtggataccattgttttccacaggctgtagttgtgtctgtctagttttagagagaatggctggtttagggtactaaaatggtgagaaacagggctggggagctgagagttggccgagttagctcccatgattgtggaagctgcagtagcagctgtggcttgaccagaggcattgtttccaggattttgggagtctgttgacatgattcccgctctgataccaagtagaattttaggtaaaattga

SEQ ID NO: 385723 - DNA, 1102 bp, Cannabis indica
aaaaaaaaaaaaaccttaaaaagaatgaaccacaattaggttttcaagagatgaaagaggtatcattttgctattggtatatgtctattcatagggataaatgacacctcaaaaccgagctcataagttctaaatacaaagaaaaaatcaataaatagctttcttaaaaaaactcattaaatgacgaaattttgtgtgaacagatctgaaaagtgcaaagacaaaatcctaatttttcaagttagcattatgaaaatttagacaccatcaaagttagattcatcttataaattctccttagccactaagataattagctggatattaaaatttaaacaaggtcaagataaaagaatagaataagatatacatagataaatatcaattacaaagaaatatcatacatagatataatatttatttcattaaaatatacctaataaataattttattcttcctatataaaatcacgatctgagtaagaatatatactcaaataatacaccacatgttatgcattataagtaaggaaacaatctcacattaaatatgaaatattctagaaaaagaaactcacatacaatttaaaagatctttgaagaagcgaaggtagcaacaactactttgtatttgtctagggataccaagttatggtggaaatgaagtacgaagacattcaaacttttaagtgcagcattgaaacatgaggtgacctgaagaaagaatcgaatgcatagtttctatataaaattgtcgcctactgggcccaacataagttgagagcgctaaagcgagttaggacagcctgagaatatgtaagaaaattctttgggttgatgctcgatatccaggacatgaaacaagtcgataggctcttctatttccttgaaggactcaatcaatgagccaaacaagagtacagaggcagcatgtgatagacctagccacgactcaagctgcaatcaaacgactaactaattagaccctaaatcattcataggcaaagcagatgaatccctaaataatctctaacaatattgggaagcagtgtcatggtaagagtgggggaagggaaaataagactcatgaatctagctcatc

SEQ ID NO: 385724 - DNA, 1281 bp, Cannabis indica
taaataataatattaaaaaattagtacattaattattttaaaaaatgaaattccacctatacatgtgggaaagatcatttatgaaaaataaattaggtgtattaaaccaatctaaatgtgtcaactcaactaactactttttttaaatactattaaccttgtagacattttttttccttaaaataacaaataagggaatagtagacttaggacgtacctagtctagggactaaaaaaataaattttaccttttaaaattatatatatatattttattaattttcaaaaataccatatttttttaaataagagcccaaaaatattttttttaatcaaggtagattggtttgttaacaaggaattaattagttcatgtctttttccaaagtttctatgataaatttcttttcattaattaatatatttttatgtctaattaatttaaaaaatacaagttaagcttcattccttttgtcatgcaagataatcatatatacctatataattacaaatcaaaatctaattaataagattaagataagcattatccaaattttatgtccaatgatattatcttttccaagactcatatcaataaccaaacaaaaataagtataaaagatatactagaataaggcattttgttggcccaataattgtgtccctatctaaaattgaacatcgtagactctattgcttcttataaagatcaaagtagctttcttgtcttgtttgttgataattttaccttacacttttaacttaaactaatttaaactactcttactaaaagatgatgcagaagcagaatcaatccatgatgatgaattggatgattgagtagccatgctatgagatgttttggagttttgttgtgaaatttgatcaagcttgtttcgcaaaccggtgaacatgaatggatcatcaatactcaacgccatgtctagtttaggaatggtagttcgaccttcaagtatgctcacaaccgttgacatggtggggcgaagagaaggtgatggattcgtgcacaacagagctacttcaatcattcttttcgcctcttctttattgaattgtgatcccaaatttggatccacaagctccattatatctcccttttgttgtaagaaaagggcctacatatcaatcatatgaagaagatgagccattaccaatagggtaaatactgttttggatcctgtgttttgcaaaagttacagattggaccctgtattttgttaaatgagaaaatggaccctgtattttctaaaatagtaaaaa

SEQ ID NO: 385725 - DNA, 553 bp, Cannabis indica
tgaaagaatcatgaagaagatgttcaacagcaggaaacccagaaaaatgaagagccagagagcagaaaagatagtacgaaaaaaaagagaaagagtagagaaaataacgggtgtttttagagcctttaataattggtttagacaggtctgcaagtgcaacgacgagtctgagtctgctattctattcaatttattttttttatattattttatgttttttgtttgtgtatgttttctcttttcagttctcctcgtggaatataggcatattcatattatctgacaagtaatgctgagctggcaaagttgaaactatcatgtttatccgtggccccaatataaaatctatttatataaagaaaaccaatataaaattaattattttataaatacacaaaaataataaaaataataatttaaatattataaaaaatataattatacaaaattttaaatatttttagaatttttataattttatttacaaaaatactatcttttgacatatttgtatgttatactcttattaatttatgtaattttcttgttgttt

SEQ ID NO: 385726 - DNA, 2057 bp, Cannabis indica
ctctagaaagacactgatagttaagtattaatcattgaccttgccataactgttcaattctgatgtacgttcaacaacaccatttattgtggattatctagagcatagtgtatatagttccaagtccaattaataatcttagaactgcatatttatatttttttaccccaatcagttcgtaagatctttaacttttacctgattggtttttatccatttgatagaaattcttgaaacttctcaaatgttccagattttttaaacataaggtgttgacgcggtttttcgcaatgaatctaagatgatcgtaaacaagcaagatgaacacaagtgaatgttgatcaaaagtaaatcgatttaggtaaaggcgttttacaataatgaacaataaacttttatagtggttcaccccctttcagaggtaataggctagtccacttatatatttttgatctcaatgcttgagaagagttctccagagttatgttctccgagagttcagtactcaagtgagtttttttggaataatagtgaatgtcctttattacaacttatttcttaaactttttataggcatatatcatgggcctagggttttttaacctggttatatctttttcttagcacaagtgaagttacattttaaatacaaaaaataataataaagtaattattcaacaaataaatatcgttacaacttatcatttattatctgtatctctagagtagctccagtagcatgtgttatttccactgggtggacctaaatggacatgggtagaccagaatgaacatgggtacacatgaatgtgtgggaggtgtggagtgttgagcgactcgtaaagaagggagatggggatccaattcggtcccttggtgatttttcctaagcagctcgtaaggaagggagatgtggatccccttacaccttggcaaatggtggacaagggatcttggcgtgcaaatcaggacccttggtaaagggagctgggcgtgcagattaggtcccttaatggctcttcaatatcttaaacaaaaatctacgcacatttatgttgggttttttgagagataatatttttcccccaagtttgttataattttataatattatgatagagttgtcgaaaaagtaattcatgcatttttgaactccatactcataaatatcaatactattaagaaaaaaatgtaagtaaaccacaaaatttccaagtattttgggaagataaaaaaaatccccctagcttttaaataagttttcaccatccataagagtcttttttcactctccatttagaaaaataagagcttttccaaaagaaaactctctcaaatagcttcaaaacccatttcaaaggttaaagtttcaagagaaaagtaaagattgttggagaggattcaagcttgaagatcctcattgagcaagttctcctcacccatttgtaggaagttattttaccaggatttagatttactaatatgtatgttgactataattctataatctaacaccctaaatatgaattcctaatatgatgaaataaacacatataaagtttagaaaatcttacattgatggcaacagaatgttaatgactccttccattcagatctctagccctagattcctttctgtaaaagagcattatcaagatatcaacctggatcttctctccttcagtttggttggattcttcacaatctttcacactatgattgagtacttgacttgatatgagtgggcatgtactctatcactaatggctcgaaatcgatgaagaacaagaaaaggaattagaaatataaaggaaggaggctcttaattttctagttgtctgacaaagaatgaaaatcaggctttgagttggatgatgttatgagaatgagagccatcttaatccttttatagtatttcaactagggtttaggatttaaattatacggattaaaaaagataaaagaaaagcaaaataatacttaagtggccgaccatagtagtgggcctcactagttataactttgccattttattcaacaatttatcttttctttca

SEQ ID NO: 385727 - DNA, 557 bp, Cannabis indica
ctaagtagagtattttctattttctttcgaatatccgttatttatcaattatttgatgttgtccgaatttctttgacaacacacgttacagataatttattaattatttttatttaatttttaaattaatcacaacagtttaataataatgatccaacgactaaaagtaaatataacttcgtagttatataattgatataactattaaaacttcttccacatatgtttgtaattgattctatatcagaactatttttattttctaatttaatattattattagaataataaaaattacatctaaaatatatgcaccaataatgttaaaatgttaaaagttactagtgaaacttaagtgttatatggctatgtaaaattaaatatcatacgtacaatcctaatttaattaattaataatattataaagattaattagaatttttgtcccctgaactttgacatgtaccaaatattaccccctgaacttttaaggtcgttaaaaatgccccatgaactatagagattgttggatttaaggattttttttttcaatttta

SEQ ID NO: 385728 - DNA, 594 bp, Cannabis indica
aatacttcttcacatgtggagaagagtttgaagaaaatataaatcctttaaaatagagaatccatttacatgatttctttcatgtttttttttttaattttttttttaaagattatttattttaaaggagctattgaaagtgctcttacaattttattgcaaccgtattattttggctattaagtactaacaaagtctgttaagtgtcagctcagaaacacgtgatgatatattagtagattacgcattaaataaaaataaaaattatgttcttctataacgccctaatttttaagacatgttatgtatttctaagtatgtgctaacatttgccaattaaagaaatttttaaatttaagtgaaattataataaaaattcgtaataattaaaattttacatataataagtattttattaaaaatttgtaatttgagatcccaaaatctagttacaaaatacagcatatattataaaattctaaaatagtcgtctgagaacaaatacaaaagttgcagcaacagatctctcagagacctacacacgcaagtgtacgtatcgttcaagtagtaaactcaccaggagtgaggtcgatc

SEQ ID NO: 385729 - DNA, 558 bp, Cannabis indica
ctattttttaggaaatttgctataatggtatgtaatttgtttttttactaaggtgatattgtagtttaatgtgtttcattcagatttattttgtgtttgttttttttttgtttttttttttttttttaaatttatcccattttatattctccaaaacagatttatcatcatggattagcatatacacagcttttattttttaaaaatgttgaaaaagaaaagaaaatccacatgttttgggtcatagctttgaaccataacattgaaagtagcaatttatcatgtaaaatataagagatgtgtttgtactaatttggtttagtttttgttttcacaaaaaactcattttttgaccaaaccaatgttttgtagtaccataccattaaaactaccaaattttcatttaaaatgtattttaaatgtttgtactaatttagcatgggaaatttgattttttatgcttacatttggttaaaaaaaattttttctaaaacaaataataactaatatttgtaagatatgacaatttttatgatatccctaaaatactcccattta

SEQ ID NO: 385730 - DNA, 1379 bp, Cannabis indica
ctttagatttataaactcagtcattatatgaagcccaatcatcatttgaaaaaatcttgggatgaaagtctatatttggcatattaatttcagcataagcagataagttagttgaagatgctgagtaaaaaaaaaatagcccttggcgagaggtgcccttaagatattgtaatatttcatgagcagtagtgaggtggggagctctcggattggataaaaattgacttagtttatttatcgcaaaattaggtcgtgtaatagctaagtaaatgagttaccaataagattgcggtagatttttgaattttctaatggttttccaacatcaaatgagagttgaatgtttggttccattggaatgggagcagcagaagctcttaaaaaacttgtgtcaatcaaaagttgtaaggtgaatggtcgttgagagacaaaaatcccagaggaaaaacgaccaatctccaaacctaagaaaaaatgtaaaggacccaggtccttaagctaaaacgtagagttaagttgttgtttgaaagaagtaacaatatcattattattggaggtaaccaaaatatcatcaacatatattaaaagggcgagaaaaatgccttatcatttttaatgaacaaagtgtggtccgagagagattgggtgaaactagttgatagaagataattgttgagttttgtgaaccattgtctagaggcttgtttcaagccatagagactttttgttaatttacaaacaacaattgagggaatttgtcccttgggtttgtatcctttggaaagtgtcatatagacatttcatttaaattgccatgaagaaagacattgttgatatcaagttggtgcagtgaccaattgttagtggccgcaatggcaagtagaagttttaaggttttaaactttgcaataggggtaaaggtgtgaaagtaatcaataccttgtttttgattgaagcctttggcaaccaatcgtgctttgaaacaatcaattgagcaattatcattgtatttgattttgtatacctatttacaactaatggcatggtggccatcaaggagagttacaacgatccaagtgtcgttggcttcaagagcatcagttttagtgtccatggctttttgccataggggatcttttactgccattttgtagctggcgggtttaacgagagaacgggcagtaagaactgctgcttgaaaatgttgtgttaacctattataagacaaatatttattaatagggtgagtagtagaagaagcagcagtagtattgcaaatgtaatcagaaagacttttagtttggttaatattcttcccatttttgaagtaataagagaagtagttgggggtgttcctgggtgtggatggtacttcatca

SEQ ID NO: 385731 - DNA, 919 bp, Cannabis indica
gagcaaggaagaaagagaaagggcaattctttattctttttctttattttttctgaaatgaataaagtttaactcaatattcagaaaaggaataacacgggcaactgtcaaactccaaaacagcgacctatacccacattccaaatgatcaaaatacccttgatgcttaaacttaagcaaatacaagcctaggggtaaaatagtcaaaaatcataaccccgttcaaactcggtattctactcatctccgatgtttatcctactaaaaaaaaagcttctagacttacccatgtaactcaaatggctatctatcacatttttcgtcgtcgctgatcaaaaatcataaaaaaatacataattcacatacaacacaaataatacctctagagtttaataaaatctccagatgtgagaaattataactctaatgcccacttttaacaatgggacccacaattaaataaattcatgaataactataaaaatattaataattaatgctaattgcctttactaatccatattctataaactcagtcattacaattatccctccgttaaaaggattttgtccttgaaatttaacctaaatagctctggatattaagtcctcatgtcagactctaattcccaggtggcttcctctttcttgatgtttctctagagcacattgaccaaagctatggtcttgtttcaaagaatcttttccttcctattaaggatctgaactgattgttcctcataggacaagtctgactgtagttcaagggcgtcgtaactcaagacatgagtcgggtctgaaacatatttcttcaacattgaaatatgaaatacattatggacagtcaataacactggtggtaaggctagctgatatgctacctgcccgaccttctccagtatctgaaatggcccaatga

SEQ ID NO: 385732 - DNA, 1372 bp, Cannabis indica
agttcagttttggcagtttaaactgatcaaaccagggtttgaaacggtcggttttaagacagattttggattagttggttggttttcaaattacaccaatgcagaccaaaaacataatactagatttttataggaaaagaaccgaccgttgctcagctctactacacatagaattcaataaaatttttgtaatcgagaaattatttctctattgcctatttttaataataggtcttattttctacttatgcacatatattcataaataacaattaaatttctaattattagataattttcatgtttaaactatgcggtcattacagtatctcacctataaatataaggtaccgattctcaaactcactatatattatgtgaaaatcaataaatttatctaagagagttagaagcccgaatacctatatactaacttagttttgttttcttttgtagattgtagctcgtgtaagattgaaatttaaaaaattaccaattactaaaaatattttaattatttattcataatgcatatatattcgatttaattctacatcccataaaaattcatatatattttcatctatttatataagttttaacatgttaaagagaaatttaaaaaaaatcaataagatttttagtgaatgtttagatttttttttctcttattatttcctcatgcaattattgacatactgaaataatcttcaatgaggaccaagtcaaatttatatattcatataaataataaatatatattaaaaaatatatatacatgtatatatcaacattttgtgtgttgtttagaagatcttgtggttttgtctttggcaaacgaattattgaaagcattaaatgggatctatgatctatccgacagaattattaagccaagcatctcatgcaattactaatgcatatgagttgtttttcttacatatatagcaatatatttgactatatagccattatttatttatttttgttggacaattttattgtgacaaaaattacatgcatggttccatctcaaaatttttagatgagtgcaaattatatttttataaatagtttaataattttatatttcatttatattaaataatattgcccaatatctctttctaagatagtagttattttttttctcactaatcttactaattttgaatcatcatatcacatgtagtcattatttactaacttatttttttaaaggctcatttggtacgtcgtattgtatcgtattatattgtattgtgttggattgcattttattgtattgtattagtattatttaatacaatataatgtttaatattgacttgtattacttgatcgtgtaaagttataatatattttcaataca

SEQ ID NO: 385733 - DNA, 1033 bp, Cannabis indica
tttttaattataatgacaaaacaataaatgtttaaacaaagatcagtatataagtgattgtggttaaaattcgtttgaattctaccccatttcttccaagtcaaatctttattttaacttttaagttgaccacaacaccttttcctttataatcaatgaacaacagagttctatcccaaaaaaaaaaaaaattgactaccacgcacacccctacaaatttcaagaaatatttcaataatatcactgaagatcaaaccaaactcattgactacataagagttaattatgatatctgcaattaaattgaaatggccattattgctcctccaatatattttttttattagattgacaaacattttaataaatagaaaacctttgagaattattagtatgattcatcatttataattgaatatagggtgttctcttctattgatgagatactagttgtctatgattgtatgtatacacattaacactataaggtaacccatctcaaatcaacaatcaacaataaccaatatcattgttatcattatcattaacatcatcatcattaacagcacacaaaatataaaattcaaagaaatagtagaatacattgaattcagaattttcaggattatgtcgactattagacatcattagacatcacgatttttgttattaaatttcggaaatgtacaagatcctgtagtggttcggttgtctcaaggaattttcagaattttcttttttgtattaattagtctcaaggaatcaaaaatccattctcagttgtcatttcattataatgcatagcaagagaagcactagcagttaaacttcaaaaaaatcagacatgtgactctcacctgaagagtccaaattcccttcgggcctcgaaaatctggaataccacaggaagttgatattcctgcacctgtaaacactactaaatgcttactctgcaagtacaaagaaaacaaaatctttaaaaagaagccataaagttttcaagatagtaaagattaagtataatggtgtagtt

SEQ ID NO: 385734 - DNA, 852 bp, Cannabis indica
ttttagtgacggtaaaaaaaataatattttttccacatattaaattaatcatattgaagagtaggtcgtgatggtgtaacttttgaaactaaacaattactaattgaaactttggaagttttttttttttaaaaaaaaataaggaaagaaaggaagaaaaagaatatttgataagtctcccatcattttaagaagaatattgttattattacaaaaataaaaagaagaagaagttatagcttgaaaatacttaagtaaactttttcaaatatatataagtaagataaaaaaaaaatagataaatatattgtttgcgaaaaaaaagactaatcgtgtatatataagaagagagagaaataaaaaatgcaaaacaatatgataaaatctgaagcaaaacaaattaatagagtgaccactttagtgtacacattttttaaaaaaattaaaaaactgacgctatattccacatttaaataattagcggtacttgtgatatttattttaaaattttgtctttcaccgtaaataatccttgttttttttttgtggaagtggatttgcaatccacaccctttctcttcctttaagcctttcctccctatcaaacacataaaagctaagaattgattaactcaatcgatagacttcaatccatccctcttgccaagcaaagtgtaatatattttttttgatagaaacttgtagggtattggttatcacaacggtagtcgggtgttctcaaagggaaatttgacattttatgcttaaaaatgactaatggtgttaaattatacctaattataacacataaaaaaaatataccaatctttctcttttcttccaaaaataccc

SEQ ID NO: 385735 - DNA, 636 bp, Cannabis indica
aaaattgtgtcaaatttaaacttctaataaaaatttaatctttaagaaatatataacacaacataaaagtcgagatccaatttttaaaatttacaattgtttataaaatatattttatacacatgatgcaccgtgactataatatatagtcccaagtcatcttgagaccgaaatctcaaggtcaaaccatcttgatatgcaaaatcatcctcgagctctagactcactggtgctcaaccttagcctttcctttaaatatacattcaaacaatacctgtgagtcgatagactcagtaagaaaagtacaaaacacataacataatactgacttgtatctaggcacacatacacctatttataaggctttatatgcatcaagagtgttcttaacaaaagtacgacctctgtaccacatgcacaaagtacttgccctgtactagtgtaggcagggctgaaccgtaccccgagtatcactgagtgttgtagcacatgcactacatactcgtcatactagtgttgttagcattgtgccacaccctttaaacatcatatattgtaccaatgcactccaaccgctaccgcactagttttggtagtataaaaatcacataatatagcatgcaatttacatacata

SEQ ID NO: 385736 - DNA, 2162 bp, Cannabis indica
tggagagagatcctttcttacagtttttgagtttgtttgatgtatcgccgacgaagaataccaccagatctgagctgaagttttagctctaacaatttgagtaaggattccatcagacattgaagaaagcagccaagagtagaggagctaatctggaacctcccattctagaaatcttggatttagcttacctcgagcttcatcttcttggttaagatacttgacagggggagcgaaggtctcagagatgatgttttgaagtcgatgtccatgaattgcaaagtatacttgaggatgctagaggataaaattattaccatcatgtttgacagagactttatgcgagaaaacaactagattgaatgttggagtacatgaacaacgatcaacgaagaacagaaggattgataatggtggaagcagagaaaaaatctactctgatattgctatcccaattttcgtcctcatgacgtggtatgcttacgtggatagaacttgtgccacgtggcagtacaactcactaaaagaaggaccaagttagcacccaagaaaacaaagacctcaacactcaaatggagatcaagtgacagatcacctccctctcagatgctggccaaccctatggccggctagcccagggacaacaccatggctggccagcacaagggcctgggcggccaaggatgctttgcaggccccacaagacactcctgcacgtggacaacaaagatgggctgctaattgagccccaaaagcccaacagaagagatgaataatatttagaatcaaggaaaattcagtcttttttaaatatctaactaactatacgatttttaagggatttgaattgtaaccctatggtttaaggcttcctatataaagtaggcatgtcaaaaagatccatttagttggagcgggttggaggtccaacccgacggatcacctctgatctaaaacattcagatacttattggatcttggatcagatctgctccgtcctgcctaatttttttctggatcagatttgatctgactcgatttcaatttatttaaaacaaacttaattcaagactcagatcccttaggaccttgactcggacccggacccagacctggaccaggacttgaaacccgagacccgaacccagacccagacccgggagccggacctgaaacctggacccaggacccagacccggacccaggaccagacccgggatcgggacccgggacccggaccaaaactcagacccaaacccagaccgggacaaggacctgggacccggacctggacccgaaccatgctcggaccgagatccaacccgaacccgaacccaaactcaagacccgaacccacaccgggacctgagacctggacctggatccggacccgaacccagacccggacctagatctttacacaatctattaatacatgtcaataccaaacatagtattgtatttaatgataacaaaacattaaaatggatataaaattataagttaatattaaaattcttaagaaaaaatagtcgggtcggatcagatccaatctgaataagtcaggtcagaatctgatccgatgcgagtatctgatctagtgggacggggcagggcagatccttaaatgatctggatcaggtcagatcatagccggatcagatctgacccgacccattgacactcctaacagatggcaccaaacaggaaactcttttcaagtattgactgagcaacttggtgtacagaaaactgaagcaagtgacaaaatgaaagagttggttaatgctagtgcagaagaagtgaagacgagaagagggggagatcctcctctacaaaatggatagactactatgctaaaatatctaaggagtcaacaaccaacacaagcaaagtttggtcaagcaattgatctatactcagaatgttggtcttgttggtctcctcgagacaagagtcaagatttcaaaaattggaaccttgtactcaaacatttttgatggatggtgtttcactagtaacattgtttagcacaaagaaggaagaatagtggtcgcatgtaatcctaacaccttttccatcaacatactcaaatgtacaagtcaacttatgttgggttttatgcccaaaataaaactccatttcaatgtaatctattttat

SEQ ID NO: 385737 - DNA, 1108 bp, Cannabis indica
taccatatatatttgactgaattataattaacattaccatatatatatatatgatataattaacattaattttgtaatgcctaatttaaaatatgaatatgtattgtagacagttgtaaaaatacatacattactttttcacaaatgttgtcattgaaattaatttttttaagaacctatgaaatcattaaaagataaaaaaattaccactttcttaaacacaaaactccaattttagattaaattaagttaagaacaacaaccaacaagaaattacataaagactcaacacttaattgaaaatatgaaattaaagaaaaacacaaacatgaataagaacataaccaactagaaggaacaactccaaaacacaaacaacatatagatctaggaaatacaaaacacaaataatcctaggattattattatttagggttggccaattttgcttctgtcgcccattacagactcagagcaagattattgccaccattgttatcaaagttagtcgcaacaacatctaatatagtagtatttcggtctccaacaagattttcaattaggtctggagttattataggtgatgatgttgttgtttcagacatatgagtagacacggtattggctattacatcaatctttttgttgatttctccaatactttggtcaatgagcctagtgagatcattcaaatccatgacactcaagccttgaaggttagcgttacctacaagattggcatacatgatttggatcaactctttctcacgattgtctctttttaattttctcacttgctctttcaccttctcaatcttattccttaggtacttttcttggttcaacatattcttacttcgctcgatctctggcatacacttgaaccttgttaacacacaatgagccttttctgtcgatggaaacacttctggctcaccaccatttgggccatagacgattgcacatacgtcgacatcacacaatgtgcttagctcaacaacttgttttagcataccattctttctcttcctgaaagtggtttttcgagaggagtcatcagtgatgtactccaaatttaccttctttctggtcatggtggttggtagag

SEQ ID NO: 385738 - DNA, 683 bp, Cannabis indica
tatatatatattttatatttataaagttttaggatagtgagagaattactatattacaaaatgagagcgaatctatgaaagaagcaattacacaaagtggtctactaaaaaataggagaattatctcatatatttatttttttttcaaatttacggttgagtttttaaagtggtttctcctatggtttcaatgtgggttgctatacgattttttgttgcgatttaggttgcagcactagctagttgcaataagggtttctaagtaaaattccgtaaaaatacaaaaaaaaactgttttgaagtattaaaaataaaaaaacctaaaaaataagacttttcaattgttttaaacaattaagtaatttattatcatggatttgtaggacagacgcctacactactgatggaaaatggaatagaatataggcgttgttggataaattcccatactatctatctcataaagaagttacaaggaaaataaaataagacctttaagtctcaatagaccattataactcttagagtagtcggttctgttttcataggcttagatctttaaagctctttacaataaagaagtaaataaaatatctcaagactctaactaactttcagctttacaaggaaatatcaacaacagttttctaactgttttctcagctcaaaacaaacacatcaca

SEQ ID NO: 385739 - DNA, 1795 bp, Cannabis indica
ttcatacatatatatacatacatcaccagccagcacatactcacatcttaattaaaaaaataataataaaaataataacaaaaacaaaccctacacaatccaacgaatccatacacacccacatcacgtcatttaaaataaattaaaaaaaaatcacaaaatcacaataatgatttagtaaaagatgaagaaactttttttttcttttcttgaggtgtaaaaacaagacttgagatattttactatttttacagttatgaagttgtggttgttggcaaagaagaaggttctcgttgagaagggcttctccaaaacccagtactgtaaaacctttcccacatctccttctcaagctcctctacctctttatctgattcctcagtcgagtaaaacgacgtcacttggtgacccttacactccggagaaaagatatcgtcttgatcggttgatgccatcggatgaatttgaagctcggtctcatcaaacccacacgagcagcgccgccgccttgtcggaggaggcaacagacccttcttgatcaactgacggcggcgcttcctcctcatggctcggcggcaaagcccggcgggaagcttgtaaatggcgaggaatagaaggttcatgagcccacatgggcagcagcagcaaacggcggcgcattcggctgccgtgccgccggcgacctcggccagccgggtgtttcttgatgaggagttttgggttcttaacaagggttgccttcggtttgatgagttgttgtgtagcatgatctgattcgacatgggtcggactttggtatctgtagtactgtttgatcaaaaagaaaatattataggattttctcggaaaatcttggtttctgatctgggttgattggtaattttttggtagttaaatccttttcgcattggagcccagccgggaaaagaattaaagctccctgattatttcaaaaatctcttgaggaatataccaaaaaggatgaggttctaaaaatttttgccaacaaaatttagaaccagaatctcaaatcaaagcaaaacccagaatctgaaataataataaaaaaagcccaattcaaatccaagaactttttcccgagaaatcaaaaatgaaaagctcaggctccatggaaatgatgagccgggatacgctacggccgagcttagaacaagggcataagctcgctccggcgttgattaagcagaagccacccgaagccgccgaactccgagggccgagctttaatttttggtggaattcaatggggttttgaatgaaagaatttcttattttgggggtaaaattataatctacggtggagtttttagtggttctttctttttttaggggtagtcctataaatttggaaaaataagaaccgaaatgagagagagagagagaaaggagagaagagagagagagagagagagagagagctaatgtaagtgagagagaagaaatttagagagtatttatttaaacacgcttcaggacaaggaaacgtgagggcaggaaatagtgagtcaagaaaacaaatcagaaaatattaaaagaataaataatatttatttatatatatatatgattaattagaaacttaaatattaaataaattaatgatgatgatgttaatgataatgataaaaatgatattggttattgttgattgttgatttgagatgggttaccttatagtgttaatgtgtatacatacaatcatagacaactaggatctcatcaatagaagagaacaccctatattcaattataaatgatgaagcatactaataat

SEQ ID NO: 385740 - DNA, 2076 bp, Cannabis indica
atatatatatattggtatatactctctactttcttgacgttaagagcattatgcatatatataatgtatatataaatatgcgtgatgcaatgtgccctaattctaatcttatgtgtatgtttacgtaatgtaaatatatatatacttatatcacagtcattggtcagagcttacagcttgttggcctatgagccacatggtacatccatatagttatatatcttaaaacaaatgcatgataaaaaggggagcagatgaagtaccatattatatatactagttggaatatatattaaggagtactgtgaacaaagctaggatagtacacccaccattatgtcctataatctatatatgtattaatttatttttgagttattggtggaatcgtggatgcattgcatgccatgccaatatacatgaaaataaagaatgtaaacgtacaatttgtgcatgtttcgggctactttttcttcccatcgtatatttatatttatctagcacacttgcttattaagtacttacatatatagataaagaagaaaggcctgcaatcccactatcattttcctaatttcccacatacctactttttaaaagatttagtatatatatgatcctaggtttctgtccaattaagtgcctggaaatgataatgtacgtgtttgtatacatatatatgtatgtgtgcgtgtatttataatttattaatgttagtcctcgattgcgttgcaatccaataaggttgttcgcgcgaacaaatttaatatatatgtatgtgaagatattctaagacacataaaaaacgacagataaaaatgagataataataagtgggtggctgtggcggcccacaagaagatgaagcatgcaaggcgcatatggggtctcgacattcacagatggacaaaagctcaaaagtccacttcatatcacttaactacctacttggactaaaaaaatgttttttctcactttgaaaataatgcaataataaaaattatttggtcatatgatgatcaaaacttattattataaagacacgattttgagttgacagatttatttgtcttattaacacatccaaaagatgcgtgttgttttatatgaaaacctactcttgtatacatactacaagaagtcactggagagtggaaatagactatagtacttggtaaaataaatattatatttgaattaactacattaataaatacagaaatattatccattattgcagcaaaagctagtatatataaataagtatatattatatgtggatccagcacccagccacgctgttgggagtgtctaatcatagcttaaaacaccctggtattaatccatcctaatgtgttggtttaattaaagtcaaatggaacaaacagggggctggtttttcatatatatgaaagatgatgatctatgcacgcaattgggtcgtgcataggctatctatatatgacttaaaatttacgagtggtttattacacttttattgaataaaaatagttaggtggtgtttgttagggaaaaaattaaagtataggaataggattagaaattggaataggaatgagaataagaatgaaaattgaaatggaatggaatcaaattcaaaacctacaaaaataatgtatattgaaataattttttttcattttaaaatggaataataattttattgaactaattaaaaaatcattctattagaaatattccattattttaaaatccaaacaatcaaaagagttgagtaaaggttttttttctcttttgttgtataatgtcttgcaatcaaatgtatataattgttgtagtgtaatttctattaaataattgtgtttgatataataaaaaattgtattcgattttgagcataccatttaaaagtctgcaatccccgttgaaaaaaaaaaacaaaacaaaactctgcaatccccctaacttagagcatgtttggtattgttttctgttttttgttttaaaaaattgtttttagaaatgagaacaaaaaatagtttttagaagtttttaaaacactagtcatgtttggttagtgatttttaaaaacaa

SEQ ID NO: 385741 - DNA, 1613 bp, Cannabis indica
gctggactaacctgttcggcctcctagccgatttgagtcacatcatcaactttttgagagggaatttgagcgtgggtttcgggctgcacgatcggcgtgtcaagttgatcatccactcctctcctcctattcagatcgtttctgagatcatgagtcgtccccaacgtatcaaatacggaaacgcctggctgtctcagtgactggttggtttggcccatgtgctgacaggtaccattaaccttgttggaattgttgggtatgacttatcccgatgaattactaaacaaggtctgccctcctaccacttggcccacaggcgaaacctgtgaccggggatttgacggatgaccatttatagtctgggaagtattcatcgctggatctttgtctgtttctcccaaggggatgacattcgcaggctgctgcccggcagtttgataggcttttcgtatcagcacagtggcttgccgactgcgatcgtcaatgatttcttgctgagcccttaatgtttccatctctttgtccctccatttggaaaacatgtgcctctgctcttcaaatgcgagatttaccgtagcacggagttcttcctgatcatgatgtagggtgttggtatgaccctgcatgagtccaagagcagcacggaggttctggatctcagtgtcatctccaatggttgtttaaacaatggtagagggcagaacggctgtgttatgaatgccttggtgggctgctgaactggtattcccagtctctttcacaccaagtgagatttcatccacaagagtcatcacaccatgacccgcggttgatggttgtccgagatttacagctggaagaacccttgtgtttcctggattctgcagtgcatgatccaccacatgtggattcactggatcaacctcgcccctatgagtctgtaccaccatcgtacttgtaattaaattttgaataaagagcgatccttgattcttctcttaatgaaagaaccaaaatgttgacctcacttttagccaacgacagtgagtctaattttgtaagcgacaagtagtttaatacaatagaaatatagtaaagcgaataaagacactagaattttatagaggttcagccctgtgcagttcggtaatagcctaatcctcgttatttgtattgacttaagaacaaggaaaatggttccttttcttaaagctcttacaacagtatctctgaatatgaattcttagaaaaaatctttcgaccctttgcccagtgaatatgaatcactatttatagggctataagcttggagaggaagtatttcccttctcgttacaattgatataagcagaaagattgcatagtaaatacagaatacactaatcgtaggatttggacagcttgccatatctctgtaatctgatcccaaagttatagggatttccttgatgactcacgatgcaaaagctgaatttgctaagtgttggcgttctgcggaaattaccactgctcggtctaaaggacctcgtccgagtaaatgtatgaggtgccctgtttagcctgtcacttgcaagcaggtactcagagtcgattccacgtgtcaccattgtgtgattccacatcagagtacaaaa

SEQ ID NO: 385742 - DNA, 1122 bp, Cannabis indica
atcaacgcaacaccttttcttcctttatatacttttggtaaagtaaataagtattgcttttattattatcaaattcaatcatacttgacttttttcttttcaaaaagatttaattaatctaaaagtaccacatattatcaaacaccagtaattttattttgcatgacataaaaaaaacactgatcataacaagtccaaatcatcaattaagtcaaacaaaatagtatttacaattagaattcaaaattacttgaaggggtcttaactagattactttacaaaagatactatcttatctgtatatatattcatattcataaaaactaaagtgaattacatcaaatttttaagccatacaaagcaccaccatacttcctcaactccttttcattagagtcaaaacaagtcaatctcatcttctgaaaagtcctccatgtgagcaaactatccgaaccagcttgatggctcaacccaacttcccttacgatctgcaatgtaccagctagactttccaaacccccatacagaccaggaaagaagcccatcatgtacttcatgtcatacacattttgaccaaagaagtatctcaccaggtatagaaaatcaggcaaaaagtgaggaaggaaacaaccagtaagaatctttaccaaatacccaaaatcataggcactgtggaaggtaatccatgtaatatcgctgttgaacacgagcctatagtgatacatcagattagcaaaatgagccgagttgattccgtgggagaggtttctctcgaaatctatcccctgtttcttcaacaaatctatagaatcgtgtgcgcacttatggcggtttatgtcgaaatcacaaaaattaaattgccaaatcaccgatgtttcgccgccgagatccgaaaagttaccgtcggaatcggtgagggtgatgttagaattattataatggactaatacaatcataggtttaattccataatacacaatcattaactatgtgcctaatgttgctaataaccataatggatggttaacaacttaattatgtgttagaggcacatgagagcacccttaatactatagttggctcattaaattatagtacgccataaaagaccccataagccca

SEQ ID NO: 385743 - DNA, 1522 bp, Cannabis indica
gaagtgaagaaatgttgaattaggcaaaagcattaagtttggggtggcagattgctagccagttgctatagcaaaggcttagcaagaagtgttttagtactaggctgatcaaatgaactggggtttgaaaaaaaaaaataaagtgaatgatctgtcaaagaaaaacatgtgattgaaatgttgttcatgattcaatcattggatatgtctattattgttcagataaatcattttgggttgtacttcagtgttgaattgagtgagcccaagtgatttttgaagatacaaagaccccacttcacattgtttaatcagtcttgggcccaattatttggtccactgggccccagcaagttttgaccaatccaattaatggtcaacccaacctcaaccctaacacattcagcatcatcttcttcatttccctttaccaactgaaccagcagctccacttgaagccttcatcacctgaccacaacccagtcgagccatcccagccatttcctcaccgtgaccaacgcaaccattcgaccaccaccacgacctaacccgtaaccacctccgaagcaccccagtcgaagctccaccgtgaccaacccaaccttcgaaccaccaactcacctgaacccgtagccacagaaaccgcatcatccatccccttaatcgcacaccattcgaacccaatagaacccatctcagcaacattcagttcactatcttcaacccgcaccatttcgagccatcccagttgaaaccccattcaggccgagctcgaccaagccacctccttcctcaatactcagtccaccattcgaacctcactcaaagctcaccaccaaatcgcactcagaaatcgagactcaaattctgttcaccaagcatcaaccgaacaccacattgaacacgaacgaactccctggtttgtcaagattgatgtttttaatttttaatttgtctttgaacaatttcttggctgccgagtgattatttatggatgtttattttggataaaattgaatttggatttgttgaagtagttcaattggtggtgtagtgcttgatttggaatggatattttaaaatggtgtagttaaaaattgatggtgtggcttgcaatttttctggagtgacaatataaattggtgtaactttgaaccaggggctgtttgttgtgattatttgggtcatatggagtttgttgtagtgttggaactgaagtaattttggacagattggtggtgtgccacaaacttggatattgattggtgtgctatgtaatgtgtacaaatcggattcagtatatggtgtaagaagtgtgttgtgaatactgtgaaagtgatgtctgtgggtggtcagagtggtgattttcgagcgagaatggagtgtgggcagtgaagtgcattgtaagagttattattgtgttgagggtcagcagtgaataaggaagcagagaagaaattcattgtgttggggtagtgtgcaagtgaaaagaaaagaaaatgccaaaagttaagaagaccgc

SEQ ID NO: 385744 - DNA, 888 bp, Cannabis indica
gtttacgtttttaaagaatattattattgttgttttttttcttttacatttgtacggattgtttttcttacattccgttatttttaagctgttctaaaaaagaccgttattttcaattgcaaaaatataatataacgttgcgacaatatgaaaacaatagtgttttcctctaaaaagtcataaatctgtaaagatgcaaaagaaaagaaagttcgtggtaatgtaaaaaattatgattttagttgattagtgtaaattatttaaaataaaaaataaaattcagcccaaactgaataaaccaaagcttattaatgaaagtggccctctaatctagacggcgtttggttggagagaatgatatgaaaatgaagcaattttttttttttttcatttgtttagttttattttaaagtattggaatgttatttttattctggctatgttttcattcttttcagctaaacgtcacataatggagtgtttgttatgtgagtttgagttgagagagttgaattggaagcaaggtcggcctttagattgggtgggcctgagataagttgaagaatatatcttttttgtatccagtaatcaaaaatgctctcatattatattttattaaaatttacccacttttatgagtgagttgtctaatatactcttactccacttaagtgtagtatatgatttacactaacttaaggggtataatggagacactatctattaaagtgggtatatcttaaataatatggaaatgaaggtaagatataaaataaataaagtaaaatgggtaggaaaatttgaaaaactatccttaaaaatctctaaatttatttccctaaatctatacctattaaaattgtccatttatgactccatttgattttt

SEQ ID NO: 385745 - DNA, 1587 bp, Cannabis indica
aataaaaaaaaataagaaaaatacgctaaagaaaatgaaaacatacattaataataatatggagaccaaatatatcatattcatttggattagggtaaatagaatcttttgtaaattaccgaattgcttactactgcaccaacaaattaatgttgataactttattggagattttagtgtttccataatgactaatcagttccaaactgataacattagcaaaagagatcgaagagaggagagttccttaatacaaagataataatttgaaatatatgttaggtttggtcgatctagaatttgcataaaagaagtttctaaaagggtgtaatgataaataaggcactactttttgtttttgtatttttggtttcactttactaagtctctactcaactcaaactctaatatgtgtgcttttgacaaattgagattacttgtgaaagcaaccacccacctctctccactctcactcaccattccaaaacaagaaataactaaccaatcccaattcatggaaatggaatgaaaaacccacttctcacttcttcaattttcgtctctcccattaaccccacaatctacataattaattgtatgaatgctatatattatctcacctttccatgtcttaactaatgtatcactaattattttttttttaaaaaatacaaaacaaaaaaataattcataactaaaagtctaatcgtgaatggttatttatttatttattattctagtaaggctatgaattttttaaaaatactatttttcactcaaacaaacacggttaaaatcataattaaagaaagaatttttaatgtatataattatagtgaataattcgtgcaaaaatacggttcatatttattttttgcaaaagtatgatattcgaaagaaaatagtttataattgggattttacacagtaaaaagaaaattagatggttgcgatttgggtttcaattttagaaaataccttaagcaaatggtagtaatatcttacgaggcctagtggtcttgaacgccgtgaacggagactagcacgtcgaatgggtatggtgttttacaattgtaatttaagtttcaatttaggttgtgacctgaattttgatttgggaaatcattagtagcaaaactagagggagtggattagaaggctgtggatggaactagcagtgatgaatgattcgatggtgatttaggatgtaattaggattgcaatttgagtttcagttagggtatgtgctcttaaagtatataatctcaccaaagtgaaggaaagaagaaaactcatcggtgaagagaaagaaagagcaaggtagtgggttacaatttgagttttggttaggctgttatatgagtttagatagggatgtaaagattatggagatacactttaatggcggtctccgatggtggttcccgatggtgatctccaatcgtagtctcatatggaagtctccaatggtagtctcaaatgttagttctccaatggaagtctccgatggtaggggtgttcgcaatgcaggtggtgcggtttttgaccattttttcaaaccaacccgcacatgcggtttttccaatt

SEQ ID NO: 385746 - DNA, 1566 bp, Cannabis indica
agtatctcgcaagtagtattggcatggcgcggtattcggcctgagcagaagaacggaaaatcgtgttttgtttcttggatttccaagaaatgagagagtctcccaaaaagatgcaataacctgtgacagaacgtctagtatcggggcaagcaccccagtcagcatcagaaaaaactttaagttgtacctcattaacagacaagttactctcggtataagccttgagttgtgtagatggagtggagtgaaaaaacaatccttggctcggggagcccttcaaatattggaagatgtgttaagcgacatggagatgaggttaccgcggggccgaaaggaattgacttaacctgttaacaacataagaaacatcaggtctagttattgctaagtaaatgagtttcccaatcaaacttctataggtggtaggttcagaaagtaactcccctatgtccttgctgagctgtgtgtttggttccatcggggtggagacgggtttggcaccaatgtaacctgtatcatttaaaagttgtaaaatgaatggtctttgggagaccgaaataccattggtggatcgcccaacctctagtccaagaaagaaccgcaaaggaccaagatctttgagtttaaatttggagtcaagctgtcttttaaataattcagcatcactagaattattgctagcaattaaaatgtcatcaacataaactaagacagcaagaaaaatgttgttagaagatctaataaaaagagagtgatcggaagaggattgtttgaatccttcacttaccaaagtagaactaagtttggcataccattgtcgagaggcttgtttgaggccatagatgcttttatgtaatttgcatacagcattgggaggaaggtctccttggtgtttgtaaccgggaggaagtgccatataaacttcctcattgagatcaccatggaggaaggcattgttaatgtccatttgatatagttgccaattattaatggcagcaagagcaaggaggactttgagggtattaaactttgctacgggagcaaaagtttcaaggtaatctatcccaaattgttgggagtaccctttaactactaagcgagctttaaacctttcaatttcaccttgggcattatattttattctatatacacatttgtagccaatgaaatgatggacaacaggaagagagacaacagtctaaattttattggctacaagtgcaacggtttctgtatccatagcttttacccatatgggaaatttagaagcttgggaataagaagttggttcagagaccaaataagcacttaaaatagcagcatgaatgatcgtccggccaaatgttgtagtgacgttggagtcacttgtatgggctggaatagctgttggtggaggcagtatttcagtaggaaagtggtaggagtggccacatgttcgagcgacggtggagggtgtataagcccaaggaccgcaacctttaaaggagcatgtgaaagaccactatgtgaaccattagtgttggaaaatacgcatcaatattatcattagaacatgtatttttaaga

SEQ ID NO: 385747 - DNA, 943 bp, Cannabis indica
tattaggacaaagaccaaaatagtgaaatctaataattctccacacctacatatatatttaatatatttaatgttgatgacctgttttgttttagacacactcattacatataaaaaaaaggaaaatttgaatttcaatgcatatattagggaataatttattttcttaaacttaaatttacttaattcccacattactccccccattttaaacctgccctctctctctctttcgcctctctttctctctttctctttcgctcggtgccgcacccacacacgcaaaccacccacccacggcagaccactcatgcagtctatcggcctacgtgacccacggcagaccacccacggccggccgcccccctcaacccacatcatctatgccgaccacccaaaccacccaaaatgtctaagataattttttttttcaattttttcctttaatttttggtgcttgaattcatgaaatagaataacatgttgcaattttgtgtgacatctgttagttaaggttagatttaggaagattaggaagagtaggaagagatttgtcaaaaatgagattttttagatcgggccccatcccgtccgatggtcgagtctaatgggggcatggctggaagttgaagatgacaacccgatgggcccgatgggccgatataggagggtccgatgggactgatcacttgggcccgatgggccgacgggatcgattattgggcccgattggtccgatgcctagggcccgataggtacaatttacgtttaggggaaaagatgggaagagaagaggatgtaattgggggagggtattttggggaaaacaataaagttgtcatatattagaaatattggtaagtataagtttagaaaaaaaaaattacaaggtaatgtaatcataaaaattcaaatttccctataaaaattcattattgttata

SEQ ID NO: 385748 - DNA, 1016 bp, Cannabis indica
tatatataatgttttgtcttacaattggtgaagtaagcaaatataacataaaataataacattttatgatagctgactttacttcactaccaatcaaaacgaattgcagtgtcaaaagattttgttcaattaataagaaaaaaaaaaaaaacagacacaatggcttatgccaccagaggttttctgttttaatatgatacaaaatcgaagtgggttccctcttccagatcatttggtcatataatatatatttttttttcttgaaacaaaacgtcatcaactaaatcccattgggatctctgcttatatgatttcttttgaaataataataaaaaagaacctttcttgtgaatgattaaaaaaaagtcctattctaatccataaaaccaacccttaacatttagatagttttatgatgtaaagtttgataaattaaaatcatttataatacataaagtagcattcattttacacattaaaaaaaaataagatgtttatgcaataaaccatgttaaaatatctatttattttgacatttaaaagatttttttaatcaaatttaattttatattatattataattatttaagatatttcataaaattttaaaaaattcaatataatttatcacgtagaaagtagtgttcaaacaatttattttacacgtttataaaattgaatagtcacgtaatacactatttgaaccttgtttttagcatgttaaattttttaaaattttacaggatttcttaaataattttaacccacataaaaaatttgaccaaaaattatttcaaataccaaaataaatataagtgtatcaacatatttaaatgatatattgtaaaattttcctaaactatttatttaagttttatttatagcaaatttacatcaacatacagactcagaactccaaaacacaaatagtatatattaatgcacctctttaaaaagtgcactaataaaattttcaaaaaaaaaaaaacttagaatttattaaagaaaaaagttaa

SEQ ID NO: 385749 - DNA, 584 bp, Cannabis indica
tatgataaccaagatagtgccaattagtaagtttaagcattgcttgaagctgatcggagtcagttgagcccagaggggcttaggggacaacaacatttaaataattgatttatcaagagaattcaacttgaaaccaaggtagagatttgttggttatggttacaattttagtcatctaagattggaagctgtgaatccggagaacaaatactaaaagcttagtgtggatccagaaagccatggtggaaggtcttatagaatatctagaaggtacttctagataatcttgtaccgtgtatggaataactctcctgcatagcttgtcactgatctggaggtcactcccagactgcttattgtcagtctagaaggtattccgaaggaagccatgtatgtatccggaaggcttgtgtgttaatagagcttctggattgtctgtactgaaagcacgcctttcaagctaacatgagttattgttgttagtgatgagctggatcatttaaagcagtgtaaatgtgccatggaaattttggagatatttttggtaacaattcaaatctatatatagttgtaaatctttgtaa

SEQ ID NO: 385750 - DNA, 2109 bp, Cannabis indica
gtagacatttccagtagcataaattttatatttaaacactttcaaattgtatattttattagaagcatataaaaaaaactctatatataatgttaattgaaagtttcaattttctccgatagccaagtgatagatttaaatttgttattactatgaattgaaacataaacccaaatcaaagacaccacatttacaagcttcctctgcattggaaacacattccaatcgagtagtgcttgggtttccatgaaccagataaagtaatatccactataaaatcaaatcaattacaaacactagttctaatttttacaaaccaaactatgtaatctgaaatgacttttacacgatgttacctaacactttaacaaactcaagttaagagatctaaacacatttagatccaagaacacaaggtccccttgcatccacgcagctgatgagcctccaacagttcactctgaactctcctcagacaaagcaaattcgtactccttcttcaacctcttgatataatgtacactggatttctatctgcatataaaccagaaaaatacacaaaagaatattttgccctaacaaagcaagaatcaagaaaacaattctatcaaaaagagagttaattagaaaaagagacaaccgaatattatatatcctgttgagaaagaattaacttgactaactaacaacctagcaaaaaacagctggcactaacggaaaaaatataatcaaaataacaagaaagttgacatggcaaactataacagatactaagacaacagatgaaactaaaagcaacttagatgaccaatgaaatatactaagatagtaaaataaacacaaggtatttacataatttgccacacagaaataatgactcttacattaatgctataagggataaagttttttttcaaacacttctagatttcaacttaatgaagctaaaactgttatttattataagtgggatgaaagaaaatgaggtgcaacgagtggtagatgcatgcctctgaattttttagaagtaacttgccatttaagtatcaaattcgcttaaagaagatcatcacaatgcaatgtcaaagtgttgtggagaaaatggttcaactcatcagaaagtgaagcactcgcaacagtattaatttccatttactcctatcaggttcagattttaattttgccaaagaaagttctgaaagaagtagaatcaatttatagatcttttctttggaaaggtgtagtgacaggtgttggaccacgacaagcttggactcaggtttatacttctaaattttttaatggtttgggtttttaaagtattttgaattagaatgtagctatagggaaaatatgttagggcaataggtgcacaaaaagataatttatgggttaaatagatccacaatgcatatatatctgcaatgatgagtcgtgcaactacgttgctccaatagatagcaactggtattgaaagaagattgtaactgtcatgaattcttttaaagacaagatggatctcacctcgtttgcaacaggtaaatatagtatgaaagttatcatactctctatattctctacctgataaagtttcttaaagcaatgaagtgtggagtcgcggttgagtatgcgaaaacataaattaattctttgattgttagtcgtgagaagcttcgcagtagaattttgatgtcttgatttaatcaataagatgtgtttgctatgtgatgataaagaagagtatgtgcaacacctttttttaattattgtgtttatagtgcaaacttagtagaacgaaaacatgcatggctaggatggcatgctccttctcataggttgtatgatctttttttgtgttagattagtaaaactaaaggaataagtcacttcaaaaagcaattttttggtctcagaaattatggcaagtttgctcatttgtttcaacaaattgttaataatgttaaatataagaggaaattacacttagtatgggattttaaaagttcttatgataaatatggcacatttaagtttggtcaatttatatggtatttttttatttttaggtttttttatggtatttgatatgccatatatatgtaattaggt

SEQ ID NO: 385751 - DNA, 1678 bp, Cannabis indica
ttttttttaaatggaatatttatgtgaagttgtttatacataatttactctttaagatgttagcacatctttgagcttgggagtatgtactaagtgttagtggcatcaaggaaaacaagactaccatccgcaaataggagatgggtaacctttgttccaataaaccaaatctcaggttatgaattctcccagcccgttcagcctcatgaatcaaacaagacaaccctttagaacataaaagaaaaaggaaaggtgatagagggtcgccttgacgtaaccccctctctagagtaaaattacctctaatcgaaccattaagaataatagaaaaagagactgagcggatacaattcattaccttagttatccaatcatcttcataccccaaacaagacatcatagctttaaggaagtcccattccaccctatcgtatgcttttgacatatcaagcttcaacgccatttttgtcccattaccaaatctcccttttctcatacgattgaggctttcataccctaagataacattgtcttgaatgattcaaccaccaataaaggcactttggttagcttaaattgctgtgttcaaactctgcttcatacgattggcaagacacttcaataccactttgtaaactactgtacagagactaataggtcaaaattcagacatcttggtaggcttttgaaccttatggatgaggcaaataagggtctcatttatcaagctgcagtccgcattcaagttgagaacttccaagaaggctacagtcacatcgaggtcaaccaagtcccaatttttttggacgaaaaggcccagaagaccatctttccctggggcctttaaagggtggatttgtaacatggtcgtcttgacttcttcaatattgaaaggttccaaaagtcgtctattctcatcagggcttattctgtttggaacacaactatggagaatggccttaatattgtacccccagttggatttcgaaaagagttgtcaaaaatattgaatagcaatttatgagatgtcctcctcgttagtatgccactatagcttatcatcagacaaccccaatatcgtgtttttttttccgcttgtgggaagctttaaaatggaaatattttatattttgatctccatgttttaaccaaagtggatggctctgttgcctccaatatatctccattttctcttctacacaattaagatcaacttttgtaatgttagccaatcctcttgacacgtcgaattggctaacaaacgatcttttctttgagctccttagtcctagcatgaagatcttgcttttgttgaacattccaaatgtgaagattttttccacaacactgtatgagacgagtaagattatgcaagggtctgctcatatccttactcccccaaacttcttcaattattttgtggaactcttcgttatcagcccaagcttgttcaaaatggaaacgagagccccacttatttttcatggccctgctatcactaccactctaagcattaagcattaacggccaatggttcaaattccaccagtctaaaagagtagacttagtcacatgaaatttctccagccaatccaacgtacaaaagactcgatctattttttaaaaaaacaggttcttggatctcccattacaccatttgttatcccaatttttgcac

SEQ ID NO: 385752 - DNA, 1673 bp, Cannabis indica
ctctttgtctgacaaaaattgaatcaaatgaaagctattattattctattcattattttcgaaattctcttggtttcttactcaaaattttgtgttccttagtgttgagaactttctcacacatatcaaagcaatactcaacatattgagtaagactgtgtagctcaattgtcatcagaaggagaattcaggtttagatcttgatcataatctgtaactgaaaggattaagggttagagatctgaacgaaaggagtcatattattttgttgccattaatgtaaagctttttataactcttagatgtttatttattattttaggaatttcatatttaggatgttagtaattctagttcctggtatagttagtttctaataattttatcatcagaaggagaatccaagttcaaatcttgatcatactctacaactgaaaggatcaagggctcgagttctgaacagaaggattcatattattccgatgctattaatgtaagattttttataactcttatgtgcttgtttatcgttttagaatttttatatttaggatgttaaattatagttatgtaatcaacatacaagagtagtaaatctaaatcctgataaaataagtttccaacaaataggccaaccacaaatcaaatttcttagaatgaaacttcatgatggaaaatatgaggcccgagaacacatagcacaagagctgttaaaattcccaaatgaaggcctcacaaaaatccaaatccaacaattccccaaaattataaattacgtaagggattttgtaccccacttgtctaagatcacaagcccataatataaaatgttccaaaaatgatcttttgcttgggaaaaataacaaatggttgcaatcgaaaaacttaaagagatgatgctaggcctacccccttcagattccctcttacaagaaaagaatcttataagaaaatgcgagtgacaaacactagcgagctatcctactagaggaagacgatcgtggcaaacgcaaagtgtgcagttacaaaagtggggctttcaaagattcctagctacactaccattccatacttaaagagatactggcaataaaaatgggcatcacaaaattcgagttccacctcatcaaacataatttcctagtggaaaaagattttgctacatttcaagggatgctcacgttcaaacagaatagactagtcaattctcaactgctcaggttagccacatggttctgatgtcatacgttcaaaatcaaacacataaatggaaaaacaaatgtaatttttgattgcctctcccagtcaggcaaacctattataaatatgatcaacccgcaaactgaaaatccaatctctttgattaaatattcctatttaagttataaattagttattactaactaattttccttatcaacttaaatttgaatatcttttgaatttaatattaagttgaggaattctaggaattggttattgaagattcttaagatatttttcttaagttgattttaaacttaaaatggaatattcttaaattaggtagttaccacttaattttgatatttaattaaattttatttggaaaattttaagttgcttattatagattctttctataacaacttaaattagatattttccaaatcttgaaaatatacttagttaaa

SEQ ID NO: 385753 - DNA, 684 bp, Cannabis indica
aatatctgtatctgtagttgttgggccttacgtgtatagctttgtgtgtgcctttatggactcttcttttgactttcaaaagcttgtttcatttctaggcttttgttgagtgggtggaagccttaataataaaattgggattattttataaatacacgaaaataacaaaaaaaaaaattacaaaaatataattttatgaaattttaaatattttgataataatttttatgttgattatgttggaaaaagtagtggattgttattattatggaatgatgattgggaggtgtaagtaaagtcgtttacggttggacatattgatgacttggttaaatatttgggtcgggattggtaaatcttggcgattattatgttggcttaacgagatgtatgatgttctatggatttatgggtaattttaacgaaattctctcacttaatgaaaagaaagggacattgtttggtgtatttcagccatgaacgatttccaacaagcttcggataaacgctctttggcttgggttgagggtcaatgttttacatggcttaataaaaggcagggtggtgcgcatgttcaagaaaggcttaatcggtacatttgtaatcaacagtcgcatgcagggacggagggactttagcccatgtgtgggctaaagccctcactcaaatatatacatcaaattt

SEQ ID NO: 385754 - DNA, 1312 bp, Cannabis indica
tagtaattaccctacctagtatttacacgattacttccaaacacacccttagtatttttgtcctttgaattttaacatgtacaaattatgttcctaaacttgtaaagtcgttaaaatcttccttgaattattgagattgttaaatttaaagatttttttttttaattataataaagaaagtctaacatggatgaaagtttagtggcttgatttagtacatgtcaaagatcgagagacatgatttgctagatagtaaagtccaaatagcatgatttagtacacaatcacaaaattagtaaaatttaataaatgttcttaaatctaataatctcaataattaaaggagaatttttaaacagctaaaaaagtttaaaaactgatttaatacatatcaaaatacaaaaattctaattaaccaataatatttagtctcataataaaataagtacactattcaaaaaaaaaatgtacgtgtcttgcaaaactccctttaatttcagcaccccaaaaccttgatcaaagtcacgacttttgacattttctcttcttaacatctcctctattctaagttatacattaatgtttatatatatatatatatatatatttggtgacacatacacaataaggcttatacacacatgtatgtacataatataataataatatatattaaataaatatgtataagttagggtatctccattcaatccaaatatgtatagagagaattagcttcgggggccaagttgatatgatataatatgagtctgtctatttcaagatttttctgaaaacaactttataaaagctacgttctttatataagataaaaccacatatataaaatagtaaaaatatcaactatacaatatctgtgttaattgctaagttaattatatttgagaatcgtaataattaaagagaaataatgtataggccaaaattcactgctgtcttctttctcattcttcaatatgcaaatagaacaagaaaaatgctccatcacgtacatgtggaaatgaaagttttactaatttaggtttaatttgtatacatacctttaaaaatacacaaaatactatttgttacgaaaattttaatatttttttttcaacatttttgtaattaaacccctaaattaaaaataataattaagaaaattatatgatacaaatttaaatctattgtactatttaattccttttcgttaatttatatttatgattttattgaacataaaagaccatatttaattgaaaattttatatagactaaatatttaaaaaaaaattacaaaaatacattaata

SEQ ID NO: 385755 - DNA, 1099 bp, Cannabis indica
ccaattcaccccccctcttggaaacatatcttgggctaacagaacacactctccaaagtagcaaactcatcctaggatgtaccttagagttccaaatccatctccaaagttcgtctttttcaccaaacctctcttgttgatcaacccaataggcaccctttacactgaaatttcccactaaagaattcttccaaataagaagatctctaaaagcattcaagttaatttggatcctcccaatcctattgcccacatcattaccaaatagatatcgaagatagcccacattccattttctggtacttctatacattaaatcagccacagatctcagactcggagcttttgagcgaatactctccatcaactcacgaaattgaacataatccaaccatggaatccacggttgccaccagatatccacctcttcacccgaggcaaggacagtacacgcccccttagaaattgtattcctagctcttaggatgccacgccacaaaaagctatccgtatgcttttcttgaacactccaaaaagattctctaggaaagtattttccttttagaatatcacaccaaggacgattaatcttacaagccaacatccaagcaagtttagcaagaaaggcatgattgatatcttcgaaacggcgaaacccgagaccccccaacatcttgggttgacaaatagaattccacgatttcgctgcccacatatactgattttcaagagaaccattccaccagaaccttcgaactactgcatcaagctctcggcaggaggagagaggaattttgaatgtagacatggcatagtttggaagggccaaggcaactgagtttatgtacactaatctcccaaccttggacagcgactttaatttccaaccttcaagtctctccaccagtttggatttaagaaaatcaaaatcttttctcttactcggccgaaataaaggggttacccagatgtttctccgagtccgtaccccgctcatgtccaacttgctttcaatggcttccctgagcgagctagaacaattgcccgagaaaaggatcccagatttctgtttactacacttctgccccgaccactcttc

SEQ ID NO: 385756 - DNA, 939 bp, Cannabis indica
caacaacaacaacccatttactattcatcctctaatcaccttctagaaccttgttcatcaaacgacgccgttttcacctactggaagtggcgtgaccaaaccgaagccgaggcagaggccgaggccgaggaaggtgtcactcctccaattctgaattgttggagggcttgcagtgactgcgggaacagagccaagaaagagtgtaggtttaagaggtgcaggacttgttgccgtgcacgtgccttcccttgctctactcacgtgaggagcacctgggtccccgtcgcttgtcggaggaagcgtcgtcgtcatgatccttcttcttcttcttcttccatctcatctttttctcattccaagaggccaaccttgtatgattgtcacaccactacttccatttccaacactctcacgactttcaccaatcaaggtcgtatttctttctctcttggattttgtgattttttttttttggtgaaaatggtgatttgaggagaaaattgaattgggtatttgtttaatttatttaaattatgttttatcaaattctaaagaaaaaaatgtgaatttgattgatgaatctgagtatggtctgtggaatatgttttggaaaactcgatttttcaagattagtgtaaccaatatgattgacaagaactaataaaaatattatattattcagaagaaatctgaatttgaagaataaacataatatattagtttagtttttttgagatgatttgcaaaggtctcatagttgattgccaatctaaatagtttatgtgtatttgtacacttttatacatatgttaaatgtatattgttacaaataatattattattttaaaaatataaaaaatacttaaaaatttataatatttttttatttttttaaatattttttttttctattttttgtaattttatttaattttaaaa

SEQ ID NO: 385757 - DNA, 1716 bp, Cannabis indica
agaatatgaaagttggggtacctctggaaaagaaactaataggttgtccaaggaaaagcgaggctggaagaagatgggagaatcgtttcctgtttggtgataaaaaagtaaatgtacctcaaaactgaagcctttgtggcggttcagtccactatagagcaacatgcaaagcccgtatttgagacgtactctacttatgagttgtaataacatgttctgtatttgttattcaaaactgctttaaaatcaggttggtactctacttatttgttgagaaagagaattttttctatttttttaaaagttatcgacaacatatcgatataccttcgacactattctcttcttttgaaaaaaaaaatatagccaattaattgagcagattatcgagaacatatcgacatcatgttgacaatgtcgacaaaaactattttttgttaaattagcgtatcatataatatgcatcatcgacaacacctccaaaaattgtcgacaaaatgtcgataaagcgttgacaacactctgttcatgtgtacaacattttatcaaacaaaaaacacaactaagttagttatgtcgataatatatcgataacatgtcaatgatatgtcgacaaggcactctacttgtgagataatatgatttgttaaaaaagtattgagtaattcatgttgataatatatcgacaacatttcaatgtaccatcgatataaaaaatataaagctatatttttaattatgtaaattagacgaaatgtacactgtatttttaattttacaaaatatataactgtatttttaatttggtaaattagacaaaatatataatgtatttctaattatacacagatattcaatcaagattctggtaatacaaatcaacgcatcaccgttcacgaaacatcttcatctgatcttgcgtgacatcagctactgaacgttacatcatcaaatgctccacatactcaatgccataaacgccacaatcaccactaaatgcaacataaaatataaatttagtacattgtaaagaatattttattactacaatactttttatcgttatgtactttattttcgccttcggaactaagccgtgagaggctcaagacgaatgcatcctcagaagctccttgatctcattcgtagttaacgccatgatctggttattggttggaaaatcttcagttgcatagattaatgatggccacagttcttcccaagtcttcaggatgggtgtcatgctgttccaatgacaaatactgaaatcacagtcgtatacttaattttccacagctctatgttaacttcaacagccacccattgcctctgtgtgtgaagatacaaaatgaagtaaatgaactcattaccccccctcccagatagatttggtcctgtaattatggagaaaagctaaattattaacaaaccataataaacttgtaatcatagttgaaactttaaaagcttactaaatcaatacttgataaccacctctgcagtactccatgatataatcctctcaaacaaagtttttttgggacccttgtgatttgtccatgcactgctgatgatagtggtcacatatgtggagagaatgatacccttctgcggaaatgtcaatggatagaagaagcgtcgcctcctcagcatatagactgatgcatctatatgctgcatataaaggttagaggaagcagttagacaacaaaatat

SEQ ID NO: 385758 - DNA, 921 bp, Cannabis indica
cgggtctcgagtcttgggtctcgatctgggtcccaggtcccaatcccaatttgagttcgagtcttggcgctagtttgggtccaggtccgggtcctgagttagatccaggtctaggtccctggtcgggtctcgagtttgggtttaggaccgggttgggtctgggcccaagcctgagtcccgagcttaggtcctgagttcgggtctggatccggatccggtctcgggtcctgggtctgatgagtttggatcccgggcagccggttcggtacgagtttgggtccagggtctaagtcttgaattaagtcatttttttaaaatataatgaaaccggatcggatctgatctagaaaaatatttattcgaatattttggattaaaagtgatcaattgaatcgaaactctgttctgttccaattaaataaatctttttgacatgcctaacttaaatttattattattgtcttggctaaaaataaatatatgaaaaggtcaacttaaaataacaaaaataatattgtatatggagaagacttcacagtgaacaatttaataaatataaataaataaaccttagttattattgtccaattgatttttgatgatcccactccttttaatgcaattttacttctgccctatcctcaaacacacacttatatataaatagtgttgagtattaattagctttatatatacaattttatatatgtgatatatgtatatcacaacatctttttgcagtaaagtgagaaaagttaaatgggttgcttgcttatgatactccattgcatgacctatataattatatatagccttcaaattagggtaagtgaagaaagtgggcaataatgaaaagaaataaaaaaaaaagtagacaataattaaaatataaataaaaatgaatatagcctcactttttct

SEQ ID NO: 385759 - DNA, 983 bp, Cannabis indica
gactaaaaaagctaagagtcaattgaagcaaagacagaccactattcgcacccactgggataataatgcgattgatttaaaagttgatctggacaaccacttcgtaatcgtagaaagaactcataaaccgaaggtatcatgttccattgaggaaattcatgaagatcacgatgttgcacccaaccaggttttttcagtttggggctatggggacttgcccggaaaagtccccagaatcccaatgaaggtcatggcttggaactgtcgcggactcgggaatgtagcgacagttcgacaactgaaggatttaatccggaagtcggatcccgaaattgtaattttatcaaaagttaaattatctcgggacaaattcaaacgactaatgtctaggcttcacttcaaggaattgttttatgtccctctgatgggatcggcaaggggccttgctctatgttggaagattggtgtgctgtgttctgttgagcaagcaaataaaacaaaattgttgcacagattaactcagaccccccgatcgaccgtggctccttattggtacctatgggccgcctacagctttagaaaaggaagaattctaggatgaattgggcgatttcatctgccaatgcaaactgcctctgatcgttatgggagatctcaatggaacgctgaaagataatgaatgcttaaactactccagatctaacaacatcgcgagatactccttcgaccttcggagaatggtccttcgttcgggtctcattgatttggggttcataggcacgagattcacatggtttagaaggaactctagttccacggctagaacctccttaaagagaggcaggctagatagagttaagggatcagctgattggagagtaaattggcccaatgccattgttcagcatctacatgcggcggtgtcagatcataacccaattttgcttgacactaatggtgtaacaccctaactatcttaggcg

SEQ ID NO: 385760 - DNA, 2251 bp, Cannabis indica
actaaagaaataaaaaataaaaataaaaaaataacgaaccaataataattctaaatacaatacaagacaaccccccacccccccccctaaaaaaaaacttttacttttcaaaattatcatttccaacttaataaaaaaaattataaatcataaatcacgctaaacaataaaatcaatactctcttgttaaaggttagggtcgggttcgtggtagggtttgactctggggccctaggttggggcggggtccaaggtcgaggctagtgtttggggttacgagcaccgaactctaagatgtcgagtcataactaacacctataataactttaactgttggttagtagactggcactaaacaataactgagacaaaaaaaattaaaaaatatatacatacagattgagtataagggtcgattcataaccgatactaaaagatcatttggtgtcggttagacacattttctttttaaaaaagtttctgaataaataaaaaaaaaagacaaaaaaaggagtataagtacaatattaggaaaccctaattggaaaaccctttctcttcccttttaactctctcccgataccctccttctctctgctccctatgatccctgacggcagccacgaccatgcgtcgctggcctcatcctaactactttctccaaaaatgaccaccactatggtggccgtgaccctaagaacccaaaattgcactcccgatgtaaagaccgcttagtttaaatttggaaattagcagataattaggatttaattatgaaaattatttattgatatttgaataattatttatattgatttattggaattcagaatgcattttatatgtcatatagtgaaatttcatcttattgcattttcggtgcccggcaacatggaacgcggtgtatggctcagtagaatcacaatttagtattttagtatagtgggacaatttagttagacattgagaatgtcgggtttggtcgggaatttagaatttcccaaattaccccttagtacccctttttatgtcaacttagtgtgtgagggcaaaaaggtcattttgcccatttgtaatttgtcttttatggattttaattatgttgataatctgatttttctagcatggtttggctgaagcaaaataaggggaaatcatctttatttcattttattcaagaaaaaaaaattagaaaagttgagaaaatcacatttcttcctctctcaagctctctttctctctctcgaaaatccttagggctgctagggtttgatttttgttcctcaattcagcaagttttcaacaagttttagtgtaattcaagttgaggtaatctttgatcaatctcttctttatttcttgaagtttaagaaaaatgagtatttttgcatgtttgatgattgtgtggctgtggctgctgttgttgtttattgttgttttctaaagcttaaatatgtttaattgagtggattagaacatgttttgatgcatgttagtttgatttaaccaagtttagaattttaaactcaaagctttggtttttataagtgaaatattatttagcttgttgtagctgctgtggtgagttgctgttgtgttctgaggtttagatatggacttttatgttgtttaatgcatgaattagaagctgtttgaagggttagtcaagttttgagtttttgaactcaatcttgaacctttaatggtgaaattcgtttctgtgaatggatgattattttatcacttggaatatgttcattatggtctaaatagcaggtctggagagtttggtttgatttggggttgaattgcatgagttgtgaattttttttaaaaattcctgcactgaaccggaattccagttcagggaggcctgtaggaaccggtctaccggttggcttccaagaatttttcctagaactggaattccggttggggaaccgatctaccggttggggcaaatttgggaaccctagtgcttcccatttttgtgttatttagggtattgccatgttatttatcaataggaaaacttctagtttcgagtttaagtcgccggaaagtgatttagcgtgtcacttattagtgttgtgattattgtgatttaggagcctgtaattcgtcgagcagattgttccactcaggttgaccggcacacctgaattcgaaatcgaggtaagattagtataatgtcatgcatatgcttatacacgtttgcgtacatgtagttgccatcaaattaacatattag

SEQ ID NO: 385761 - DNA, 3922 bp, Cannabis indica
gcgaaggccctaaagaagtggctaagggaggcccaagatggtccctttcgaggcgaaaataccggggatgtctgggatttaaatttggatcccatgataggctggtttaaatgctttatggggcctaacctggctccgttggccttagagatggtgagtcatttggctgttgctttagcccaacttcccaccaagaggtatgcagcatgtgcttcttccaaccccgtttaccagatccaagacatgagcgttgccttgactgcagtaagtgtcaattttccacacctcttttatgcttttatttttgaagttctaaccttatcctttatgattgcttagaattctttgaaggccagtcgactttccaggactttgatcgatcaagagttcaccgtgtcagagtttggcggcatggacagggtcgtgaggaagcttagggagtcagaggaccagattgaggctcttcgtgatgaagcccgagaggagaaggccctcatgaagaggaatcattaggcgacattgaaagcaaagaatgatatcatcgttttaggcaggaaggacctccaggattctagagaggagaaccagggacatgttgtgaagcttaaatctttagaggagctacaacatgctgacttggagacaacgcccaatatctattaaactcaaggagctttgcgagttgtggaaccaaacccaaaagaaggctgccaaggttgcgagggatgttttactggctctaattacttataaggactgtgagaaatgctttaaagatggagtgttttgtgctggaaggcgaacaagtttaaacctcatcttcctttcttccccgatcccgaggctgttatagctaaattttaggagaagaatgagaaattggaagctgtcccggccgagtgtaaggtccccgtcttcctccacgagttgactgattaaacctcttctttcttctttttatattttgcttattatcccctttttaagaaaattttatttttgtattttttatctatattttaggtaaggggagactattatggcccgaccccaggccttttagtatttatattttggacaatttttattataagtttatatttattttgctttctttatgtctagcatgtttttgcgtgtatcttacgccttagtaccctcctaagtgataaaaaatgactttttgggtcacttagcttaaatttatgtgggataatacataaagttaatccgacataggttaacttacagaataaagaaggatgtaattactgaactcgtaactattgatagtgcttgcgaagatggtcagcattctaggctctaggtactatggatctgtccattctcttgagtttataagttccgaagcctatttaatcgtcaactttgtacgggccttcccaatttgggctgagtacccccactcctggctcttgggaggtcgggaagacctttcttaggactagatcactaatggcaaatttcctatttttgactttgcaattaaagtatttttccactttcttttggtacgctgccatacgcacttgagattcctcttggagctcgtccactagatccaacgcttcttgcagtaaggcttgatttattgctggatcgtaggtggctcttctatgggacgagattatagcttcaactgggaccattgcttcacatccatacaccattgagaatagggagtgtccggttgtggttcttgtagtggtccggtaggcccataacacgcgtggaagttcctcaggccaattatttttgcaggccaaaagctttatctttagggtgaccttgagtattttattgacaactgtttcctgtccatttgtgtgtggccttgtggccgcataaaaacttttgatgactccgtgttgatcgtagaaatctgtgaattcatcacagtcgaattgctttccattgtctgagattattttgtgaggcagcccgtatcgacatataatattttttatgacattgtccaaggctttcttgaaaattatggtcttcataggttcggcctttgtccactttgtgtaataatctaacaccactatgacatattttaccccaccctttcctgtgggtagggagccaatgagatctattccccataccgcaaagggccgaggactagtcatcaaagtaattttactgggtggggctcttgggatatttgaaaatatttcttcattgtgggccaaaaatacccttatcttaatattttctttgagaggcttgggcctccagtgtgatctccacagaatccctcatggacttcttgcatgatctgtttagcttcaagatctgacacacacctcaaatatggcatgctgggcccccttcgatagagaataccatcgatcattaaataccgatgagcttggtactgtaattttctaaacatggtcctttcttgaggaaattctcctattgttatgtacttaatgatatggtccatccaacatgacccttgctccttagtagccactatttttttggtactgatgctaggctctacaaggtgttcaacaggtaccacccgcaacttctctatctcactatctgaggctagcttggctaggcagtctgaatgggcattcttttctcgtgggattttctccactttatattccttaaattcttacaacatttccctgacgactgatacgtaagcaaccatcttttctcctcgggtctgatattctcttgacacttagttgaccacctgttgtgaatcactgtacacctctactctgttggcccttacagccttggccaatctattaaggcttcatactcgacctcattgttagaggtcgggaatgtgaattatagggtagcctggagtcgtaacccatcaagtgagatcattgttattctggccctagacccattttcattggacgcctcgtcaacatatactttccacgtgggcgtaccctgagtcggcatactggcgctggcctccatcttgttgccttctacaataaagtctgccaattcttgacccttaatcgagatacgtggaatgtactgtatgttgaactggcttaactccatggcccacttgaggagcctccctgaggcctcaagcttttgtaaaacttgttacagcgggtgatttgtaaataccttgatggagtgagcttggaaataaggcctgagtttccttgatgaaattaagagacagaaggatagtttttcaatcagaggatatcgaatttcaacccctatcacgcgtttgctgacataatatacctagtgttgaactttttcctcctcccacaccagagctgtgctgaccgcgttctcggaaacagctaactataaatataagtcttcttcgtgaactggttttgacagtactgatggcttagccatatgctctttcaaccttctaaatgcttcctttcattctttggtacattcaaacttctaacatttcttcagggtgttaaagaacgggatgcacttgtcggttgagtgggagatgaaacgactcaaggcagtaacttttctagttaagctttgtacatccttgtgtttctttggggaaggcatactcaacaaggcttgtatttttttttagggtttgcctctatcccgcgttgacttactgtgaatcccaaattttttcttgatttaacaccaaaagtgcattttttgggattaagtttcatcctataccttcaaactacctcaaagcattctttgaggtcgtccgcatgacccatgcatgttttggattttaccagcatgtcatctacgtatacttccatgttccatcctaggaggcctttgaacatttacttgaccatgcactgataggttgctctgatatttttcaatttgaagggcatgaccaggtaacagtatacccccttgctggtcctgaagctggtac

SEQ ID NO: 385762 - DNA, 1721 bp, Cannabis indica
atattatggttatcaaagatgctgtttgtttttggaaaattataaataatttacaaaatataatttaaatattcacttatatgtatttgttgttttttatttttttcttacatatatatacaactgagacttctttaaattgtatctttcacactctaaactattcaaaatttttttgaaaacaagtataagatgttagttataggttataattatatatatctacactatacatctttatataaaggaattgagatataggtgttagaaaaatagaaaaatatctcttctgcaaagtgcataactgagatatgcctgaaacttatatatatataaatatatatatatatatacatatcttataaatgctaaaacaatttacttatagaaactaaactaaagggagatagaatcaactgtgatctgatccacaattcaaaatatcatttaatgagtaaatgacatgattcatatctgtataataaaggttattttggcacaaagataatgataactcaatttaattattatatatatatatatacatatataaataagaaatatataatgatgaccacaaggtgtcataataaccacaattagaaattctaattaagaaagataacattttagatcacttgaatatacttttttacttataataatttattattgtaaatatatgtaaattgctgcaactacattttactcaataaattttgaatcaagaccaatgttgtgactaaaagcttttatattgtagagtagtgttcaatatttctatatttcaaattgccttatttaaatgataaaattcatcatgtcaccaacatatactaacaatataaataatttacctcagacaatattcagaggacaaatccaaacattatggacattattagctactatatataatatataaggtttaattaattcactttaatgagttgtggtgactttttattctgtttgttttggattatagtttaaaccaagctatatatgtgctaaatagttaataataagcaatatataatcgtctaaagaaacccacacactcatttatatatcaatttgttaatgataatatggacaaatacgaaataattttagaggacattttatatatcaattttttttgctgtgtttcctcacattttagaggactacatcacaagccaaaccaaacatgaatattggcttttgaaaaattcaacacacataactccacttttgcctatatattctttctcgattgatgtgctagcttaattaacatgcctgagttattatatctctattgttgaaaaaaaggagagtgagtctttttctttttctcttctacaagtaataggttgatctcaataattaatatattttacttagttttatttaggttgcatgagtttgtgagtacttgcttacattgttttaatttttatgttttactaattaattatagtacatgtgatcaatttgtcatcaataacagaatattattcagctatatatatacactctaaatccgatatgtcaacaaaaaaatcatgacagcaatgaaagcctaaatcatgtaaattaacataattatttcatactctaatttatatctttatatattaaaagtgcctatctaacggcaattcttggtttaacagaatattcttaaaaataaaaagaatattctgttaaatttaacgattaggtttgatctcccg

SEQ ID NO: 385763 - DNA, 1345 bp, Cannabis indica
ttttttctctctttatcaattaatttttattatttttaaaaaatactgtctagatcacaccactaattattttaatttaaaattatatcattgtcactattttcatcatattttaatatgtagaagacatagattttttactaatctcaaaaaaaaaaaaaaaaaacttaaaatacaaaaacaatattatagtttcttttatattttattaaaagataagtaactaaattttaaattaaacaaaagtttatatatgactaatgtttggttagttattccgattagttaatttttaaaattattattttattctaagttatattatattatttcacagtttaagatacatttatattactatcttttaagcaaattttgttaagaatataatgtgttatagtagatataaaaaattacgaaatagtttattaataaaattagtataattatttttaattgtaagataccatattgtttcttaagttctctcttttttttaaaaaaaaaagaaaaatatatatcaaaatgactataaaaataacttatttagaatactatgtgataacatttaaaaatgaaattaaaaaaaaaaatacattttagtaacttatcaaattgattaatatatctaattctatttaaatttaaaatttaatcaaccaaatagaaaaataaactaaaatattacatatgaattcgtcactttctttgatagtcatgtaaaaatacacatttcttgtatatagaaataactaaaatggtgatggtactattttttaattcaaataatttactgtacagttacaattagtttttaaaaaatatagacagagatataataaaacaaaattaagtatacttttaaggaaaaaaaaatgtgtgagaagaaaaagaataaagttactgaggaaaaaaagagaaataataataaaaaaaagaaacaaaagaaatgatataagaaagataactataaataatttgtaaaaatcggtacagggtagtgtatattagcttatgagataagcggtgtacagataattaaaaaaaaggggcagtatttccgtaaataaaataacaataatgatccccggtgtaatttttctcttttttctttttggaatttatttaataaaagccacaaatcttgtaatttcctctgtacgtagttcctaacaagcctaagcccaagcccaaagtccaacttcagcccactttcaacaagtttcgacccaacaaaatatgtagaaggattaatgctaatatctaagggaaacttacaaaaatactggaatttgggttaacttttacaaaaaaactgtcacactgaaattttttcaaaaatact

SEQ ID NO: 385764 - DNA, 1322 bp, Cannabis indica
agactttttatttgggcttacattaaattttattgattttattaaaacttgggttgattagatagttctttgctatgttagcccatattgttggtgatcaatagttaatgagtttagtatctgtgtgtaaagtctaggtgaagcagaagtgtgagttttttctagttaactgaagcctttgatgagcagacccatttcaactagggttatatagctaagtccattccctaactctataaatacatattgtatgggcacgtatatgcagtgcatgattatctatgtgatatattaatgagagttgtgatcttggataaatataaattgttatatcatgagtagaattttttatatatatatgactatacactactactcactaattaaattttgctacgtaaacactgtgtaataggattaaatttccaacatgggttaggacccgggttcggctccaggaccggggttcggggttcaaaatcttagtcggggttcagggctgaggacaagttagggttcagggttcgagttggggtctggttagggtcgaggtggtaatgtgggttcagatttggggccagagttgaggtttggagttggggctagggtccgggtttgacttcgaggccaagttggggttgggccagggtatgggattgagatcggggtgtggggctagggtcaaggccccaatcagggtcgggtttatggtgaaaaaaagtattgttttgcatagcctattaattcaagccaataccaaatataatattgtattaagtaatactatacagtacattacatcccaatacaatacttatacaatacaacgtgatatagtgtactgaacgagctttaaaagaaatcaaaacaatcacgagagcaattatattgccaagttaattaatattacaagaatcttttacctgatatgaccattacaaaccaaaatctacatcagtttcaactttcaataatagggaaaaataagcaacaataaaaaaaaaattgtgtcaacgtcgtaataggattgggaacataagtaaattttataagtcaacatttttaatatgagcatgagttgaggtacatcggaggttattttatcccaaatatttaaatcaatgagttatattattattacttggtctatttattacacactggctcaagctttgggcagcttgggctattgcacaagaccccccatttttaaaggcccatttttttttatagcaaaagtttttttttttgttattataaatacattaaaaaatttatatttaaaaatttagaaacatatctttaaaaaagaaaaaaaataa

SEQ ID NO: 385765 - DNA, 586 bp, Cannabis indica
gaggaacgatattaccgaataaagaattctgattcacaacatttccaacatacaatgtttaagataccattattcttataagttttttaaaatacaacaaattcagacaactttaatatgtatttatagttttcattaaaattaattggtatgctaaattttatttaagtttataatttagttacttgtttattgataaattgtaaaagaaactatcaatatgagtgactttttcagttaaaggtagtagataatttttttaaataaaataaaataataataataaaaatacaaagtcgtgagatggaaaagaaagagacaatcagacaaaggacttatgaaaaaaataagaatagggagacaaataacttaaaaataaaaatggatgaatagaggacacaaaaaaacgattgagattataggaaagaactgaaaataaaaacgattggaacaggattatatgaaaaagacaaaaaaacttaaaggttaaactatcaaacattgatttcggtataagtaaaggagcgagaacggtattttataaggattatttaggtcaaagatatttttataattatttacaaat

SEQ ID NO: 385766 - DNA, 4015 bp, Cannabis indica
gcctagcggggttgatgacttttagaagaaacatttaccacttatgttctaaatgggagttcatatttatattttattttattttggaattgagtaactgatcaacatagaaattttaacaaatttggtatgaaacaagttaaatttggaattgagtgtaccgtgtagcaccataaagcattgtcataaaactgaaggtgactgagactctaaatgtcttgcgcaagatttgttgattgcttccactttgataacgtctcttacttattcccaagtttgagtgtgggtgacaaagcatgtcacagtcaaactctcacacaggaaccaggaaccattgggaggtgttgccttgtgatcatcaaattattaacctgataaattgtacgtaggaaggtagtcgacgccagagccgttgactcttcgatgcttaagttagtagagtgattaagataaagaaattgaaagtcgaatacattacagattctttgttgttacctagcttcctgatgatttgatttgagtctgatagtatactgagcccatggattatgcacttatgattaggaatgaccgctagtttgtcaattataggtttcgaaggattgcctcatctgtgtgattgcggtgtagatggcatagccgtcgactatttgatgcttaagttagtatattattcatagaaaatgtaaaaaaaaaaaggttgagttagaaatgatactattttagttgaatggcattccagttgttgcctatttctccaccatcttctgcttgaagttgatatgccccttgtcctattactttagtaatcttataggagccttcccaattgggacccaacttaccaactcttgcctctttggtgttttgaaatacttgacggagcacccaatcaccctccttgaatgtttgtgcttagataaaaaatgtttaacaacctttggttggtatgctgcgactctgaccaaggcttgctctctcttttcatcaagtgagtcgagctcgtgattcatactttgctagttttgatcatcagtcaaatgatcatacctagaggtgggaattcctatctctgttgggatgacagcttatgttccaaaggtgagcgagaaaggggtttcaccagtggaggtttttgcaataatgcgataagaccacaaaacaccaggaaattcatctgcccaccttcctttggctttctctaacctctttttcaatgtgttgacaactcttgtttgtcaattctgcttgaccgttggcttgcggatgtcttcgggtcgagaatgagagttggattccccattctttgcaaaaaatttggaactctaaacttacaaattgtgagccattatctgtgactacctcctttggcacttcaaaccttcatattatgtttttccaaacaaaattcttaactttgagatctcttacttttgcaaatgcttctacctcaacccacttagtaaaatagtctgtcaacactagcatgaagactcgttgtcctcgagcggtcggcatcttccctactatgtccatcccccacttcatgaaaggccaatgtgctagagttgaatgaagcttttctgatggcatatgtgaaacttgggcaaaccgtggcatttatcgcatttctgcacaaagttgagtgcagcggctctcatggttggccaatagtaactggtagtaagtgccttattgttgagacttcttgaacctcagtggttgccacactaaccttcatgtaattctgtaagaacataatgagcctctattggattaagacactaagtaaggacttggagtatgaccgtttgtacaacatgctgccataaagagtgaaccttgctaccttggttctgatcttttgagattgactcctatcttgcgggagtgtgccatcaactagatactgacttatgggtgtcatccagctaatgttctttgacacatccttgacttcttcttgaggcttccaaactgtcagccattgcatgtagacgattggaactaggacaccactctttgcttgaattgttgaccctgggtttgcaagtgcatttgcatgactatttatccttggtacttgattgattgatattttagtaaagctcaaaagtctttctttaacagcttggaggtacgtcaccatctttgagtccttggcctagtatgtgccattgaattgattgactatgagttgcgaatctgacatgatctcaagagttttgatattcatctctttggcgaggtcaagcctagcaaggagcacttcatactcagtttcattatttgttaccttgaagtcacacttgattgctcgttggatgacatctccttggggtgagttgagaacaatgcctaagccacatcctctgttgttgcttgagccatctactgataacctccacttagagtcagattgctctttcaagcacagcaactctttttctacttgtacatgcatgtctggaaatgtcagcaataaagtcaactaatacctaagatttgatagttgtccttggtttggaatgtgatgtcatattcactaagttctactacccacttggtgagtcttcttaaaagctctggcttgtgtaggatgctgcgaagtggaaattgtgtcaacacaataatagggtggcattgaaaatatggtctgagtttgcgtttgtgataagtgctagtgttagtttctcaagttggttgtatcttgtttctccatctagaagagtctttaagacatagtagatgggttgctgccttccttcctcttctctgattagcacagcactgactatcatttcagagactggtaggtatatgtagagtgcttctccatccttaggttttgctaaaagcagatgtaaggcaagatattctttaagttgtctaagtgcatttcacattcctctgtccacttaaagtcctttgtttttctcagcactgagaagaacaagtggcaatgttcagaagattttgaaataaaatgactaagttctgctatcctcccagtaaggcattgaacgtccttgattgattttggtcattgaatttttgataaggagcatatttgatctgggtttgctttgactcctcactttgtcacgaagtaccctaaaaatttacctgaggaaacactaaaagaacacttggcagggttgagtttcatattatatttttcaagtacctgaaatgactgttcaagatgattaaggtggtctactgttgctagcgatttgacgagcatgtcatcaatatatacttccattgacttccctagcatgtccgaacatctgatttaccaatctctgatatgttgcattggcgttcattagtccaaacaacatgaccttataatagaaggtccctcattctatgatgaatgatgtcttctcttaatcatctcggtgcataaagatctggttgtacccaaaaaaatcatcaatgaagctaaggagttcatgcccagacgtagcatcaacaagcatgttgatgtgagggagcaagaatgaacccttggggcatgccttattgaggtctgtgaagtcattgtaatcctccactttccattcttttttcggacgacaactacattggccaacaattctggatagttgacctctctaactgatccaatgtcgatgagcttttgaatttcttcattgatcactttgttacgtttgggagcaaacttccttcttttctgcttgactggagggaaattcgggtctacctgcaacttatgcataacaatattaggttctatacctgtaatatctttgtgtgaccaagtaaagctgtcatgaagcctaatgagaaattcgatcaactttgcttgaagttccggtgtgagcttggcttcgatttatactttgtgctttgggaattccttgctaatgttcacttcatcaatttcctccattttaggctcatctggatcaatcattgcatttgactactgtagttacaataagtttgattatttttcttttagggtgctctgataacactctcg

SEQ ID NO: 385767 - DNA, 651 bp, Cannabis indica
ttagtttaatttttttttgtaatcgcgtaagttgtaattatttagagtcacttgtaattttttttaaaattctgaatattttacagtaccaaaaataaagtttaaacagttatttatcacgtatataagaaaaaaacagtagcgtgtgacaacaaaatatctaaacattattttaggtatattcagaattttttaaaaatttacaagtgatcataaataactataacgtatacggttatgaaaaaaattagactaaaaatctttcttaaatgtcgaaaacatatagaaggtctaccgaaaggagttgtattatagacttaccctatattaataatatgttaattttaattattactttagaaatgaattaatattgatattaaattgaaaaataaaaatatctagaatgtaattatttattttatattgaatttattttctcccctttcaaaattatcaaaaaaaccaaacaagaaaaataaaattataagtaagcttaattatcaatttattttttcatacaatttttcttttttaccaaacatgttttttttggcacacttttttcattccccgcagaatttgaacttctaaacataaccttaagttaaagtactaacttgaaaaaagtatgtaagtttaatggtcact

SEQ ID NO: 385768 - DNA, 593 bp, Cannabis indica
gagagagagaaagaaagagagatggagcacacagattgctagcgtggcgtaataaaggtttaagcgttggttctaaattgacgctaaagatcatatatttggcgtcagtttaaatttttatgttggtatgtggaatgacgccattgagtacttatatgtgtcggttcactattgacgcctaagaattagggtggttaatagcatcaattatttaagttgactgatccaaaagtgtcttgtgttgaaaatagggtgtttggttgagaaggattttgttagggtaatttgtgtagtattcatattctgttttgggtcaatacaacttttacacaatacgattatgattaacatgaagattaaataatatatcataaaatataaatacaatcacaacatagctataaacaaataaatctgtgacacgacactatttacacgaaatttaaacaagtcacattcatgtcatgttaatattttattcacattataacatgaataaaaaaaagggaaattactttatatactattttttttaacttttgtttcaaatttacggtttgagtttttaaagaggttgcagcgctagttgcaat

SEQ ID NO: 385769 - DNA, 1161 bp, Cannabis indica
attaaaacaaaaaaaaaattaatctgtacgttataattgattaaggtattttgtaaatttttaaaaaaatttaaataatttataattttaaaaataatactcaaataatttattttatacgtatataaaataaaaaaattatgcatgtaataaacaacgtaaaccttatttttagtgtgttaatttttttaaaaattttacaacatgtcttatataattataatgtaaacgatcatgaaataaaatagattaaaaaaatttctcacatacggtaacatatagagatatgttagtgcaccacatttaaaaggttagcattttaaaattttctttttgagctcttccaaactagtattaagttctttttagtttagctttcatttttgggagatttatatatatagttgttagtttacttgttgaggaagaaaaaaaaaacaaacagttattacatatttatatattaattaattaacttagtagatttaacatattttcagtaatattataacaacttttgttagcttcttctagctagttattgccgcgacgtcgtatatgctcatgaattatagtgtcctccgtccaaatcaatttgatactcaattaattagattaattaacatggtttaattaattagtctctaaattgttacaatataattagtttcaattgttaaaaatttcataaaataaaacaaaatttagtcatatgatatatagagaaaatgaataatgtgttcgaaaaaaaaagagttagaaatctctctttggttgcataaaataaaacaaaattttgtcatataagtgttagtttttttatttatgggttaggatttttgtttttacatatatatataaataggtacgcttgaatcagtattattagaaaaatttgattttctatactaaattttgctatttaattaataggaatctctcatctttaaaattatattagctgaggtttattctattaattgaaatagataaaaaaaaaataatttaagttcgatatttttttatataaatatgtcttttatatagtgtagaaaaagatttttttttattaagtagctacattaagtatataaacttaaattgcctttcttatttttttaaataaatcatgaaatttattaataacaatcagctaaaata

SEQ ID NO: 385770 - DNA, 1009 bp, Cannabis indica
tttttttttttttttgattgaaacatctgaagccatgattgaacttgggaatctcttcccttttttttctcctgtttttccccaagtccccaaaataattgagaaaaacaagagagaaaaagatgattttacattaactctctttcatcaagaaaataagcactattcaaacttttctccatttacatcaactggttttccccaaagaagaaaaagagaaacaatcaagagcctcatctaagtccctaccaagaattataagagttttgatgagcaaagttaagaacctgattgtacataagatgaggagcttgggagcaacggggtagccatgtaatgcttttgaagctctgctaaagaatgatgagaatgtcattttcagaccaacttatcaaatcggagagattcttcttaactgaaaaaaggactgaactagcaactgtagcgtaaagaaaataaaaatcagatatagtcttgaaatcaggccttgactaatagtagttgactttgtattaattaattaattaattaagaattaagagattattaatgaagtagtatttaattactaaccaaaaagtacatgtgtcattaccttattgagttaagttccaagttccatgattagaatttagaggttttattgttgactggttggtttttaaaacttgggataaagtttccattaagcatcttccaacaagttctttcaacataatttttagttaaaataagtgaacttctaaaaattaagctctaactatataaaaaaggcttcctataataaataatagataggaaactttttactcctttattaaaaaatttaatagtattttaatctaaaaaattattattttattaaattagtttatatttaataaattcaagatataaaaaattattcaaataataattaatgtaaaaaacattactaaaataacaataataaaagggaaacttgattttatatacttaaaaattaaaaaattttattattaaaccaaaa

SEQ ID NO: 385771 - DNA, 2232 bp, Cannabis indica
gaatcaaaattttgaaataaaaataagttactttcaaattattgatgctaagaagtggtcaataccgtctcgctagattagcgagataaataatgagtttaagtatataatttagagaggcacacaaaatttatagtagttcactcaccacgttgtgatggtaatggatctacgtctacttcaagtttttatttcttatgagatggtaattacagaaaaaggctaagtttttaagctctggtttctagagagagacaccagaatgtgatgctctgaccttgtgcgtagttttttgaatgtgcaaaatgaactaaggaagctctccttttataggtgaaggagccaaaaaaaaggaaaaatattcaaaatattaaaatcctaaattggctaattttgaccgtagatgatgatccaatagccaaaattaacttttgaagttaatagtcattcttttagagcttggcgggagtcgggacccactgtaggtaacctggagcttatttttgtaactccgtttgatattgaagtgtgatacatgactttatagaacattaaaataactttgaaagataagttgaattgtgtcaatcaaatcaataatgagtgagttatggctgtattattgaagacagttcacaacccaacgcccaggttgacatccagtgcgcatgttgacattccagcgcccaagttgacatatgacatcaacctagatgttgggtaagtgaaaacgcatctaagtaatgtactttatgatgcttaagtgatattttgacattgtttagtttgttttcgtgttttgatgaagctagtcaccaattcccggagatgttattgctctacaaaaataagaaactctaaactcttcatttccgagtgagtttctcatgttggaaatgagaaatgtaaagttgtgaattttacttctctaacttcatggatcttagtcattgtgaaaaattagacagacgatcgaaacagaattagaactgaataagccaaacacaccggaccttttgtcaacttgggtgctaggtacttcatttctgagctcctagggttgtcattttgatactatcaattttcttatactatagaacgaagtctcctaccatattttggaccattttgaatttaatggtcgaatcaaatttggcatttgaatgatcaaaaccagtgcaccatattaattgtcaacttgggcgctaggccctgtttgtagggtctcgagattgtggctctcttctcgagttttctgaatcttcattatttttgatgacaaaaaaattgcccataatactttttgaagaacttgattggaaacagcctaggttgacaatatgtcaacttgggcgcttggcctagtgctaggtgtcaacctgggcgctgggtcccctttatggccctttgaaagttctgtttggtccccagaaatagttgaatattaatcttttcagaaaatggagaagatgctcagaaaaattctcataaaacacccttgaaatcgcccaagttgaaaaaatgtcaacctgagtgctgggccttgtttctgacacccaagaagtgttgtttcttccctcaaaagtacctatttccccgttttgatgaagaaaaagaagatgcaaaagtcagatcattgatctaatacttggaaggcacccatattgataaattatcaacctgggcaatgggtgaccaggaaccgggtgctttggttcctcaaaaatgaacttgttctaaatttaattataatgcctcaaatatgtttgtggtatgtctagttcatgttccaatgcaaagttagacccatttttactaagacgggcccaaaaataaaaaccctaattacggatgtcaacctaggcgctgggtgaaatcctaggtgcctaggttgacttttggggtgcaggctcatgtaatttcagctcccagggcatggatttggatgctttatatcttcatgatatagaatagtgagttagaaacaacttagtaggatccaaacacccattctggagttcccgaagtcaacctgggcgcaagtctagggactcttcctaggttgacatgttatgattcaggactactcaactccaagttgtgttctttcttaccacgtgttaaacattaatgtccacatcaacatggctacttttggtgaaacacaaatagtgcatcctgtaacacttttatttttaataacacaaaaaagaatgtagaatttttgttttt

SEQ ID NO: 385772 - DNA, 3158 bp, Cannabis indica
agagtctcgagacaacctctgcagcacaaataaataggtaaggggagaggggatcgccctggcgtagcccacacgacggcgtaatctttccaacctggctcccattcaagcaaacgttaagtgttgtggtggaaatacattgcgaaatccaagagcgcagcttcggagggaagccaacacaatccaaaacgtggtcaatgaacctccaactactgtcataagctttaacaagatcaattttgattgcaaaaaaccctccctacctttcttccgtttaaacgagtggatgatctccagaacgattacattattatcttgaatatttcttcctggaacgaaagccgcttgagtagggcatattatagaaggcaatattggtttgattctatttgcaattattttggatatgaccttataaagaatgttgcaaagagaaatgggtctaaattgactaggtctcttcagattctggaccttagggataagaactacattcgcagtatttattcctttatgcatatgaccattcctgaagaaatcagaaactgcctcacaaaaatcatctcccacagtctcccaataatgtttgaaaaagagtactgacattccatccggtcccggagccttatgattgttcatagcaaacaaggtactctctatttcatcccgagaggggcagagaatagtcccctcctggtcctgaagggacatcctccccttaaacaaaccactgcaatccaggctctagtcaatgtctgatccctcaaagatactcttgaaaaagtcggtaaattcacggccaatagcatctctatccgtgatccaaacattgttcttgttcaaaatactctcaatggcatttctccttcctcgaattgttgccgtaaggaaaaagaattttgagcatctatcgccttccttaagccaagaaatcctagctcgctgcttccagtaaagctctttccgggtcaacatttcattcagcgatttccgaatttcacattccttcctccactccctggtttcggctgggagtctctgaatactatccagttgcttttcaaggtctttaataacccaatcaatcctaccatactgcgttctgttccaactcagaagatcctagtagcacccacctttttgaaaattcgggctggagcccaagaatgagctaccgagcgccaagcattggcaactacgaatttgcttctatcatccctcgtccatccttcctcaaacttgaaaaatctcttgaagctagggggaggaccactagtatccaagaagagaggtctatggtccgagttgctcgtctgggaagagcaaataacaactttagggaacatttggatccacgctccattaactatccctttatcaagagcagatttcacatgactgccctcgacctgtggttatcccaagtcatcttgtctccttttatacacaggttgattaatcctctggaatcaacaagattagagatgaaagggataaaatggtcccttcctgaagaaccttctctttctgagttgctgagaacaaaattggtatctcctataattagccaaggacccccaaacctatctccaagggccattaactccgcccaaaactttttcttagcgttgaggtaaggggggccataaacacaagagagaagccacggattggaagggggatccgaataaacaattccagaaatatgatttcgagaacaagaaatacattcaaaactaaagccaactttccaagccaaaataatacctccagcaataccaatagatggtacattgatgttaaaataaaagtggagggatctaagtatacgtaccagagaagtcgcatccactttaagctcggtcagaaaaacaaagtccggagagcgcgctttgatcagggacttcagttcacgaactgtagaggtttgccctaaccccttacagttccaggcgagtcttctcatggcgcctgtggaggagatttgacattctcctccacagggttttgcgagtacaccgataagctggagccagagtcttcaatgacaaaggaaccaatcagcgggttcttcataattccttcattacagctcatagagtcagacgcttcttctgatggatcttcataaatcaccttagattcccggtccttctctttagtgtcccatggaaaatctcgaaccacatcaggatgagttctaatagtcttgtgaggtctagtacataaagaagccgagccttcaaatttccttttcttggagttgttctttcatttgtttccgaagtggtcaacacaccaatgtcacctcccaaactctttatctcatataaatctagctttccaaagtgtttcaagtcataaagtaactcctcttgatttaaagaatttagacaaagcttgaccttcatcacaagagggtacggccaagcttccaatacaagagtcttgctgtgcaacaacattaatcccaccactctcatggccaacactcaagtgaggcggcccaccatcaaccccaacttccgtaataggcctaggaatagcgcagccccttcctcaaagaccccttcaaaaaaagcttttggattatttgaatcaattaaagatccaccaggccccacttccttggagttcaaacaaccaggcccaccatttactttcccatccggcccacaccccatatcacttcccttcttctctttttgcacacaaatgtgcttcggcccaggcagcccagacggcccatcaagaagcataacctgaatagcttcaacctcacggcccactaactgaggcccaccaacagctcttttttcaaattgcatagagactttttttcccattcttttaaaaggcccatgtccctaaacaaaagacaaattctcctttatagcaaaaggtggcacacttttcaaggagacatcctccttattaggaattgaaatacccaacgggttactcacattatctcccatagtcaaaggctcaatcctaggaaaagtttcaggaggcctttttccaaaattcaaattcctattcatcttttttccaaaaccagaaatacctcgtacaaactctctctccgctgtcactttcttgggggtccatttttttctctggatcactggaccattcccagggagaccccgactagt

SEQ ID NO: 385773 - DNA, 838 bp, Cannabis indica
agaaagtctttgatagagaataacaacaaaataatatctagttattaagtaactacaaataacaaacaactagctaaatacctaaactctaactcctaaaacccctcaagatgaagtgtataaatttggtacatttatcttggagaacacagagaaatagagatttggtgagaaaattttaatgctggttgaacttgttcttggaaccttcttgttcttggcagttggtcaatgaatctttgttcttgacaataatattgatggatcttcttgttttgttgatggcaacaatggatctgtgttcttggcagtaaagatggaagcttttcttcgaaagttttttttttagcttggcttaggaacaatcgattaaattcccaagaggatcttcaaattcaatgctcaagttataagagctcttaaaaccatcttcaataggtcaatcagtaataatggaatgaatttcaggttggttgttgtgacaaacttttaggtcaacttgttttccttgccttagatcctacccaattcataaattctaattttatttaagttttagttacactcataaataaagtatataatgttgcgtttggttgggaggaatggaaatattggaataagaataggaatggaaatgggaatgattttgtaaatatcaaagtagttcaaagaataaaatcttaattaacctaaattaaatgtgtaaaactcgatatgaaattgtaaatttgagtactattatttaggagtgtacataaacttttataaatcgcacatacccaataatccatccaaaccaaattgagataactcgacaaaaaatacaaactaaaaa

SEQ ID NO: 385774 - DNA, 3129 bp, Cannabis indica
ttataacttaagttgttctgaaaattaataaaatatattgttcttccttagtttaaatttcaaagaaatattataaaaattaggtctaaaattaattaaattaattaatttccaacacaaatttaattttctcaaaatatatataattagtttccaaattctaatatattttaaattatacatattaaaaattcaaagtaaaataaaataaaataaattttgaaaactacaataatttatgttaatataaaattaataaaaaattaactttcaacacaaatataattttctcatttaattaaatatcacaaattatccattatttaagtatcttgattcttagaagaaaaaatcaacttcaatattaatttgatttataattgtatacatagaaaaaaatacaaactattttacctaaaaattagttatctagaattatttcttaaactaaatgttgattttttaaattaattcaaaagtaaaccaatcaaaaaaactaatttcaaatatttttagaattatatatgttgctaataaattttaataagttaaactaatgtaattagcataatacaattgtttaaacaaggcaaatgagtcttcataattgaggttgtccatgtgaggaaaggttatgttcagtatatcatactcaataataacagactcataactctcgcacaaggcccaaagaagagaaatttaacttttatttaaataattattattcattggatatacccattactaatcgggcttaaataaaatctatgtgattattttagtggtcaacctggttcatttagttatcaaaaaactttgggtccactatatgcatctaagcccattaaacaaacatattgtccatataacaagttaatttgaatgagacctatcatgtttctaagtttatgcacatatgaaagaaatgtgaaaaaatataccttggttacaaattattttattaatttattaataattaattaatttattaataattaactatgattaaatttagatcatgagatccatttacaagttaatcataatcatttaaaatcaattaaataataggttttatcaaattattgatataaattggtaaaaaatctattaacaggttaaatatagttaatttggattattggatctattaacaagttaaccatagttaatttatattttatcaataaattaattcaataaaaaaaaaagaaaaaaataaacacacatgtaacaaaaaggattgagatatttaataattataggattaaaatatcattaaatttaaccaactaattttgaaaagctaaaggttgttaaaataatccaaaatatccttttcaaaattttaatttcaactaaaattaaaatatctaagttattttaaaattattttaaataaattaaataactaacaatataaataacataatatttataactagctacgatatgttggacacagttaagaaaatttcattttgtaaataaaataataaattaatgataaattttaaaatcatgtctaattatgctaaaatatttccattttaaccatttcaaaatttctacaaaaatatttatgttatttaaatgtataattataaatttttgataggtaaaatgatataatattatatttttaatatcaattttctaacttatgattttttcaataataaattatataataaaaatttaatttttgaattaaaaatattttcttaagatattcataaattttctaaattggtttcaaattttattattatttaattatcatataagataattagaaatataatattttaaattaaaagataatgttatcttttaattaacatatatatttaatattaaaaatatttaattttataaattaaaataatgttaaaattaacaaatcgaataaattttaaatttatacaataatattatatatacaagaatttttttttttaatttaaacttcaaaatatcaaaaattaataataaaatattaaccgaatgagatattattaatttccaaaatgatatttatgttaaaatatataaaaaaaatggtattttatattaaattttaggatttttaggatttttaggattttaaatttcaaaaaattaaaatttagatgaaggaatcacaaaaatccaattttgggtgacaaagtcaccttgtccgagcatggaggctcctagaactgagaatctcggtccttgctcgagcaacactgtaacgccctattctatagggaggccacgtgtgtgattttacaaactagtttaatactaatatattaattaattattaaaaaccacgagaattaaggttaaatatcggtcggtttggttggttttcttttccgtataaaaattcagaattcagttttcggtctggattggtgcaatacgaaaatcgaccgactaatctagaacatatcttaaaattgactgttttgaatctcagtttggtcgttttaaaccacccaaatcgaacttctttttcttctttaatatatgatctaatttattctataaacatattattctacattttacaactacaaacatacaaattaattattcaaaaactaattatcttattcttgtaactttaatattaataaaataataatatattattagtaactacaatacataatgcaacaaaaaaaacttaataaattaatatatatgtttgctataggcccttcgagtacccatccaggtatcaattggataagcttatgcattttggaccatcccggttcttggagagatagtatgcctttcatgtctgggaggctaggataaggagaggtagacttctgtctatctcttagtcttgacttgttcccgattctttgaggcttctccgtgataggattacaatgggggattttaattacggaaactatgaggttaatcttcctttttatgccacgtgtcacatgcttagaaatatggataacatttacccccaagcttcagggattcttagagttgcaggagcttgtagtcttcttccacttcttacagatatgtctttgacacgtggtgactactgttgaaaatattttaccaggatctagatttactaccatgtatgttttattaacatcctaa

SEQ ID NO: 385775 - DNA, 1289 bp, Cannabis indica
aaaaattattttagatgattatcttttattggtggttgagaatagtggtttttttaatgacaatttataaactatttttttaatatttcaaatggtgtttaagagacattttataaatgacggaagttgcatagtcagattatgagctttaggtataggtatgtaccatgcccatacgatgctccagcacttatagacacactatgtactacagcaatagtagataattgcatacttctaatgatattatgatttctcttttgaaacaaaagtttgattctagttttcttttaaatagaaagctacttgagttgacattatcccatcgaatataagtttcagctatggattgtttgttatcggtgatagtattgattagattcgagtgatagataatgaatgtaagataaaatattgaaaacgtttattacaagcacgacaccctaactaacaagtcattagtaatgtaaatacaggatacaatttgaggcttacttgaaacgatgtagacagcataggtatgttatatgtataataatagttgacttgactctatactacattaaattacaatcatgcatatatatgttctatataattaaatacatgtaatatcattttcgtagaggatcacaactaatgcgacaataaaagcgtaatctacgcctagataaattttgagtgcaagctttttagtacctttggcaatgtcctcccacgagaagacgaatttaaactgtattaatttttcaatcatgaaatcatattttattatttatatatagctaataaaaaatgagaaattgaaatatattatataaatacctcagcaatgagagtttcgcctttgtaaactttataagaccaagatggtgagttggattcaacaatctgaaagtttggaacatcttcattgagattattgggtaggaaaactttgtgtcgaaatttcgttagctggaaagaactcgatcttcgaacgctgaatatcatgttattttgttccgagctttctcctcgataaatcgtccaccgatgacgtgatgacaatgccttttacatcatttgtaatatatatttttagtgaataaattttatgattaaagttattgagtataggtattatttaattttaaactaaactttgagcacaataaatgcaaatgagacttgattttatgtatatgtatgtcatggtaaatacgctctctccaccatatttaggtggcgtttggtaacattttttttaatcaattttttatttttaaaagtagaaaagtaaatttttt

SEQ ID NO: 385776 - DNA, 1219 bp, Cannabis indica
attttattaatttgtcaaatcaaccaaaagacaagactgtacctcaataagaacatcacccatattgaatactcgatctgaaaaagagcaagagatgctttagcaagactatgagcaattatgttagcaaatcgtttaataaaaaacaaagaaactttatttatagatgcaagaagtttatgacaatcttctataataaccccaaaagaagaaggtataagtaatgaatttcgaataacttggactactatcaagcaatctaactccagctctactttatgccatggttgagttttaatccagcttagcgcttcctttatactacttgcttcagccaaattcggaacgcctataccaacaaaactgctcgacttagccattactaattcctcttgagagtctcgagcaactatgccataaccaaacacagctcgatcacaaaaaatagcagcatcaacagttaccttaattgtattctctttcagcttaacccgaaatttagctacatcaccatcttcaaaaactaaaaatgaagcctttgtacatctattttggattgatttctattgcagaagataactcatagatgagataagaacaccatctaccacaacatacttttaattccaaactaactcgtttcgagcattctataacccctaacacaacataacaaccttcccacacttgtccttactgtacctttgcaaaatttgatcaaaccagctgcaaaactcaacaacaataattggtctaaccccagccaaaaacctctaacaacattgagcaacgaatgaacaagaaataagcacatgaaaaataatttcctcacctctttgacaaactggacatataatttgaactagaattctcttaccacttaattgagttaagatggacaaacaatttgaagcaacccgccatatcaagtcgagagctttcagtggtacttttaaagtccaaagcttataccaaaactcgaaaaaatcagctgcaattcaatttatttctcaacttgtgtcaacttgcatgtaataggtacttacaatcgaaaattaaacttatatatgccataacaaaatatataaagtcacgtgaggtgcacgtttttccatcacttcttcaacgatgagtatataaagtcaaggatgaaacgaatgtggttatatttaaagaaaataaaataaataaaatcaaaataataagagagagagagaga

SEQ ID NO: 385777 - DNA, 1430 bp, Cannabis indica
tttaactttttttttttttaaaagatttgtcagaactaaaaagaaaatttattgatatcacactgcctactaagagtctcgaaaaatacatgctcaatttcatgtggcaattctgccaagattttagaatcgtcgaaaatttaatatagtttcacaatgaaaggacttccaatagtagtttaaaaaaaatagaatatatattaaaaaaaaaagtaaataccattttgaactctgtgtttagcaaaagttatagattgaatcttctgttttattaaatgataaaatagattagattttgtattttttaaaatagtaaaaataggaccgtaaatttaatttttgacaatttttttaatataacttacttgaagataatttctaacacgaatagatacaaaaaatgtaaacagttttatcataacacattaagatcagatttttattaaattttattttgacaaaaaattaatttagggtcctagtaccattttagaaaatatagagtttattttgtcatttaacaaaacagaagattcaattggtaatttttgcaaaatatagggtctaaaataatatttactatatatatatatttatatttgtatttaatactaataaattcgatttatatttgtatctaaaatagtattcaattggcacatcaccaaactgttttaaaaagaattgtatacaattaaaaaaaataaaatagtttataggcataaaataaaaataaattgttcaaaattattcttagaaaaattagaaagcttttttggaaaggaataaaagaaaaataaatttgctccataaaaaaaaaacatttaaaaaattcacaagttattataaaatattattaatggatgtctaaataactaaattaattattactataaatgcttgattatttttttttatttcattgattaattttcctattattctagtcgtatttttgtataaataggagtacatctcattagaataaactacaaaaaaatctcattcactctctcattttcttcttctctttatcttttctattctcctatttctttttttattctatactattttataacatgttactagcacgagtctttgcccaaaagtatataaattatattcatatatctcaaaaattatgcatcctcaataaaatcttgcatatatcttaaagattatgtaaacatgatattcatcattatataattgattaaaatatattaaaagagatgaatacatattcatataaatatatatatattctctataaaatctttgcatacatcccgaaaattatgcaaacataatattaattgaaacatactaaatgatgaatatattattatatatatttgataattgttatacccgaattttgaaaaataaaaaaaaccaatcttgcgactttgaccaagacttataaa

SEQ ID NO: 385778 - DNA, 2043 bp, Cannabis indica
accaagttttttgcacatggtgagaaaaaacaaccctggatcaattgtggatttgataacagcagaagacaacaacttgctatttgtttttatggctttggatgctttgataaaagggtgaaaaacatgcaggccgataatagtcgacggtacattcttaaaaacagtttacagaggaacattgttgttaacaagcagacaagatgcagcaggacacatatttccacttgcattttgtgttgctgattcagaaaatgacaaatcttagaaatgtttttcaaaaaattaaaaagaagcataaggggtcaaagaacatcagtgtctaatttcagacagagacgagagcctgatcaaagcagcaagagaaatatacgcagaaattgcacacacatactgtggatcaaacctttaaaacacatgctgccaagtagaaactgccattctttggagcagtgaaagcatacacagagaaacagtttgaataccacatggtagaactagacgggttggacaaacgcataagaccgtacttgaaaaaagtcagttacagaaatggttaaggattcacagcagaaacaaaagatataacaccatgacctctaacatagtggaatcactaaactcgactaatttagtagcaagggaacttccaattacaacactactggaatgcttgagagcattagtgcaacaatagacacatactaataggacaaaagcacaaaacacattcactacattggcaccacctgaagttaagatactactggatagctacacatactcgttgaacctggaggtcaaatatataatatgcattttaaattttaaaaaataaaatcattctagagcattcatgttttttcgagaattattttagggttgttatactattattttgaatgtataataaatgatgttttcaaataagacaggtaaaatcaaccactgattacttgtttgaggtaacaagagtgaaagaatcatggacaatataccttaaggagagaacatgcatgtgcaacaagttctaaatagatgaaataccctgtggacatgttgtggccgtgctaaaagagatgaacatggacccatacaactactgtccaaaatactacacaaaggaaaaatagctagaaacttatgcgggaatagtgtacccaattggacaccaaagagagtgggatgtaccacaaaacatgaaagacataatagtcttgcctccggttgaaagactgaaatcaggttgacctaaaaagaggaggtgggaaactggctgggagaagaagcaacatatcaagtgcagcaaatgtggagtcctgaggcacaacaagagaacatgcagtagaatgcatcaaaattagcattgtcaccggaaaaatcaccaagaaagtggtttcttcatcaagaaatcgatttcttgatgatttttctagcgacaatgccaattccgataaatttttaggcgtcaatagcaactttaacgactttttcgacaccgagagctactctagtgatttttccggcaccgacagcaaactccgtcgacttttctggcatcagtgacaaataaaactacctaaacaaataaaaacgttaaatatgggatttgaaaacctaatttacatgtatatggcatatcaaataccataaaaagacctaaaaataataataaaaaaaaataccatataaataggtcaaacttaaaaaagccatatttaacataagaacttttaaaattatacagtaagtgtaatttccttaattgaatattagttaattgcttttataggttatttaggatttttgtcactgaactatgacctgtgtattattgtgcctcttaaatttttcagtttattaaaaataatctctaaaccattcataatgttgtaaattagtcattctttcagtttttgtcactcgtgacaaatagaatgataatttcactgtttagactattatcacacagcggcacgtgtgtaatttaaacaaaaaataaaaatatttaatattttaaaaaattattaaactaaaaaattt

SEQ ID NO: 385779 - DNA, 3883 bp, Cannabis indica
ccccctctcgcacacaacacacagaacgcacacactcacacacacaccatggctcacgtgcaagctcccactcgcacacacacacacacacacaacgcacacactcatgcatgttacacacattatgcacgacttgcatgcaagcccccgactctcacactcgtgcgcggatgcaatttacaaggttggcttgggatccacttagatgtatctcgaggctcgcaaatactgttggtgactttgagaaatgcacctcaagcgagtaggtgaattgaatgcaccctagttaatccttgggttatgtggcaactaatcatgagggttagcaacattaatttttggggataacaatagaataatgaatgagcatcataaatttctcttaaatgaagcacaattggagatatgttttcttcaaatcattgctttaactccgttgcgctactcattcattgggatctctccacgaaaattttctccttgccttgattgagatcccttcccgcttgcgctctctcttcttacttgaggattgataacgttcacattttctttagcgccttattctccaaggacgggtggacggagatctcgccccaaagtgatcaattggttgttgtcaaggaaaatctccacatcttgaaggcagcaagagcatctaagcattttgtgttgtttctggtacctcgcaacctcaccccagaaaggagaagcgagccaactctgtgagcccaaaatcccaaacttgccactatggagatgaaataaatgacctctgctagaaaaaccaaaggttagaatctacagtggtcggcatgcaaaaggtactgagcgccattctcaaaggcaaaactcaagcttcacactttttgtacaaaagtcactagcaagaccgcaggatcctaaaggatgggagcgaaaagggcctatcacgagacaagaacccaagaggacgttcaaagcaacgtgaatctacccgctggggtaagaccgaaaatgagggaaacatcatgtagtcttatgaagggactttaaccaaagaatctcgtgctaggagacactgcacctgcgcccccttttcaagagcaaagcaagcgaaaggcatcgcccctcaaccgtggtggaaagccacacaatgatgggatgagagcagtactactcacatgctccatgtgaaccacagggaaaactaagtttctctcaccaactctcgagaaaggatggacaagagaatgaaagagctagaagcaaagatgcaagatctacatcaaagatggtatgcatcaagggaattggaggatgatggttcgatgaagaatccctttctcaaggaaaattcaaactgaaccacttccatctaatttcaaggagcctcgcatgacaccatacaatggttaaactgatccatagtaccatctaggagcttttaatgagctaatgaatgtgcaaaaggtgtcatgcaaggcaaggtgccaatattttgtggtcacacttaaaggagctgcatataagtggtttaaaagccttagactaggaacaattacatcttgaagcaatttttggaggaattccatcaacaacatcaagcaacgagtgattacattgtgcctataacaagtatcaccaatgtaatgcaaggggagaaagaaagcttaaggagatacatccaacgctttaatgccgaagttgccaaagtagggaggatgtccaacgatgaactcaagttcgccatagctattggaatatgccttgggagtggattatgggggaatatgttaaaaagggagttggatggaaatgaggacttctatgagaaagcagaaatatacatccgtatcgaggaaggaaacagagtcttggggacggacacaagtgagtgtactttgggaagcttgtcagacccttacaaggtctattagataatacaccaatactcgtaagtcgatggattcaagtgaaatctccgttatacaacccgtaaaaattgaatatctaagatattcttctaagtaaagttccactatgcgaggagttcctagcaatagaaagttcacttttagtatcctacactggattaaagaagacaatcacgtgggccaccaagtcaaagataatgacgctacacacttggtgggcaaaaaaaagagcggggaatttttcgaatcggcaaggattagctacccttagtcgataagagatatgcacctacttctcccaacagaaagtaatttagccaaaagatgtcttgaaagacactcatggcctaactctgaaataagagggatgcctctcgggataagcaaacacttgcaaatcaagagggtagcacagtcaagtacaataagctccctcacatcacagtaaaaggatgagtaaataataagaggatgagactgctcaaatagtaatactccctcaaatgaaaacttgcttaccacaatggggaaagtcacttggcgaaagagtaatccttagagtcgatcgaccaacatcagttacaaaagtcatttggccaaagagtaaccctcagagtcgctcgaccaacatcatttacaaaagtcatttggccaaagagtaaccctcagagtcactcggctaacatcagttacacaagtcatttggccaaagagtagccctcaaaatcactcgaccaatatcagttatgaaagtcacttagtcgaagagtaaccctcagagtcacttgaccaacatcaactaaaaatgtcactcggcctcgcattgaccagagtcactcgatcaaatagagaacaaatgtcacacaaccttgtggtgactagagtcactcaaccaaagagtaataaaatgtgactcggccccaagagtgactcaaaatcactcgacctcatgatgatcaaggtcattcgactacatggtgacttagatcactcgacaaccaaaaagagaaaagagaaaaaagtttagacgagattcgaacatgagacctcttagacaatgtgagaagaatttaccactactctaagatggagattgtgaagtgaaattaaatcaagagaggcccctatgtatagtgggcatatcctcaaaaaatacagagaaagtaaggctcccactccaaccaagcaattccccaattcactcagtcgacaagaacacttaaaagaattcttgtagattgggggaagtgttaaccccaaaaattagcacggctaaccctcgggattagtcgcctcataacctaaggatcaatgaaggcgcatttgattcaactactcgtttgacgtccatttctcaaagtcaccaacagtacttgtgggcctcgggatacatccgagcaaatctaatgccaacccagtaaattgcgtccacatgcaagtgtgagagttaagggctcgcatacgagtcccctcaacatgcgtgaatgtgtgcggtgtgttcatgtgtgtgaatgggggcgtcatatgcgaacccatgtggggggcgtcgcatgcgagctgcgtgtgtgtgcattgtgtgtgttgtgtgcgagagggggcgtcacacgtgagccttggtgtgtgtgtgtgtgtgtgtgtgtgattgtgtatgttgtgtgtgttgtgtgcaagaggggggcttgcatgcaagtcgtggtgtgtgtgtgtgtgtgtgtgcgtgtgagtgtatgcgttgtgtatgttgtgtgtgagaggggggctcatgtgagtcgtggtgcgtgtgtgagtgtgtgcatgggtgtgttgcatgcgagccgtggtaaaatgtactgtgttgaggatgtaaggtgaaatttaaatatgcatattggcaagaatgttgttggaggaggaatcaaaggacaatgcatacaagaaaaagcatacaacctgtcagatcctattacaaagagaatactacatactac

SEQ ID NO: 385780 - DNA, 1799 bp, Cannabis indica
atttaaaacctccaagatagccctactgaaattagggccaatgataggccaacttttttgatagaatagaggattaaggccatctagccccagagctttatccccagcaagctgaaaaagagcagccttaacatcaaagtagtcaaagggcttgttaagaaaactataatgttggtcagaaatgcgatgagcgatgccactgagacaaatgttaatggaatccccatgggtaccttgggattgaaaaagattggtataaaactcaacaaaggcagagcagataccttcaaaatccgaaacaataatattattctcacatgtaatggatttgatggtattattctttcttctggaattggcacgagagtgaaaaaacctagtattcttatcaccagctttaagccagctgactctggatcgttgcttccacaaaatttcctccttcagcaaaagggaatttagcgaggattagaggcgattagcactactgatatcatgggaggaaatggaaaccttattgtaaatactgtcaatatccgactgaagcttcttgatgttggaagagatattattcttagacttactccaatcaaacatattgttaacacatatatgttgattagtgagaaaatccaaaagagagttggtggaactactaggatcgtgggagttatgccaaatactcttgatgagagggaaaaaatctatttccatgagccaacagttttaaaaaaagaatctattgtgacgtttgccaagatgagggtgagagttgtagtcaagatttatagctctatggtcagaaccataaaaggggagatggatgagattggcatggggaaacatgttatcccaaaatttgttgacaatgccccaatcgagtcactccaaggtatcccgtgtttccaagtgaaacggctacccacaacaggaaggagatgaagatcttcgtatttacttataaagttctggaagttgacaatggcatgtgaagggggagtattagaattattagtatcattatagcccaaagaatcgttaaaatcgccaaggagcaagaggagcaacatcatgtaatcggttcaagagaacctaagtagaatctttgctatgaacataaggggagccatagatcacgataaatgataactattattattaacaagggagatattataatcgatatgatttaaagaggatgacataatattgacattgaccacatcgttccaaaaaagaaaccaaacccccctaaaccttctctagggacctttaaagcattatcaaaagacaatttagccttaaaaaaaatactatactactattagcaagctgcttagtctccatcacaaaaggatttgaggacgatgttgagtcaccagacgggagaggttttggaatgctcgggaactccctaatccacgagcattccaactgatgacactcatttttccaagaggggttgcagagcaacacccgcctcttcatcaacatcagagagagtaggaacaatagcaaagtcacagtttgaagaccgagttcttttcaacatgctcctgacagatgagcccacttgacagctttgtctcgtgtaagatcgcttagtgccagaaatggtgacagtttcaacatgagccttgggacaaatgggaggagctgggatttcccttagagcctcaggatacatggcagctttgcccttggaggaggaagtaatcacagtgaaggtcataataggtgcggagtcaatggagtaagtgagtgtaacaccctaactaacataggcgtattacgtgatt

SEQ ID NO: 385781 - DNA, 1648 bp, Cannabis indica
gagaaccaagcaaacgagcgatgggaatattgcaagtcctctcgtcggggacacaatcggaatgaatgaaaagggaaaagcggtggtgagcttcagcgaatttgtgggattcacgaccatacccctcttcgctcttctttatagataaactcaccgacaagaagaaccgacaagaatccacggataatgttttggggcaaaatgaaaataggaatgggatttcagaggtggaagaggcggttgtggtttatgagcatggtgagaatggcagaagaagaagaagaagaagaagaagaagaagaagaagaagaagaagaagggttctttcagattcgagaagaaagagaaagtgaaaaagaaaaaaaaaaagaaaaaaaggaaaaaaagattttttttaatttatataaattggttttttttaatttttttttaaatatttataattatttttaaaattaaaattacgtggaccactaaaaatttgccacatgtacaagtgcgtacacgtggacagtccaccttggcacttaactgtaatttttggacggaggtgtgcagagcaaaacggaaccaaggtttagatagttaaaccgccaaaaattcaatttttgtggttaagtgttacaaaccgtaaagttcaggtggtttagccgccaatatctctattattattaatcttactgttattattaataataatattattaatatattatattatgttattattgtattaataatatttatataaacgtaacagttagtttatatataataagtttataaacaaaacttatgaacgaaacgaaaccctcgtcttctgtcaaaatcttctctcctcctatatctattcttttttattttcaacccaaaacctagcgatctaagttctagtagtagcaggatgaataattctcagagcaggaaagcttaaggtaaggtttagttcagttttaagtttaaaacaattggtttcatataggagttttgcaaattagaatagttatgaaaattttgactttatagaattattctcggatagtcatgggactagttctgatattttctttgtgaaattgaggtgattttggaatatatattgagtttagaactttttataacttcagtccgaacactagtggcgtttgccaatcaaagactcgattttagtttctattgcgtaagtatggtagtgtgtatggtatatatgtgccctatgaagtttggagtggtttggacaagttctgatagtatttcggtgagtgcgtaaacttggaaaatcatatttttacccctgaaaaaccggtcaaccagttttgaaactcgtcaaccggttctggccaaccgatttaccgttttgggcagttggggaactcagaaattgtgtttttatcataaattttcactcgggtgtccgttttggacgttctatataccgtttcgaagcttgcaacaagttctaccatatggtatatgttttatagccaaaatataagttttattttagtttatttgaactgtaggatttagtaggaaaccctaggttctccttttcaattgttaaccagtgttttaggataaacacttattagtttatgacttagggctcgggatcattgatcttatccaagtaggtcagccaacatac

SEQ ID NO: 385782 - DNA, 1092 bp, Cannabis indica
taatttgggtggagtggacagtgggagacctgttgtaaatactaatagcgtagtggattttaaaggaaaatttgatggtctgaatatagaatatggttcgattgtgatccgatgatggtctgaagtttacgttttttttatgtaaaaaaaatataaaaaaaaaaaaaaaggtaagcattgggccaccatcagactcttatcggaccaccatcaatatagacgggaatagggagtatggatggtgaagttagaagagaagataagagagaagagtataatgtatatgaatataaaatatgcctatttttttaattttagtaaggttgtgttcaaaaatttaatatacaccaaatatatgcatataaattcaaattttcctttctatttcatatatagcattatgggacattcagaatgcttttgccgtagattgtttaatacttcgacacacttaatcgttaagccatatgacttggagttgaaggccgatcagcctaagaaattccacaatattggggctccttggtttaggggtcccagtttggggggtcaacaaaagttggaaggcggcgaaatgaaaatgaaactactatgatttccaattcagttcctttgattgagggataacaaggcaacaatcatgggaaggcagttatggtagataatggccatgattcagggagatataatagtagtgtgtttgaggaagagaataatggtgggaatggagtgaaagtcaatgatttaggtaagcaattaatttcggattgtgtttccattttggaatctaaacgtcaaagggaagagttgattgggttgggtcaatctagtgaagaggcaggttggattgaggaagtggggatgggttgggttggtattactcacgtgggcttggtgcatgaggaggggttgttagtggatgagatggaccatggcaatgtagaggcttcaaaaaatgatttaatggcaggtattggtgtcgaaacccactagacattaatattatgaatcttttattttaaaattgtcgtgggctttggaaccaacgtgcaaaataattaattccgtaggacttaatgtctacaaagaagc

SEQ ID NO: 385783 - DNA, 2290 bp, Cannabis indica
atccaacatacactgctcaatacttttattgccaatggtgtaaggaatagtgaaagtaccaggatccttacactttggaggaagcttcttttgtagaaccgcagaaacattctctcccacattaactttttcattacccttcaacttgcgcttattagtgcatagttcttttaaaaacttggcttagtgtggcacttgtttaatagcatcacgaagagggatattcacctccacgttgcgaaatgtctcaagaatttccttgtcaacttcttcctttttagtcttctttagtttacttgggaaaggtggtggtatcacaaaggtaagctttggttgtgaaggattggttggctttggtgacactgtttcatcaattgggctatcaacttgcgacttttatggcactatatttggtttcgagattgtaggaggatcatattactttccacttctcaatattaatgcaatcgcattctcctttggattcttctcaggttaagaaggaaacttattgaatagatgagctttcaattaattatacgatggtgagagttggcccacagattctctagacttttcaaagaggctttagttgtctgctggaaccttagagtattagtttccaaggtattaattaagtcttcgatagagggtttggcatttgatggcagtgcagcttgtggtgcttgagtttgtctcgataaaaaattatatggaggccgctattgaaagttgaaactaggtttgcatgtgtagactgtggagcattttggattattcctccaattaggcgtataagattgtgaaaagggttcatagtacatttgacttagttgaccaggaaaatcacccacatcatacacatcctcaatctctccctcaaatagtgtagggcaagtgtcagttgcatgccttataggttgccaaattccacatggctcacttgttggcctaaagcaagctattgtaccacaaattttaattgagctaattgctaactaacttggttctctaagggttcgctcacttcattaacctgtcgtgatgatggggtaaggtctcagcgaatgccaaattgttgtgaattggcagccatatttgaaattaagcttctagctgctacaggagtcttatctactaggggacctccactagctgcatcaatcatactcctatccaacggtagcaagccttcatagaagtattggataaggagttgttcgcttatttggtgatgagggcaactagcacataaccatttgaatcgttcccaatattcatatagtgactctccagtaacctgttcgagaccacatatttctttttttatgcttctaactttagaggctagaaagtaacgctcgaagaacacagtattcatgccattccatgtctcaatagtatcaggtggaagacagtacaaccactatttagctgcatccttcaagaagaaaggaaaagcccacaacttgatttgttcttcaaccactgaaggatatttcataccagagcagacaatatgaattcctttaaatgctcattaggatcttcaccaggaaacccatggaaagagggcaataagtgaatgaggcttgatttcagtttataattaacatctaaaggtggataatggatgcacaatggttgttgatcaagatttggcgaggccaactctttgaacgtcctactttaagccatggtcttatgagaatggattgagtcgtcagaatcagacttgtgatcagctggtaatggctctttaacaagaccaagatattaaaagagaggattatcagtgatattctttgaggagagagaagcagacgatgactcaagatattgttttactcttgatagtctctcttgaatatcgtcttcactagacatgtacaccctagattgccaaagtgaaaattacttagtaagacagaaattaaatatgaataataaaataaaataatagtccccaataatgatgccaaaaatttgatgcctgtcgtatgccgtatcaaatttattaattgttttgattctaatacttctagttatttcagtataagagcaagtaaggactgatcccacaaggactatgcttatcaaattattctgaaattagtaataagaattaaaagggaggattttaatttaaagattaaataacatataatagaaagcaaatgtgatactacaatatttaagaaatagttaaaggttaatctctaccttcaataatcatccttaattcctaataataaatgttatttcaatttttcaaataaaattaataaat

SEQ ID NO: 385784 - DNA, 1520 bp, Cannabis indica
gtgtttttcaacgtacttaggtggtgttcaattcggtagagtagaataataattgtaatagtaatagtatataatgcaataaaaattaagaagtgtaataagaattaattgttatgtttgttttgttgttggaataggtagtaaactgataaaattattcatgttttagtaagaaaatatataaaataagagtaagatagtcattttaagtattagtgattacaataaaatgttattacaaaagtttaaaagcaaactaaatatgagaattgtaatcataattctattacaattgattacaacaaatcaaacatgtcattaatgtttcatgcatgtcaatgcactgaattaccatcatagttcagtcaagtcaataaaaatcttgcaaattatgaaatattcaaggttagttttaatatttaaaagtaacaaaattcaaaccgtttgagaaaatcggctactaccgatataatccgtgggtcccacaacttattcataaacagttagatttttttacatcacggcttttaacgaagaatcgcatctgcccataaaaaaatataaaaggttttctttcttctgaaatttcctagctcgaattgtatcactagttatagattcagcataatttggaagtaccaaagaacaaaaaagaaaagtacaaatctttgaaggctaaagtgtttaatttttagatgccataattaagaaagaacacagttttttcaagactgcaggttaccaacattagtgtaatttttaaacaacatttttattttcacctaatccaaaaatataactgtgtcaattgcttaaaaagtttgttacaatataggaaattaaatgaattgggacaacccatggccaagccgtcatttatgatacacatggcaatgtatttaattcagttgtgatagtctttttcttttggggtcaaacaaatacaacgagagaattatttcaaatttcaaataaaaggcccaccgtaacaacaccagcattaatgttttttttttcctttacctgtctggttagaaacaaaatcatgttcagtcacacaaataatatctatttataactgtcgtagcagctatatcccacattagcttaattgtgtccaaatcgcgaaaagtgcattgtataaatatataatattatctgaaaatataataacaacaataaacaaaacaaaacaaaacaaaattattttaagtaaccgtgtttagagaactgcttttaaaaatgttagtgctgcgaaggtcgcatataatctccacgtgaaaaatacccacaacctagtaacttgctaacacatgttaatgtccttttggatgaatctcatcattgtatatataaagagcgtccctaccatgttaactgctgtctcaattaattagtaatactttaaaattatataaaaaatatataaacatacttaataatactaataataatataataattaaaacatatatatatatatatatatatatatacgatcatgcatcataaccaaccac

SEQ ID NO: 385785 - DNA, 1378 bp, Cannabis indica
ttttaataggttcggttatagtgctggaggaagaaaaaccaaactttaatagaagattttaaaacaaaaacagggtaaaatggtaaagaaatgagagagaatgatgggttttttcacggtgattagcgatggtttttccgtgggtatgggttctgctatggttgtgctattatgtgtgtttgaggaagacgctctaagtgaagaagacgaattggtaatatatagaatctatggcgtcagttattaggaaatagccaacgccataggtgcacagttatctgacacgcgtgcacctatgacgtcggttatttccctaataaccgatgccataggtataataaaataagtttaaaattttcaactcccaaccgacagcataagtatattaatttctatacctatagtttttatcaaaaaaaactgcctctaaatatcaatttcaaatttggtgggtattttcacaccctttagctctcccttttataaatttggttaaaaaaatagtctctaaaggcccacattgtaatagtgttaggagaaataaaaatataaaaatatgaataagaatgtgaatatgaatatgaatagaaataagaacatgaatggaatagaataaaataaaaataaaatttaaaatacataaaaaaataataataaattattaaaatttttccttatcttgaattggaatggtctttccttctaattcaaaatagaagagtcattccaccaaaatggtagaaatagattgacattccatactttaaaattcaaccaaaggaatgaaataaaaattattttattttatttctatttaattactctaagcaaacgccaccttataaattttttgaattggagatttctgttaaattatttaaaaatgaagagaaaaagactctagtgagaaaaaaattaataattttggtttaaaaaaattaaaaaacttagcaagaaaataattagggacattggctccaactattttttttattaattggaagggctcaattggatatacttgtgacttggatatacttgtgttttggtaaatatacatatttttattatattttacaatatatataaatagtattttggttacgatgcattttagttgactatcttacttaatattttattttacttatgtaataaaatatataatattaacgcagaaatctgacatagatatttgggccacacaagctcgctagattggtgacaatatatttatgagttaagtataaatagagagacacagtaatttatagtagttcactccctgtatcgcgatagtcataaagctacgtctactttgaattttatttctcatgatatggattacaaaaaatggctcagtctaaatactctaatt

SEQ ID NO: 385786 - DNA, 786 bp, Cannabis indica
cgaagagtaaacgaagccgtaaaggaagcggctccggagctggagccgaaaccggagccgccgctgtaagcagtagcggcggggaggagccggaaggtggtgacgaggtttctcccgccactaaaaatcgagtctcggctcttaaatctgagccgttggttaaatttcttgggaccattcgatctcaccggctcggctctgttttccaacggcggcttcgtacccaggtacttcttttcttctaattttattttaattttataattttaattattttttttttaaaaaaaaataatattaatagcggaaagaggcagattcctttgaacgaaaaaaaaaatactctctttcttcttaaaataaaataaaaaacgaaacgatgggtaaaacgctgtcgttttatttaagaattcattcgatttcggtataaacgacaaacgaagctagcactcggttacgaaacgacgagtaaaacggtgtcgtttcattttatataaagaagagaacagaattcaattcatcacatcatggggacgaaacggcgagtgaaacggtgtcgtttttattatttaaagtaaagaagagaatgaaggaacgcgattggtggaagaatgtaggacgtttgtagcgaatgaatgaaaccgtatttaataatccacgtggcaaagcattatgtcgccatgtcatcttacgctggcgatgttttaaaatatttttcttctccatcattctttgtttttaactaccaattattaattatttttttaaaaaaataatattatctat

SEQ ID NO: 385787 - DNA, 931 bp, Cannabis indica
caaaattgttagttttttttcacagctgaacaacaaaaataaaaattatatctatttaggattactaaaaacaagtagttaattaattaatttattttaagttatttttattatttagatactcttaacaacaaaaatgaaacaaaccaaaaataattttatatgcacaacaataaacaaaataatagtatagttgattccaaaataagtaattacataactattggcacaataaaatactcattccagctataaaattaattaatgtgatgatattcttacttagagatataattgttatttgttaactattgccaatacttagagatataattaatgtgatgatataattgttattccagctattgccttaagactatggccaatagtgttaaatttttcttaacttaatgttttttttttttttttaagtaagaagaagaagagatagccaatagtgttaaaaataaatatgactattagtgacaattaactagttttgcagcattcacatttgtcatggtgtgattcaaatcacttttattgtgttcttttttttttgttacgaaaagagaaatatctcattgaatcaatataaaaattacatcaaactatatactaatatagtcaaagctaattaagacaatctcaaaaaaacactatcaactatttacaatttagctataagcttattttagaggttattttccttctacttaaacaaccaaaacgagtttttatttcatgtttggtcatatcactaacatattgatcacactgaaagaactagaactaaaaaaaaataaaaatttctattaaccaagatattttaaattactgcaccacagcaatcaacacctgacattgtaaatcagactacaactatccaattccacacttcccacaatgggtcaagttataaagcctacgc

SEQ ID NO: 385788 - DNA, 1056 bp, Cannabis indica
ttcttttgaacccttcattactagcattgaccctttgataatcttcattatgccattctcaattttcacagaatgtccttcttgatccaacatagctactgagattaagttcctttttatttctggaacatgtctgacatgctttagctctgcaactcctccacctttcaattgcaatttgacagtgcctataccagttatggggcatgatctgttgtcaccaagcctgaccataccaccattgatctgtttgtaattactgaactgagactgttctgggcagatgtgaaaagaacacccagaatcgagtacccagtcagttcttgaactttccttagacactaccaacacccctgcactaccatatccatcactatcacaatcagaaactaaatcaacatcaccagatgactgtttctggttataattcttaagaacagggcagtctttccttaggtgtgtggttttgttgcagacaaagcattttcttttaaattttgagtctgattttccttgattcttccctgtgtgttctttgtttcccttcttgaaattctttcctcgaacaaacagtccatcaccattgctatcaaccttctgctctgacttcttctttaattctttagacattagagcattttgaacctcttctagagtcaatgactccttgccatacatcatagtatccacaaagtgttcataggtttctgtaggaagagagttcaaaactataatagcttggtcttcatcttctacctttattccaatgttttcgagatcaagaatgatcttgttgaaatcatcaagatgatcttcaacatttttcccagtcaacatcttgaaagagtacaatttctgcttcaagaacagtctatttgctaaagactttgtcatgtagagactttccagttttgaccatatcccagaagctgtcttctccttcgacacctcacgcagaaccttatcccccaaactcagaattatagcactggagctttgtcgagcatctccaccttctctttctctgtcaaattccctggtaagttctcttctcct

SEQ ID NO: 385789 - DNA, 1451 bp, Cannabis indica
taagatttgtatatatatatatatatatatataattaactagggtggttgatggaggagtggagtggggtgggatcagatggtgtgtagtacaaaacatggcgcaagagtgtttgagattattatttttgtagagtttaggttacagtgagagaatatgaatgaatacaaaaacaaaaacaaagttgaaactatattagtagaaggaagtaatgtttgggaggagagaatctgaggtgggaaagtgtggtggtaagtaagaaaagagagtttattcaggtgacgtgttttttgtcttggggtaacggctatatatattgggaacgagaaaactacagtaccaatcgatgtatatatatatagtttttatttctgtatatacataatactaagcgagggaaaacaacaaacaatattcaccataatagaaagaaaatatatttatatagaattaaatagaggaaaagtgatttttttggggacagttcgaagatgacgcgttttcgtattggacaaggaaaagaggccaaaatgcttaagctagctactactacaaataattatataaaaagttatatcgtcccctttcttaatatgaatggtgtttattttctttttttcttaaatgggttcgttgtacgtatgaattttgttataaactcctataatgctattaatattatttgcttcgatcgacccatcaaaggatggaaggggtgcttgctttaatttataaactatattgggtcagctttccttgtcaatctttagatgagttagctgaaaccatcaatttgaaagaaaaaaaatatatatgtttttttttaaaaaaattttccatcaaaagatttcaatcatagagtgaaagttgtcctttacagaataattacgtaattatttagtctatatacatgactaaaacattagtatacactaatcagagtggcgcagcggaagcgtggtgggcccataacccacaggtcccaggatcgaaacctggctctgctctgatatatagtaagactttgccttagaacctttattttttcactccttcactgaccacacgtgttcttaccattcaattgttttcctagccacatttactaccactgaccacacgtgtgtgataaaaagttatttatacacaagtagacaaaatcgccttatgctcaaaactcagcttcgttttttatgtgatattatgcatgaaaggatgaaaattaaacaaaattactagaagagttgcgaaactaatttcatatcaattcaaatcgtaacggcacttacaactgtgtcgttttttcaatgcatgaattattaaaaatactatataatgagcaacaattatcgacaataattaaggttatgataaatatggcataaatagtaaatatcactaaatatggcattatttaaccaatcaaactaaaaatataattttttttttta

SEQ ID NO: 385790 - DNA, 842 bp, Cannabis indica
tgagtataagagcaattattttaaaagaacaactatttaaaagaaaatatagttgaaagaggaaatattataattaaattaaagggtaaacatcggcataagtacccaaagttttatgtttgtaagcggcataaactcaatgtttatttttagcgacataagtacccaatgtttgtaaaactttgggtacttatgccactatgtaccttaaattaaaatattgagccattaaaaaaagaaagaaacctatgttggtagatgagaaacctaaatttttttaaataagaagaacataaagctatatatatataatatatttacgagaatagaaaatatttaagcattgtcgtctgatgaaatgagaacttgtgcaaagttttcaatgtgtggttgtttttataagagtcatattacttgcaagttaagacactaatcaagaaaaagaaacttaaaaaaataatgcattgacacttggatataggtggaggttccactattattgttacacgtgacacttacacatagcatttttcaatctaatattttttgtatgtaagtaaatgacatcaaataaagtgttacatgtatccctttaacattaatttttttttatttttattttttaaaacaagtaggtaaaaaggaggatattgagacttatctattctatataaagtgtgcctatataactgatgaaagtcctaattactattgattaagtacaaattacctaaattgattatatctgtgaattaaacgaagagtaaatcaaagaacacagaatttacaagcttcctccgcattggaaacgcattccaaccgagtagtgcttgggttccctt

SEQ ID NO: 385791 - DNA, 2034 bp, Cannabis indica
ctactattagagcaaattacatgcaatgttgagctgactggctggtcccgtgggtagcattatgaacgtgcatgctgcctctggataatggagactattttgtactaattgaatatgtgtcacacaaatatttaacctttaaaagcaatggacacatagcattcaaagcttgttcctttccaagaaaaatttcgtaatgcccatctggtaaaatgatggtggtggtgcgcgctgccatgttttgattaggagaccagagcagattatgtcaggaaaagcataaccatcactatggtgacttggcgtatgagaaaagtcaacatctgcaagcacccatgagggtcgacgttcgctttaggctttcctagtgcacatttgaggtgtccctcaaaacaagtcaccctactagacccttccgggtctgggagggacatttcttataccgctctacggaagcaagtgctgctgcaagtaggcttttgcatatctctttaacttggatgattctcgactgggggagacctttcagcgactaagcatctttaagggactctaaatcataaagcattagtcgagccttttccattgaaatccacgtgtcaggtcgtgcatgaaacgagataatatttacccctaagctttcaagatgcaacgcagtccggaagcttgaagcccttctcaaattttttgtgataaactcatggcacgtgggggtatctgagatcgcttcatattccaagacttgacgccagttaatgagtcactggccataggcattattagcatggtatgtgggcagtatcttaaatgcaattgttggcattacatgagcgggggggtgcgtttcttgagtggggttactgtgacagttaagtgattgagatgaaccttcttttaatgagggcattactcgaggcatgtaatgatgaacgttaagtataagggcttaacattgaaggctaactcatcaactccccgactgttagattagagaatatttcttcataaataataattagagccattcatttcaaacagtaaaggcttcaaccagtgtataagctagtttcaagagttcgctcatcttcttttcaacaacttcaaccattgaaagtctttctgatttctttgaactaaggcttagaagtcttgacacattttatcccaaattcgacggagacttcgattgtcgaaccttccacgactgtgcaataggggaagcattgcatacctgggcctgtcagcatgatattcttctctaacctgtcccactatccagtaagtatctcaatgccctattgaattttacgcaacttcatgtctaagatagaaatgtttagttgaagttgggtttggtacgtaatgcatattggatttatagaacactttttcatagaaacacattattaggattgaactgcgtgtgaatttctgtatcttgatcatgtcagcctcattcgaatgggttgatcacggtcatgctatatttttgaacatgcttgcatacttgcatggcttcgagattgggattggataaccatcatactggcctattcctttcatttttggacaagggtacatcaaaggtgatccttttgggagggaaacctgatccttatgcatccacccatttaggagtttgttactgtttgtcaagtaaacttcccgtccttaaaactttgaattagttcatctatcccgtgttgattatgcttgcaggtacctctcaaagtcaaaatgctaggccctatgaaggagagcgattcgacaagtttctgaaatggaggtgattccttgggaaagaggaagaggtaggatatcgatcctcaacgagccaataatcctaccctatttgatctgtcaccatctactcaaaaactacaccagcaataccaatggtaacaccaataaccataaaaactttagcaccaaccatttcaaccacaatgacagcagcctaccttcctacccgaaatcccttctgtaggctttaaattccatacgagggttattcctattggaaattattttacc

SEQ ID NO: 385792 - DNA, 1064 bp, Cannabis indica
ttttttatggttagttgggttttcggtatttgatataaagaggcctttgattgaccagtcagaaaaccgaattggggataaaattggcaaatttctttacttagcaaaataaaatcttacaccaaatccaaaaacaaaacaaaacaaagagaaagtgagggagatttacctagcagtgagagtaagagattgaatatcaggaccataagttgagctgttcttgatgagttgaagattaccagtcaacaatttgcccgagtactgactgtgaatggatttgattttgtagccatacccaacaacagctgtttcttgagctgtggaagaaagaaaactagtagagaaatggaaaagaagaattaggagaagaaaatgatgaatttgattatgtgaaattagtgatggaatagctctgtttttggagctatccattatattatcacttggacaaggaaggaggagttaatcatcatctgacttttataggtcccatagaactagaagtcgacttaccaagggaccaatgtcataaactaaatctccaagatcaacgacaaaaacgtccattctatgaccccacttttccacttattagtttagttacattgtaaattttttagtaaaatgacaaaattaattatggtaatttaaaataaggatgagattaatttggtattaaaaaaataaaaagagattgtggtatatttgttaaatagatagagttttcttatttaaattattataattaattttaaatgtttaaaaaatgtatttatattaattgtttttcaaaaaagttgagtttcttgttaagaaactatgtaaagttatgtctttaatgtatattttgtttctttattaatataaggaaattttgttaaaattctgtctatgtgcaataatttatttgaacggattaatagtttgtttgaataaattctgacattttttttttaaatatttttcgtttattgtttgattgtttctttacttataaataaagcacgacttgtgtattaattgagaatatattgctactgaagttgtaattatatatggtaaaa

SEQ ID NO: 385793 - DNA, 731 bp, Cannabis indica
aaacgaaatgatccgcacgtgttacacatgattatgtatagtactctaatctctctaaaatatatatctatatgtataatttaaaggaaaaatggtaaggaactttgcgatagaaaaaaaagagaaatggtaagggacattttttccaaagagtgaagatatcgtatattaatattattattattattattattattattaatagtaagtctcgtatattttaatttaataaaatactatgtgatgatatttctaatttgaatcatactgtgttgatataactgctttattttaattcgtattaagaaaaaaaaaaaaatcaaataataatagctctatcactaggttcctgttagacttacaatcgtaataatgatcggttaaactgtataaacaaataaataattttgtttgtcatagggtacgtaatcccttttcaaaaaataaaaataaaaaattagtggggtaatctccattaattaatatatataaggttggattggaggtattaatcagttatagtccatttcaattatgtgtagtggaggggtactcttgccttcacgtaacaaactataaataataataataataatccattatctaatatggctaaatacgtcaacaatattaattatgatacagaaattggattggacatataatatcaaaaccaaacgaaattatacacctttatatttttagtttaacaaaatatactttaaaaataa

SEQ ID NO: 385794 - DNA, 2380 bp, Cannabis indica
tagtgaggctccactccaagaaacccaaacctcgaggagacctcacctcgagaaatcctaacccgaaagagatcccaccccgagaaaccccaacctcggtgagattccaccatgagaaaccccatacaaaaaaaaaaatagtaacaattacagtataaaacttaatcagtaacaaatacaaaaatcttttacaaggtacacaaaatgagtaaaaaagtttagagaaagatgaaaaatctaatcagtaacaaaatccctaaacaccctaatgacaatacaatttttgacaagatgccgaagttggccaatgtcgctgcctaatggctaagctacggcgaactgctgtcaatatcgttgttcatcgtctgcgaaaaaaataataatggaataattgagagatcaagatcgagacggatggatagaaagagtgagagaacttttacctagagtgagagagaggaacgagcgacggagaccactcaactttggtgaagctccaccactacaatcgtcgaaataccctaaatagagagagacgtcccaaaaaaatgagaggcaccaatggaaagagagagcccaagaccatctcgtcaacggtgttcttccattgtgtacttgcgaggagcaaaagagtgagagagggttgagttgagaaagaagaattgaaacacacagaaaaaatgagatctcaattatcactactaaaaagtcggaaataggcaactatcaaaacagtcagatataacattcttgtttgttcctcaaattgacgcctataccacagatgcaaaatgatagggtatattcgattataaacaatcagaattaagcatactcaactgtttctaatcgacggtaaaagagagggaatgaatagatgtctattccaaatagtcacttagactttagctgtcggttttaaactgacatatatatataaaattatagatctgagatttatcttacatctaccaaccgacgataaccaaaaaaaataattgaaaaaaaatgttcgaacaacagaaacaaacccagaccaaaaaaaaacccttgttaacccgaaactaatttctctaataacgtgggcatcaatgtttgacatgtcgcaagaagaatggcatcacagagttgagtagacccaagtcatagcagtcgacctgggatgggaccctagtctagcacctaagttgactttgggatctttgggatagaaattcaaacttcaataacatgaatccaactcactatcattcagtattctgtaccatgaggacatggagcaacctaatccaagtatcgggagctgaaattatacgaaccttcaacccaaaagcaaacttaagcacctaggatttcaccaggcgcccaagttgacatccccaactagggtttcaatttttgggactgtcttagcgctaaagggccaaaacttacattgggacatcaactagatatacgacggacatatctgaggctttagaatcagaatcgtagcaagtttatttttgagcacccgaggccttcggctttgagcaccgagcccccaagtcgacaatctatccatctgggcaccttccaagtattagatcagagattcaattttgcttcttcttcgtcttcataaaaaacaagtaaataggtcctttcggcaagaaaacaacacttcctatatgagtatattcaagaaagtgaatcataggtactatatgagtatattctttttgaaaatcaaccacttgtaattctgtaaatttgtcagtgattaattgagataatgatggctgatgttcagcagagttgtggagcattttagctcaaacttattaaatctctggtgttattttcctgttttgtcatttaattccatctttattaagatattatctgttttgtttgtgttcttgagattgtgtttgtgtgtgtaaactttattgcagcttattatctggaatgattctcaacaatacccattacaaatttaatcaatattactcatatcatcacatcaaataataataataaatagataaataatcatatcattaaactttcattaactcataacaatactattaattacctatgactaaatccaaacccagatgtacttgttgaagctctttgtcggttaaccacaaacatctccattaactcataacaataacaataatattttattttaattttattgcagttaagtttaattattttaaattagttaaattttttctcctttcctttattttgttggaaatttaggagttaaaattattagttaaattttaggcttagttatgtttatttttaatatttaaatattacttaaattatttcttttttctaaaaattatttttgcattttaaattattattattatta

SEQ ID NO: 385795 - DNA, 1915 bp, Cannabis indica
tgctagccttgttcgggcattttatagtagacgcaaaagaatttctgtcgcctagataaaaaagttcggggaaaggagatccccttgtctaataccgcactctgggttcagtctactcaccttaccttcattgaggtaaatattgaaggttgttgtagaaatgcactgacggacccactcacaaaacttggctggagccttgaaactacaaagcacatggtcagtaaatttccagttgagcttatcatatgctttaaccagatcaattttgatagcaaagaagtcttcttttctttttttaatattacaggagtggataatttcttgcgctaacacattgttatcttgtatattcctccctcggacaaaggcaacttggataggacaaataattttttgtagaacctgtctaattttgtttgcaatgattttagagatcacctcatagatcacattgcaaagggaaataggtctgaactgtgacactctttttcagttaggaaccttcggaattagaaccacgtttgtttcattgattcctttatgcataggcccccctcctgaaaaatacactagtgcctcacagaaattcttccccacggagctctagtaatgcttgtagaacaaagcaaacataacatccaaacccgaagctttaaagcttcccatagtgaaaagagcttatctaatttcctcataccctaggatcgagataaaatcagcctgctccataggggttaaatggtcaaagatcaagggacttggattctctagagggtcctgaatgggattagaggagttatcctaaggaactccgtaaattccctaccaatatccttcctactcgttatccaagtcccttctctatttaggattcgctccactaagttctgcccattacgaatcataaccgctataaaaaagacttagagcatttatcaccttctttaatccaagagacacgacgatctctgcggccattaaagagatctcctccttaagacctcattaagagttttcctcacctccacttcacttgcccaacttctcgagccagttggcatcttctaaatattcctaagttggagttccaaccgacctatgtaagtgtccagcttgtcaaactgttctctattctatttgctcaaagccaactgagtggctccaatcctcttgcaaacatgagatgtagcccaggcataagacaatgaattccaagcatgctcaaccactagacctcaaaacggaactgcttctgagagtgaattttaggattctcagtattaataaatagtggactatggtttgaattacaagtttgtagtgattggatcaccgctttagggaaaatgtgtaaccaatcctcattgaccaaagctttatcaagggctgactttatatggcgatgaccttctttatggttatcccaagtcaagttgtcacctttgattggcatgtcgatcaacgtgttgcctttaattagctctaaaatgaaaggaagaaactggtctttctccattgaaccaacccgctcagagttgctcaaaacaaaattcacatctcccaaaatcaacctgggtcgaccaaccttattgccaatacccataaactctgaccagaatcgcttcttctcatggaaatagggggaccatatatacaagacaataaccaaggatagtgcttagggtccaaataaacaaagcccaaaatttggtttttagagacataaatgctctcaaaaaaaaaacctgatttccatgctaacataatcccccccggcactagcaatagaaggaacaacaatattaaaataaaagtgtaagttcttaagagaacgtatcaaacaggtagcatccactttcagctcggtaatgaaaataaagtcaggagagcacgaccgaattagggctttcaa

SEQ ID NO: 385796 - DNA, 997 bp, Cannabis indica
gtactaaaattacattctcaaacttagctaccttcttgtacccccaaatatgaatttaccatcaaagaagtaaccaacaaaagaaaccataaaaaggttaacttcttttttttaatcaccttttattggagtactcttttcttttatgttttttttttttctcattcttttataagttaataaaaaaattcatcaacccatgaagtgtaattaagttaacataaaaatccatcaattcatgtgtggtcaagttaaggttatgtttgatattaagagtaaagttagaataataaatactattttaaatgatgagtttaataaaatttatcgattaaattttttattttgctaaataaaaatttagactttgtattttttgaaaatagaacataatatagtactccgagctcaaaatggaacataagagcatctctaatggatacgtaaataaatgatataaagttaaaatatagttcacttatgaaatgtgctctaatagtgtgctaaaagataatctaaatatgatacatttgtcacaaaaaatgactttgtgctatatttaatattttattaaaaatatacaaaaaaagtattattttttattcttttattatttaaatcataatatagcaaataaagaatgtgaaatttagtaaaagttaatgaatcataataattagtgacattatagtaaataaaaaattaaaatttattataagttaaatctgacacaatgttagagcatctccaattttttagcattttttaataaaaagcttctctaatagtgtgctataagttgtgccaaatttggcacatgctaaaaattgggtcaaatttggcacaatatatagcattgtgccaaattttgcacacaataaatgctaaattttaaattacacttttgctattaatcgttaatgaaatactttaataacaaatatattttatttacaatattgccattagtaattttttaaatatttaatttattgtt

SEQ ID NO: 385797 - DNA, 3020 bp, Cannabis indica
attgctctcttcagtatttttttcatcagcagcattaacctttggttggttttcttctacagatatatgttctttcgcactgtcttcctcgtcttcacccccttcttctttaccctgcaaaactaagttattcttcttctttttgttgcgttgaacctgagggctacctttaactttttgagttttcttcccattgacagcaaaaggcttcctcaggattttcaatttagctttcaaagaatttggagtttttgttccggatgactccggtttatcagatacatttgaaggaatctccgatggaatagtaaatacttcagcagggatctctgatcctgatcctgcaggtttatcagatgcttctgtagaattgttggttggctcactgtgaaccacttctacaagagtctctgtttgttgacaagatgtttctgctggactccctatgcctttgacagatactttgacgggagactctgttcccttatcaccctttcctacattattatcttcttgttccatggtctagacgtataagctctattcagaagagcattgggacagagaagagaaattaaccaagagaaaggaaatattaaagagaagaatttttgcattttcttctccctacaagtaacacattaaagtagagcaatttactggtttagaaaagaattagaggactaaatattcgccccaaattcagtaaagttaaccaggtcaaaaacccaactggtctgattcatagaaacaaacatcacgtttccttctaacattattgaaaaaggagagataatcatttattcaagaaaaacaaaaatgaacaataatccctccgtcccaaggtcaatataaagctttcttatacagagcgtgttgtgctttaactgattatttttcaaaaaagtgttaaatagaaacaattagctactaaaataattattcaaataaaaaaactactaaaaaaagttacaatctgaacatttccattgaaaaaaaaaattgcttttaacaataaattagttcagaatgtacagtgaaaaattatctctctgcataaatataattaggttttttctactaaaatttcctatcttatatttcatccacacagaatcaacaaaatcattgaataaagaaaaaaaattcaaagttcaactcattatctgcatacaaaaggtacaatagaatttgtcaccgtgaaaagttcgaagacctatttatagacacaccctaaacgctgagggagagatacacaaactctttctcttttctttgctgatacgaaaaaattacttttatatattagaaagatggttggctgtgttggccatattgtattttcatcatcttcctcacttccaacaaaacactaaggctctgtctgataacacttttaaaagtgaatttttgtttttttaatcaaaattatgaaaacaccatttgaaattaatgttcagtaacagattttgttttttgttttattaatatgaaatcaaattcaaataaattttaaaaacagatatttcatgattctaaaaattttaaaatcactttttttcatttccttctctctcttgatcgctcgtcttcctcgctcagcagttccatgccaaaaactcatccatggcttcagctattccaggtaaaaatctctccctctccctccctccctccctccctccctctctctcaaattttttctaggtttgaaaaaatcttttactggtttttagattttatctttgaatggattttgaaattgatctcaaaaatgagatttcgagtttgaaaaaatcttttgctgtttttagattttatctttgaatggattttgagtttgatctctaaaatgagatttcgagtttagtctctgatctaaaatgggttcttagagaggttcaatccacacatttgaaagaatacgataaccctagtatttttgacctttcaaataacacagattgtggttcttagatagacttataggaataatttattatttgagaaatagtctttaatggggattatatatacatatatatcgttacataccctttaatgcttcagttgctactttctttcatgctcatatatgtcaatatatatatatatatatagacataggtgtttatagttatggaatagagatgtttgagagaaatattgaagttgatatgtttaatctaattcaacttattggatttgtttaacagttttgttttctagtataaattggactctgaattttttggtctgtttttttctttaagaattgaaaattaggatttatatattggaagttgaaagtctaaatagggattgctcaaaatttgaagtgtttcttgttcttgctgaaattttcagtttggtctgactggctgctggctttgaaatttttagattgcttgttttgtggtacacattttatctagtactctattttataacaacaaaaatttctctttgaatttgatttcaatatttgctataagttttgatgataatgtgggtatcacttagtcttaatatatgttggattatatccattgagtaataatacctattaagtcagtgactataagatagtttgcaatctgctccaaaagacttgggaaatttgatttttcatgcttacatttggttaaaaaatttcccctaaacacataataactaatatttgtaggatatgacagcttttatgatatccctaaaataccccacatcacccccatttacacaatcggaccccacatcgaacacaatcgaacccatcggaccctatatcaaacccatcgaacccccccatcggaccatatatcggaccccccatcggacctatgtcttctaccttgcaaactcacagtttcattcgaccctatcggaccccatcagaccttgcctaaaatcatagatctgagattctaaaacctaaatttattcataaatctaacaaaatctatctttaacacttaaatcacaaacaaaatcaataaaaaaataaaaaacagtggtggtgc

SEQ ID NO: 385798 - DNA, 827 bp, Cannabis indica
ataaattttttattattatttaagtaaggagagagaaagtaaaatgaaaaaaaaaaggtgagtgaaagaaaataacaaaacataaataaaatgtaccaaaaattctatgactaaaaatatttaataaattttgaactaacttatattttattttaaaacataaaaaatattttttacaaaatatatttcttaaaatttttgttacttttttaattaaaataacaaaaaaaaaatgatttatgtaattgttaaatacacacttaatattatattttgtagagaatttaaaataagtctttgaccttgttatctcaatttttgtctacttgtagtagcacctccacatggccaaaactaatagacacgtgatagaaactattacaaccgagcaggtacatttcgtacagcttccaagtcaaaagcaaagatatagatacacaagtattgacaagaccgtagcaagatgactagcaggccagacagcttacagcctgtagaagaccagacagcgtacaacttacaggctacagaaggccgaacaacttatagcctgtaaaagtcggctagcttacagcctacagaaggtcaggcagcttacagcctgtaaaaagttgggcaacttagcatgcaaaagactggatagcttacagcctgcagaatgccggacagtttatggaggaaattacattatatacccactttactttacttgtattaatttttaccttcattttcatattctttaaaatataccagcttttatagatgatgtttctattaaaaaccccttaggttaatgtaaattatatgttagacttaagtagaga

SEQ ID NO: 385799 - DNA, 1458 bp, Cannabis indica
atcttcacttggtatcagagctagggttgctcttaccatgtcgacgggaggaagtcagacccctcgtggaggaggtcaccgtgctggtactgagcaacagggccagaatcccagctccccacagatcacaagtgcagtctcccaatcgagctttcatcttggatctggaggtttcaacagctctccgtttggtaacactctcacccatcctttctctattaaacttgatagaaataattttacgctttggagaaatcttgttaccactgtaatcagaggccataggctcgagagctttgtaaatggaacaagagtgtgtccaccagaattcgttccagccattggagaaggtggagacaacacacctgggtttggagttcaaccaaatcccgattatgaacaatggatcatgtgtgaccaactcctaatgggttggttgtatgggtctatgactgagaacatcgcaacggaagtcatgggatgtgtctcagctagatctctttgggtggctctcgaaaatctgtatggagctcattctcgagcaaaaatggacgacactcgaaccaaaattcagactactcgcaaaggaggcactaccatgcctgaatatcttcgacagaagcgtgcttgggctgacagtcttgccctcgctggtgatccctatcctgaagcccatttaatttctaatgtgttgagtggtcttgatgcagagtatctcaccatagtgtgtcagctagaagctcaagccaaagttagtctcacatggcaggagatgcaggaaacattgctgagttttgatagtaagttggaacggctgcatcttctaaccacaaccaacaaacaccctgctgctgcatctggtgcaggaccttcagctgcccttgccaataaacaatccaatcatcacaactctggaggcagaggatattccaatcataatcaacataactctggtagaggaaatggcaggggacccaactacaatcgtggaggaggaagctcaaacaggggtggtcgtggccgaggaggaagaaatgtcaagccaacatgtcaagtatgtgggcgttatggtcactcggctgctcactgttataaccgatatgacgagtcttatatggggtttacaccaggtgctaacaatccttctcaaaatgccaaagaccctagtgcatttgtggccacacctgaagtcgtggaccatgaaggctggtatgccgattcgggtgcaagcaatcatctcacttcagatcaagaaaatatgaacaacaaatcgaactacagtggtaaggataagctcactgttggtgatggtaatcagcttaccattactcatattgggtctggaaacttgcactctaattgtggctacaatctgaaattaaatgatgttctgcttgtacctaaaattgccaaaaatttgattagtatatccaagctaactgctgataataaagtgtt

SEQ ID NO: 385800 - DNA, 2716 bp, Cannabis indica
cccattaaattctggagtgaatgtgtcatggctgctaccttcttaatcaacagaactcctacacctttgcttaaaaataaaacaccttttgagtgtctttttaataagcaaccgaactacgaacatctcagaactataggatgccttgcatttgcttaaactctcactgcccacagaactaagttctcacctcgtgctcgaacatgtgtcttcatgggatatcctcacggagtgaaaggatataagttgtttgaccttaacacaaatcaattctttatttctagaaatgtggtatttcatgaaaacatcttcccttttcacaaactaaataatgacaactctaacttggatcctttttctaatattgtcttacctagtgctgtgattaacgacaccactgtctgtgattatcccacagaacacaacaccaacatttctatgcctcaacaggtttcttcagagcaagacacacctgactcaaccccaaatattgttcctggtgcaacaaacaactcagataactccaacatctccactgaacacgatacagcaaacaccagacccccttccagtatacaaacgcaggcctctgattcaaatcctacaagaaaatcaactcgtgtcactaagcctccttcttacctcagagatttcgagtgttattcctccatacaggataaatcttccaccccacacaatatttctaattttatttcatattcccatatatctgatccatataaggcatttatttttgcagttgcacacatgagagaacctcaaacataccaagaagctattcaatttgaaaaatgggtgcatgccatgaaccatgaactaaaggctctcattggcaacaaaacttggagtgttgtgcctctcccagcaaacaaacgtgctatcggatgtcgatgggtatataaaataaaattcaacagtgatgggagtgttgaacgactaaaggcaagacttgttgcacaagggtacacacaacaagaagggcttgattttttcgacacattctcccccgtagccaagatggttacattgaaacttctccttgccatatctaccattcaacaatggccaattctccaacttgatattgataatgcatttttaaacggtgatctcaacgaagaggtctatatgactcttcctaaaggactaacacttccttcgtctcttaatgcagaatctaatttagtatgcaagctacacaaatctatttacggtctcaaacaatcttctcgacagtggtacaagaaactctcgaatgcactactcgaggaaggcttccagcagtcccaagctgactatacattattcacaagagggaccaaagatactttcattgccctcctagtatacgtcgacgacattgtcatcacagggcccaatatttctcttctccataaacttcaagacacactacaccagaaatttaagttaaaggcacttggtaatctcaaatattttctcggttttgagattgcccgtgccaaacaaggtctattcatatctcaaaggcaatacacacttcagcttctcgatgacactggttatgtaggcagcaaacctactaaaaccccgaacacggtgaaccacttgataatccatctcaatatcgacaattgattggaaaactgctataccttactctctcaagaccagatattaccttcgccgtgaattgtctcagccaatttatggccacaccaaggacgcctcacttacaagctgtccatcacttgctcagatatctcaaaggaaaacctggccaaggtcttttttattcatctacatcagcattaacccttcgggggttctcagattctgactgggcatcatgcccaattactcgacgttctacaactgggtactgcatttttcttggtgacaatctcatatcgtggaaaacaaagaagcagcctacaatctcaaagagctctgctgaagcagagtaccgcgcattggctgctacagcaagcgaaatcacttggttacagtacctccttcacgactttcaaataccacagccacatccagcattcatttattgcgacaatcagtctgcgatccatattgctaacaaccccacctttcacgaaaggacgaaacacattgaattagactgccactttgttcgagacaagatcaaaaactcaaccattcgcctcattcccatctcgggtactcaccaactagctgacacatttaccaaaccattatcatccaccatcatcaacactcatctatccaagatgtccatatatgatatatatgctccaccttgagaggggggtattaggatttgcaatcctattatttcctctatttgcttactgttagttttctgttattacagttactactgtaactttccttttctcatttaagtgtcagtagagtcggttagatacagttagtaacttaactaactttcacttgtccacctctatatatagtgttgtatcttgtctctgtatcaattaattcagatcaatgaaaatactttcaattcactttcgtaataccttaattatatatatatatgaaatactttttaataagtattactcattaaaggttaattactaataaaatttaattataaataatgattttaaaagtattaaatgaattttaatttattggagaatagtaaaagataaatttgaatttctatacttagtttaactacttattagaaaaa

SEQ ID NO: 385801 - DNA, 594 bp, Cannabis indica
tttttctttgaatcattaaaggtttctttagaaatagatttttttgttaaaaatatgtagcaacatatttgtatataaatctgaaagtttatatatttctgtaagtgttaaagaatttcaacaataatgacgcagaaaaatgtagcaatcatttttttcttttatttaaaagcaaagtcatcatgagtaacaactaacaagcagcttttatcaaacaaaaaaaataaaaaataaaagcagcgaacgttaactctaaaataaatagtgttatcaatccttcctaaattacaattattagcttttttttttttttcggaaagggattattgtaggctttgtagctctgtttgtgaataatttgtaagcatattttttcttattaatatatttttacaagttgggggaaaggtccttagtatcctttgggccaacgcaagtccattgtaaagattgggctgtaggtaaagtattagggaaatttaaatgctatattaaactttttacagttttttttttataaaaatactatcaggcggtatttattactttttactatgttttttataaatttcatactgcaatatattgtgttaa

SEQ ID NO: 385802 - DNA, 678 bp, Cannabis indica
ccggcccggataggattctgatctacgagttcatcgagaggggtaatttggacatttggcttcacgactcgtcttcttcaacggaacagactctaacgttgccgttatcgtgggccacaaggaagaaaatcgttaagggagtggctaatgggctggactatttacatgggctagaaaagcccattatccatagagatataaaggccagcaatgttttattggactcagaattcgaggcccgtatagctgattttgggcttgcaagaacgatagactcgtcgcattcgcacgtgtcaactcaagtggccgggacgatggggtacatgccgccggagtacaaggcggggttcacattggcgacggtgaaagctgacgtgtacagttttgggacattgatgttggaaagtgcaatgggtaagaggccgaatttaccaatggcgtttgatggtgtggaaatgggctttgtggaatgggccaggaaaatggtggcccaaaacagagaaatggaaatggtagatgtaaatatttcgagagaaggattggttgagtgtgatgtaaaggagtattttaggattgcttgcttgtgtactcatgagtatccaagagaaaggcctgcaatgaaagatgtggtccacttgttaatgcaaatttgttgatttttctttctctttttttttt

SEQ ID NO: 385803 - DNA, 722 bp, Cannabis indica
tgcgctggtgaaagttagacttttaccaacgcaataatgcactggcaaaagtcatttttggcggcgcttttcattttacactggcaaaagtttcaataccaacacagatttgccaacccctttcactagcataaaaatgcgttggcaaaagtaaatcctgttttaccagcataatacctaacttttgccaacgtatttttgtgatggcaaaagtcttgtttcttattgttatactcgaaattcggctgccatctcagtggaggacacgtgtcacgataaggggaatatggatcaacgcaatcgctttatatggaataactaattaattacgtgagtatcagagtatatttgtaacctgtagactataaggtcttaggggaggaatcaatatacaaactggtgcttagcatattagcgagaaaccatatgtcgctgaatgcgaattgcgaggcatcaaggactgaacacattggaagacgaaagcgacacatatcaattgtgaaagcccttagtgtacaaaccaagtgtaatagtcggattggctcgagaccaagtaagcgaggtgcctatctcgctatgggaagacttcatataacttcatcccattaacgtcagctaacgttcaaatgagctttgaaggactcgttgtaaataagaactgcgatcgacacgagacatgcatcgtcgacctcggaatgaaaaatggccccagctcactattg

SEQ ID NO: 385804 - DNA, 803 bp, Cannabis indica
ctactatgcaaagctgcctggctagtggtatgttcttaagaggctggctggtcctagaagcaccgtagaggggatgaccagccagacatgtcttctgacactaacttgactttattttgttttcaagcctttttgaagttcagcctttcacacagtaactccaaggggtcctcaggagctctccaggagaagctaaaggccaatgaggctgagcttctagcgagggatgaatcccttaccaatttagaggctcttgtcaaacagaagcagggtgtgattactagtttggagtgcattctcaacactaagaaccaggagaataacacactttctggtcatcaattaagaactcaagctttcccttgatggccagtaggccattaggcacgagtatcctttcttgtcttcagagatcatctatgagataaagttgcgtagctccagggtttctatttcctacataggagcttctttccttgagagcatactggcccagaggaaagagttgtatgagagtaggatcgagacagactagaccactttctagcctgagagatcgtcatcagggaagtttgatgaggccatggctgacatactcactaaggaggtggctggccaaagtactgactaggtggcccactttttggcaatctagacactgcaacttctgactcggctccacctgcacacacgagtagcttcactttcttagtacttcaaacttatgattttatttgcatagacattttgatttcatgttttgtatggcctattagccttttacttttgaacactacttattt

SEQ ID NO: 385805 - DNA, 3598 bp, Cannabis indica
tgcatgtgattacaaaattgagtgatatatttggcttgataaggttgctcgacagaggctactacatgcatgacgagagttgaaaagtccctatccgaacagatgctcgaacagggacgtggggagaaaatgttatttaaaattttctccaccaaacgtggcatgtccatgtaagtcaagattggggatacgtggagtacaaccttgtcaatagcaggacaaagtctccttacaaggcatggcaaaatcgtcaagcaacaagcaaaaagagttaagcaagtcattaagaagctgcacaaccataactggccgaccaaggggaacacataggccaaccaaaggaagcttgtatgactggccagggtttaagcacaagctcgccatataaaaggtgattgttagaccaagaagggcctattctacaaaggaagcttgacctttgcaaggaaagttatacaaaggctagccaacacacactaaggttggccaatacatactaggctggccaacacatgctaaggctgaccaacacatgccaaggatggccaacacatgccaaggctggccaacacatgctaaggctagtcagcacatattaaggttggcagcacgtaccaaggctggctagcacgtaccaaggcttgctagcacgtaccaaagctggcgggcacatggaaagctggcaggcacatggaaagtttccatgcacatggaaaagctggcaggcacatgaaaaagttggtaggcacatcctagggctataggagcaatagctggtcgtccatagaagtgcataggctagccaggtcctagaaaataagtgtacctcggccagctcctcttctggcagacacttttggtgtctctgcagctttcaacctatacagacactctcatctacgaatgcttcaacaacccacaaaaatagaatttcaacttcaattatttacctattctttaggaacaattaatggattattttctatatagttaatatgtaataagaggtgatatctcctcatttttagggagattaacctaatttgaactagatctgttgtaagtcctgcactaaagaaagggcattaggtctcactcaaaacctaggtcaacctaagtcaggctaattcattctaaggcactccatatgctacaacggctttcttaagcgacatacacgtgctcctatctctccctctctcaagtctcatatctcatatatgcatccttgacactaagtcttctcttctttagtccttcacaagaactcatcagatcttagtctacctagcattgttctcactattgtactattcagatagagtcactctagaactcaaaacactagtgatctgagtagtattatctccagaataaataaaactaaaaggagagtagatcaatactcgctaaacaaggggaccgaacctctataaatatgtgtctcttttatcatttattgttcttgtttacacgtggtaattgtctatcataaatatggctctattactaatttgccaaattctaagtcaacactaggtatattttttaagaatatgataagaaagaaaaaaaaaactagtaaaaagtaaagatatatttatataaaataaaaattaataaaatgaagtgtacttataattttatggatgcaaataaaacttctctttggtcaattacgaatgattggttgttcaatcgtagaaattgaaattacccttaaatgatgaaggaagagataacaaacatgtaatttttcgctattgtgaaatgtttatgagttaccaccccttgatcactacctctgaaataaaatactagcactgaaattgaattatatatccagaataaccctaagaagacatgatcccaagcacatattgacatgcccctaatttttcctcgaagtcactcccatcttggtagtcattgtagcaatatccactactgcatctgtaatcccacccgtggtttcactagtaaccatgaatcccaaaagcacccaaagggaaatttgattaaatatgcttatattatcttaaaaattttcctctaaacttatacttaccaatatttctagcatttgacaactttagtgttatccttaaaatatcctccccatttacttcaactccctctctcttcccattccttcttcttcttcccacacaatctactccaccaccataacaaatattttgtttttcttctcttcactcatttctacactacaagctactacattacactacaacactacaagctaccacaatataagttacattactacaagctcccatatacgaagcatcaatggataaataattttttttaaaaaaatcttgtttgttgttgttatatctagtttagaatgttatttgattgcttgatttgtgggttgttggttattttgctgttttgtgtgttgtaatgttgctatctgtgaataccacatttttcctagtttctgctattttttcgcctagtctgatggtggcccgatattttatgaaaatgggatgacatgcctgatgtcatcaacctcagaaaacaaccttccatcggacatatatcgaactacatcgggcccacatcgggcccgatgtcatcaaagtcaaaaacagctatgatattatacccatcggaccctaactctgaacccatcaaaccatatcggactgcatcgggcctatcaaactacatcgggtacccttttcacccatcggacttcatcgggcccacattgggcccgatgtcttcaacctccaatctaaacaaatccataggaccatcagacaccatcagacgggcattggaccttgttaaaaaccatattttcccaaaatacagatccgaccgatcccaccctaaatataagcaaaactcacaaatcacagaggtttgaccctaaatctaaacaaacataatctaaacaaacatatcaataatctcttacaatttagtcctaaatcatgcaaaaattaaattaatagacaaaagtgagggaaaacttaccttcataattatcgcggttgtgggtggacgatgatggtcttaggtggtggttgtgcgtggtcgtggggtgccgtgggtggtcgtcggtagtgaagccggtggtgtttggggaatgtgggagtgtggcgccgggtttgagcgagagggagagagagaagcttctgattttggtatttgttttttaattatttttttataattcaaatttgttttactttgtgcgtaatgttttaaattgtactttatttgcttctaaagaaaagtattttattttaattaaatttgtattcaatcaatgaaaataagtttcaaaaataaatttataaatggtattgttgactgaggttttcggaaactaataaaatattataaagttagagagctgtaagaaaattagagaaagatttttacgtggttggggcgttaatgagccttagtccacgagtctttgttatttatggatgtctttaatacagagaatgtatttggggagtgtttcactcttataaatgcagagaatgttcttggtgagtatttcttctacttgctcatatgcagcccaagattctcgatcccatttaat

SEQ ID NO: 385806 - DNA, 689 bp, Cannabis indica
aaaaccaagacttacccgccaatttccgccaaaacctaataacaaaatccccatttattctggcaagtagcaacaaacacaaagtaaactagtaaacctactacccagtctcttagactcgaccactctacacaaccatacttgtgagactttcaaatcacgatcatgaaagtccgggtccatgaagctgagagaagctcacaaagctcccagcaatggacgcccttcgttttgctcggtgctgtgggaccagcaagccaaccacctggtcaccgcttcttcttccgacccaaccatctccatccacgacccccttcttccttcggccgctcccaagctccttcgccatcaccgcgacggagttactgccctcgctcttagccccaactccacctgcctcgcttccggctcggttgatcattccgtcaagctctacaagtttcctggttattactgttcctctgatataatctttaatgtatttttttttgataataatggagttttgagtccggattgttgaagttactttgttcgatttgtggcttcacactcttccaattatatttttagaattagctacttacacataaaaattacaaaaaagaaaaagaaaagaaataaggtcttgccaaatatatatatgtatatatatatatatatatataatagtatgttgtctgttgttg

SEQ ID NO: 385807 - DNA, 2515 bp, Cannabis indica
ttgaaactctttaagaatatctcaatgttcttttcgacagcttagggttttgatttgagatgagtgagcggcattatttgacatgtttcggtttcttgttgacttcagttccaattgtttatacaatagttgctgattatgatttgttttctccaggcatttgttgatagtggagcacagtcaacaattatatccaaaagctgcgccgagcgttgtgggtatgtgctttatgtgttttatattctgatcacagttcttgtcatacaaaaacttggaaattatcatagtttactacaaagcattaacataaatgcaaggaccaacagagtatgaatgttttgattaagaataaataggatttatccccctcccctttgacaattgttaagttttgtcccctgaatttttctctgttgcaaaaattccctttgaagtttgaactataaaaattgttgcaaatgtctccctgcagttgcattatgatcatttatttaaaaaatttactgatatagcactaacatgatgttaatctagcacagttcaagagtccagataaaaaataaatatataaatagaagtctaatggtatattatgtgagtatgtatgtgcattcttaaagttactatttgtatgtttaatgtcaataaattagattttaggtagcttaaaattattaaataagctcttatactagaggggatatttgcaaccattttcacagttcagggggaaatttttgcaacagagaaaagttcagaggacaaaactctataaaagtcgttcaggaacaaaaatcatatttattctttgattaattagattgaggagttaattttgttgttcaaaatattcatgattagtgaatcgagtgtttaatttgtaaggcttcttgtggttttgtcgttcgtatggtatctatccaggctgttgcggcttttagatcgacgttataaaggcattgctcatggtgttggccagtcagagatattaggcaaaattcatgtagctccaataaaggtatctttatttccaatgtagttgtcttaatttttgttctttaaaaaaaaattctatttaatagtgtctaacataacatatcacttttgctgaatgatctctgtagattggaaacatattctatccttgttctttcatggttctcgatcaaccgaacatggagttcctttttggactggatatgcttcgtaagcatcaggtagtacatatcgtctaatctcggtaattcaatagtttgtattatttctgatacacccctactcaaattcagtgcagcatagatttgaaagataatgttttgagagtcggtggaggagaggtttctgtaccgtttcttcaaggttcgtaatgtcatatccgttaagcttttcgaaagtaattgactgaaattgatattaaccgaaatgaaccaaaccctttacagagaaagacataccacaacattttttggatgaacaaaggctatccaaagaagcatccagctcgggaaccggggtgagaatctaaaacgtctttcggtgtcttcattaggtgacattgtaagagtcttatctcaactttttcttactcttcaggtggcatcaggaagtacaatggatgggagcaaaaaagcatcacaaggagcccaatcttctggtgagttcttcgaatcggatgatacaagaacctgtttttgcttggacttattttacaagttgggacataaagatcaaaactttatcttttctttgtttctacaggtggtactgctcagggatctgatttcgaaagcaagatttcgaagctggttgagctcggattcggaagagaagcagtcatagaagctctcaagctatgtaatggaaatgaggatcaagcagctggatttctttttgggggctaaattattctacctcattttttcatagcattttttttatagcattttctatttatggtttccattggaatatgtcatttaaaatgaaattgttgataacatttaactatttttaatatcaaattattgttaaaactttaaaaactcttctacaaaactagtcttccaattcaaatgagtgatgtttcataactactttgttgttctcctaaattctggcttattatttgatttgctcattattatgaagacaatttaatattgaatttcacatattttttagcaaacaagaaactataagtaccttataaaagaaaacttgaaattcaaacaaaagtatttttttatgtattacttaaagttttcatttttaaaattacaaaaatacgatattttcagcaaaaattaagaagatagtaaaaaacgagaagttaattataaaatgggctattttcaataatatgggaaaaattattaaggttatgataaatatggcataaaaggtaaatgccactaaatatggcattatctaaccaatcaaactaaaaatatgggtttttttttaaaaaaaccatataagacattaaaaagaaatctgaatttaaaattcataaaaa

SEQ ID NO: 385808 - DNA, 532 bp, Cannabis indica
tgatggtggtggtgatggcatcggtgctggagtatccaatgatggaggaggcatagataccgatggtgatggtggcactgacaccggtggtgatggattacgaggagtggttgggggagtagtaccaaggttttgacattgttttctaaagttaggtagccattgtgcagacttgatgctattagaacaattaaccatattaagaatggtaatgcagcattgtggtgtaacaacatagtgtgttgtaacatcattagctctttgtggaaggcatggttgtaaatctcgaaaggttacatgacattgactgaaggctaaagaagaaattgataatagtaaagtaactaccatcaaaatggaattgaacttcctcattattatttttctttttgttttctgagtcagatcaaatcgtatgtgaagttaagtaatgtcgattgattatttatatagtcaatagttttaaattttgattttattttaaatatgtagtcttttctttttatcataatatctagatatttatgtttct

SEQ ID NO: 385809 - DNA, 2106 bp, Cannabis indica
acagaagacacaaacacaatggtcccatctcctgaagcttttagaagagggtgagcaagttgggaaatgttgtaagctgaatcgaaattagtactcattagaaatgacatatcttcagctgtgtactccactgttggtttcctataacatgttcctacattatttatctacaaagagaaacaaaacaaaaataaaaacaggaacgaaatataaaaaacacaaccaaaaggatgcttaaggtgctaacattcatctttcatcttcctcacttgagttgattctctgttatttgagtaattttgaattctaacttctatattatgtttatactatattttcatgtatagaatggatagggtatattcaacattttattataaactttgaggaaaaaaaatttacaataataaagaatcctatttatcttgagccacctaaggtggcccatctgaatgcgccacatagcttgagaactccaaataaacttcaattatatcttaatttagtttaattactatgtttttcaaacagtaatttttacttattaagccattaggtatatttttttaagtaacaatagtagattttaaaaaagtatttattacctatgatgaaatatgatgaaaaatatgtaaattgttagattataccatgaaatgtgtgttgagtttgttatatgtaatcttttatttttttcatgttataagtccaactgtcataactaacatctcgacaattatgacacttggtactccttagtgtttagttagctataaatatagtctctatgttttgtcatagagaaccaagtgtaaaattctcacctcgtaaaaacacattcctaaatcaataaaacagtattttttcagagctcaagtttgtgttgttgtgtctttgattctgtggggtactttcgtgtgtgttatttggagattctttattgtgtgtatgtgtgtgtatgtatggagatgattataggtgtttctcaataggtgatatcagagcttggagattaagaatcagattcaaaggttcaagattcttgaagatcgatccaggaagaaatgggaaatgccaaggttgacatcaaaaagtttactgaaaaaaatgactttggattgtggcgtgtcaagataagggctttgcttgttcaatagggtctacaagctgctcttcttggagaaagaaatctaccagagggattaactccaaaagagtagacggacattcttcaaaaggctcatagtgctctcatattgagtcttggagacaaagttcttagagaagtgtcaaaagaagattcaacaactggagtatagttgaaactagagagtgtgtacatgacaaattcactggctaacaggttatttttgaagcaaaaattgtattcttttaagatgacattagggaagaacattgaagatcttcttgatgatttccataaggtgatactcgatctaaaaatataaagatcacaatcgaggatgaagatcaagcaatcatagtactgaattctcttccgatagagagttatattttggatccatgatgtatggtaaggattcactgacattagaggaagttcagaatgcattaatgtcaaaggaattgaagagaaagatagaatagcaagaagaaagtgttggggatggattgttgatcagaggtaaaactccaaagaaggaaattaagggtcagattaattcaaataaaggcaaccataattccaggttgaagaagagatgctttgtatgtaacaaaactactcatctaagaagagattttcatgcctgaagaactacaattccaagaaagatgatgatgctaatgtagttttagatggagaagaagataatggatacgatagtgctagtgtttagactgttgggttttatgccctaaataaaactccatttcaatgtaatctttgttatttaaatatcaataaagaaacagaagtagtttcatcacttattgtgtcatttggttcatgttatcatttatttgtttatttgatttataaattcatccaaatccttatcacatttatattcttgtttattgtgtcgtcatcacagtggaaagtaatcaagattatgtgattaa

SEQ ID NO: 385810 - DNA, 1379 bp, Cannabis indica
ttctcctaagaaatccaaaaaaaaagtctattaaacaattgaaacccaactctgttgtactcaaaaaaatctaatccccctaataagaaaacaaaaattgttgttgatgttggtgagtcatcatctaagcttccttcaactattttggtgatgttaggaaagttaagagggataatgatgttgatttagttactgggcaacctagaaatgtatatttgatttttttttttgatctagtgttatgtatttcattatttaatttacatgtaactgtgttattctctcttattttttatttatttattttttaggatttttaatttattttttgtttattctttcttgatttgatattatgggtttcattgtttattttataaatatattcgtatatactctgtttttttttttacttatttacatattttttttctatttaggatttttttaagtttttattttgtttatcttttgttcttgatattatttatttatttatattttagtttataacaatacaatcagaggttctggttttatattttgttttttttgttgaatgtttagtttatctgatgttaggggttttctttctttgatttttttacaaacaattgttatatactctgttattttcatgtttttcttaaatttttatttgatttgtagggtttttatcagtttgagcaacaatgtgttgccttaattgataggtggcaagatttatctttcaaaatttttaagcttttttaattttggttttattattgttataattatattttttgtgataaaataaattttgttattgttatcatttttagttttatatgttgtgtgtttcctttcgatatgtttttatgttatttttttttctagttatgtattatttttattttattttttagttcttattactattttattttttaagttatgggataacaatttatgtaaggaagattttcaaactttctgagttacttgtacatgttgttatacaattattgagactcttaattctattttatccactgaacataaggaaatatgtggagaaactgtatttagattcttttaaagactttcttcttatgttttgcaacaccaattggtgtacagttgttgagagaggtggtcgagccgaatgataatgagatgtggtttaatatttcttgtctaatgctaaggtttagcattgaggaatttgctttggcttcaggacttgattgttctggtcaatgtgacaagttgaggtataaacaagaaaaaaatgtgttgaaggagaagatttttgcaggttttaaagaaataaacaataaggatatgtggaaagagcagttgtaacaccctaactaacataggcgtattacgtgatt

SEQ ID NO: 385811 - DNA, 901 bp, Cannabis indica
tttgtatttcacagatcgtcgaaaatctcggggttgtggttttggcagaaccatggcctagatcttgactctttggtgctcctaaggccaaacgaaactcccatcttggtgtcgaataggatgaaggcgatgatactttttggggggaaatccactatagcgatggtttaaaaccatcggttatactacacgccacggtttcaaactgtcggttatatagccaacgattttaaaccatggcctatcgtctcgactatagccgacagttttaaactgtcaaaaattcttttataattaatgatatttttccaccatcgcctattttatctagtattcacgacgctcatatatgcaacgatttttgagaccgtacgttaggaattctttacccgacagtgtaaagctgttgggagttctggattttttgatagtacaaaaattaagttcacaataagccattatttttgcaaagcaaagagcaagcctactgttggaatttattttaccaagatcttagatttactaacaagtatgttgtttaacatcctaaatataaacttctaaaatgataataaacacatataaagtttaggaaaccttacattgggtgcagcgaaataatgtgtctccttccactcagatctctaacccttgtatcctttctgtcgcagagtatcaccaagatctgagtctgaatgtccttctcttcagtttggatttttcacaatcttctagactatgattgagataccacttgatgtgtgtgggcactactctatcactcaaggttttcgaaaattagaagaagaaggtcggctatagaaggatagtgtgtggctcaatttttctgattttcaatctcttcaatcacttgttaactgtgagccatcactatctattt

SEQ ID NO: 385812 - DNA, 728 bp, Cannabis indica
tcaattttctattgaatcaaactttgcaagaatgttaaatatctgctagctctaacttgaatctctccttatttaactgcatacaggaccagttgcagcatattacaaactacctctgaatcgtgtgcttgtgataatttcactcttacattatgcttattgttttgtttgttagaactatattttaaagttttgctggtatgttttgtctccaagctttgcattatttggtatattttatttcattttatttttaatctaacaattttaaagcaagtagatcatttcttcatctgtcctaatttgctattattgttttgataggcataatttgttgacattttgataatgaaagtgataagccatatctatcctcccgtaagtcatatgtcatttttcttctttgatcccttgccaaggtcaaaagagttgtgaaggttggatgaccaatcatgtcaattagtctatattaagtaaatttgttgtgctaggccttttttaattgttcatatatttttctttgtggtaaatttaccatgtcgagttctttgtatgctatgccacaatgggtatgaacattccataataattttattattcattaatagacagtaaaaactagaattagtttggggaggttaactaccaatttaacaatgttatttttcatatatttagttttgttaatttttttatattgattcacattctaatttttcttagttaaa

SEQ ID NO: 385813 - DNA, 769 bp, Cannabis indica
tttatttatttctaaaaaaatgaattttatttacattaaataaagaataaatatcaaatagcttagaacttatctttctttttaactggttcttccaatcttaattgggtaccgcttggtaggagaacaataaaaatgttcttgatatttttaatgatagatgtagttttggtatggtaattcgtgactccacaagtgaggttatagtttctactgtttaacagattttaggtacttgttttttttaaattgcaaaaactttaactttaaaaaatattgccatcaaatgtcgtttgttaggttttcagaatgtgctttttgaatttaattgtttgaatgtggtaatgaaatttaataacaagtttttgttggcttctttaaaattagtccttgcatatatagatatagttttgctgaatttcattttgctatttttttttttgttttaaatcttttaatgttgttattcattctttgaaaatatgtcttgttgagagttattaataaggtttgatggtctcgttactccgcttgtatctataatcttattttttatgagataaattaatataatcaatatcccttccgcattttcttcaagcgttttgcttgaaaggtaatcatttggggtttcttctcaaaaagaaaaagaaacaatgcctcctgaatcattaacttaactatattaaatattggggttttttcaatattatacctaaaactgattttatttataaaaatatctttaagaaaattatttgcacaaata

SEQ ID NO: 385814 - DNA, 564 bp, Cannabis indica
tatatatatatacatatgtgatacctatttggtgaagtaatatacacttctgtgaaactagatccattatatttgataattctgccatctgatatgccagtatatggtcctctaccaagggagtcaaagataattgcttcagggcctactgaagttgatggtaaatacaacctttgaaagttattaagtgtagattgcggtataactatatgtatggaaaaggaaagaaaaagaaagggaatcatgatattgatgatgcccatgattgttgcttgaaaggctttcaatttttcttatattattgataaaggctttcacaagtatttatagggatttagtcatttaatcttcataactgtatttagtcaatgctatatatatatgtataaatatatataagagctgcctaattttaaataaagtttggtaattgcttaaagccccaaatataggtggttattattaattaatatattcatatatttaaagttttttaaggctataatttagaagttgaatttttgtgaggaaagaaaaagatatgaaaaatgtaaaaaaaaaaaa

SEQ ID NO: 385815 - DNA, 1843 bp, Cannabis indica
attcaaattgaagcttcaagattccttcttcttcttctcgactgatcttcagtccttccttcttcttcaataatggttagaacaaaagccactagttctgctactaccactgatgtccctccagtggctgatgctcccatggctcctccaccaccaccttcaacaaatttcgctgacaatccacccaaaacggagcactctgcccctgtttctcgatcaactccggtggacagacctccgtatgaagacattcaatctccatactacttaagcaactctgatcatcctggcatggcgttggtaacccctgtcctcacagatcgtaatttccaaccttggaaacgtgacttcaaactctcaattggagcacgaaataagactctatttcttgaaggtactatccctcaacctccccctaatgataattgttcagttcttgggttaggtgtaatcaaatggttatgtcttggattttacattttgtatctcctgaaattaaaagtcgcatcatgtatcttgagactgcatccgaaatgtggactctattgaacaatcagttcaatcaagaaaatggtccaggaatttttgatttgaatgaaactttgacctatcttcatcgaggagatgattccattagtgcctacttcactaaacttactgctatgtgggatgaaattaaccaattaaggccaagaacaccttgtacttgtgctgctgcaattcagacccaagatcacctaaatcatgatcaggttgcctaatttttaaagggtctcaatgaatcttatcatgcaatccgtgatcagattcttcttcttgatccttgtacctctcttaaaaaagttttttctatggtcattaatctagaacgccaaagaactttaggccaaagaacccttccacctgttgctgctgcaaccaacacccaatctgccttacccgattccacacctgctgctaatgcagcctctaaaaacaaaaggccttgtccccattgcagtaattgtcaaaaaccaggtcactacaaagataagtgctactttctcaggattcccacttggttatggcaatcgaaaacccaatgacaacactacaactcgcaaacccaatcctggttcctcaagcaagaatttcccccaaacatctcaagtttctaccaacatacatgatatcaatccctctcaactcacctcagcacaatgtcaacaactcatctccatgttgacacaacaacttcaacctttaactgatgcttcaacatcaaatgataatactgtcgtgaaccatttttcaggtattacttccccttttcttagattatagatagtggggcaacacatcatgtttgttgtaacaaatcttgtttttctgccattactcataacaccacagataaatatgtcactctccctaatggcacaaaagttcaaattgaacatgttggcactgtcaaaattaacagctgcattactttgcacaatgtcttatttgtgccacagttccattacaatttgttatctattcataaattattacaacatagaaattattctatgcatttcacaggcaactattgttacatccaggaccattctcagacatcgaagattgaaacacctaaacgcattgggaatctttaccatctacagcagcagacaatccccaataaaggctcaccaattactactttgtaacattcatctaaataaaacttcaatgacatacacgccttggacatctatctataatggttactaataaaaatcaataaaaacgttttaatatattttctgaaaatctcaaacacccatttaattgtcctacttgtcatattgcaaaacaa

SEQ ID NO: 385816 - DNA, 4038 bp, Cannabis indica
aacccaagatatgtttccaagagagggccaaaattggaaatttaaactaattttgttaaattgaaaactttcaacacaaaactatgcaattaatcaaattaatgaagtaagtgcaaatatcatggcaagcaaatatagagaggaaataatcaagcttgtaaagtaaagagtttaagggtaagaaataacaaactctcaatttttataaaattcggtagacaaagtcacctacgtccttggccttcaaagctatggacctagctttgagtttcactatcgagccaatttaatgggcttggctaacccttacagccgggaatttttcacaaggtattttcaaacctcttacaatagttttccaccaccatgaaatatcaacctctttctcagattgttgtagagccaatctcactctaaccaggttgtttacaataccggtgtcaacttcaccttaatcacaatttgaaaatgtgttaaaaattacaagcaaactcactctagaagtatgatgatacaatgaagaacctagagtgattaacaagcacacttagaagaaataagtacaattttggctcaaagtgtgtgaaaagtattttattggattttaaacttgtaagctcttaaaatcacttgaatatatttggtatatggaataaatgctcagccaacattttattttgagtgtaaaacaaatttatatagtgcaagaacaaaaactaaccgtttataatcattagcacgtttttcaaaaagacgtgctgggatgaacgatctgccatttaaaaaggctggtcgaaaataaggctgtggcaaaaggtcactttttttgctctaaaatgtgcataactttttactcgtttatccaatttcagaaattttagttttgttctcttacttaaatgatatgtgaagttaaaaatcaatttaaaaaatttagatatcatttttgtgaaataacttgtcgcacaagttagttagccaaatttcataattattttaagtgtgaacttgtatttcaatttacaagattagaaaatgtaaataaaccttcatggagtcttgtattaagttccttgagtctttgagtgcgcttcaggtcactttcgagaattttaataaaattaccattttgtcatttgagttaatttttccttaaaagcttaattctttttagttcttgctacaaaattaacaaatcatcagtaacacataataacaaaatatttgttaatcatcaaaacaaagagacttaagagtttgagtcaataatctccccattttttgatgatatcaaatatttaattattttggaaagggaaatgaaataaattgaaacaatatattagatcagctcccccttaacgtgtgaaagagtttaaattttaattttaccttttagttttaccttgcatgattttgtaaactctccctcaatttaatatttatattcaaataatattattagtccaaaaattgagtttttgccaaaatataaataattattatatatagaatttctattccttttgattcataaaaaagagtggcaaataaatggcgaagaaagagaaaaaaaatgaatagaaagtcacaatacaccattcatgaaagaaaataaccatataacatagattttcaagttcaaacaaccataccatccaaaacataaaaacaaggtcaaataactaaaaaaatacactaacacagagagtcaaaggcactaagccttgcaggcacactaaaagcatgaaaacataaacatgaaaaacatgagaaatgatgctaaaacataatgcaagtgactaagatggtgaggatccaaagcgatccatgtaagccttcattgagtcatttttccttatatattgttaaaatcttgctccatgtctcccctcaaagtggtcatttcgttgtggaggctggtgaattgtgagtttatttaacctttcaagttttgaaattgagtgccaaccgaagtatggagacgataaattaccacatcgatgttgaaatgaggaacttgaggcattggaggtgtttgaggtgtcatttcttctttttcttcacttgcactagaaagcacttagcttctccatgagcttgtggatcttgtctggagtaaacccattcatcctcctcttcatcatacttgtaagacatactcttaaatgtaatagcacctacaacgtcagaatccttgaattctaggacctcggttacatcttcggtggggatacctagaagagaaaacaagtagctaatgagagcaccataagataagtttttattttttttatttttttttattttttttttatttaggcttgtagacttcattgattgttctaatgatgagatagcctaagttattgttttttctttagacaatggtgttagaaagaagaatttgatcaagcgcactagattcatcttagtggccttttcttggaggtagattgttacatatgaaagagtgtatgatttttccttgaagagtgggattgtggcgttttggtttatcaagaacaccttttcctacacaaactctagttgaaaaaaggttgtgattatagttggtatcattcctgagtctaggcctagggtgaagtaagataccttcatttggggaatctaagttcattcaaaaaaaaaaaaaaaaaaatcaatggttaaggttaattttactcccttgatggttctcttgatactataaggattacacttaatttcaatacacgcataaaaagccctcactagcctagggtatatatttatttgagtgcctatcaaaatttctcaacccatatctctaaataaattgctaaactcaacataatcaaggatatctagatcacatttctcaccatagagtatgtctctttttgagaagtcttcagagaatatagtggcaaattttccatgagagaagagctcatgcatagccttggttctttgctcctcttgttgcatagatgatcttagccttttttcgtgccttgatgaggaagcaaccattggataaagtgaagagatgaagagagtgatgagatttgagaaagggatgaggtttgagaaattgatgaagggaattaggtttagagagagagaatgaggtagagagagattgtaagcttctatatagggttagtaaatcaaaatggggagttgcaagtgtttaggataggttttatagcaaaaacaaatggattgaaatgacctaaaagctcatggccacgagttcctgtagaaaacggtctattgttttctcaagtactgggaaaatggtctaccattttctcaatccagtggctaaaaacaaaaaattcgatgacctggttttcacaagcccttttgaccccaaatattttctaacacttaaaatatgataaaatgaaaatgcccattcaagaaagttggaaaaaagttgaaaatgatgatttacggtaagcttttaaaaaattatcgaaaaactagaagcttaccaaaaatgagctgtatacaaccaaattaaaaaatattttcccaacagtttaaggatgtaaaatgtgggtatacaaacttacaaaattgaaaaatgttgaaaataagaaagtttagcaaaaaagactcttttagacctaaaaatctagaaaacatgtagcataccaaaaatttgttgaatgcatatttcagttataacaaactcataggcatattaaatacactcaattagaacatatacacacatactagtcaaatatgcaaaaattcacatgttcacttgtttaaaaacaaatttaaagttcaccaaaagttcacatagtgacctataattttaatttttcaacaagtatagttcaagtaggtcaaacattaacaaattatctcatttatgcataaatcatataaatatcatatcgagagcgaatatgcataaataagtgagtaaagaaatataatttcaatagctagcaaattttatatttcctttaagttggtcatgcctaactctcttttaataaaattaaatctctcatcactaagaggcttggtgaatat

SEQ ID NO: 385817 - DNA, 765 bp, Cannabis indica
aacaaaagagaaacatacagaacgagttataaaaataacgagtaacagcaatatataaagcaaaataaaacactatagtcctaatataaggaaatcaattttttttttctacaatttttccaaaaatgaaaaaatggttttttttttttttcctattcctcacgttttttccctacttactattttctttccccgccatattaattcctacttccaaacatagcctaaatattttaaattggaagagatttgtatgtgtaaatgtagtaggaagatttttgtttatatgaagttagcactatcacaagacacacgtttagttaacttcacacataagttaagaatgttacacctactaaaacattacacttttatatgctcatttcgggcatttccaaatttaacttttccttgaatacatacaatataataattatttataaagaaaaataggaatatttttgaatttgtagttgtagtgttgttgatgtttggtaatattgctaatcacttcattttctcgtctaacatctcaacccaaaaaccgaatattaatgaactatgtatagataattatttatatttgacccataattgatgtaaatatatacagtagaacctttattcaagaatatattgagaccaaataaattatattctaattaaaaggttataactcaatagagttacactagaaaaaaaaaattaaaaaactaaaaaatatcaatgtaataataataacaataaataatcattaatactata

SEQ ID NO: 385818 - DNA, 972 bp, Cannabis indica
atgtttaccccctccccccccaaccaaaaaaaaagaaaattaatggtctcatctgtatttgagaaacttccttggaaattgtgtaactgtcagttacgttttttcatgcacatttacctatgtaagtagtgatgacaactaaagatttaaaaggacatgacaggatccacgtcaggcaggtgcgaaatcctaaaggtcggatcacatgagaaaatatacgtgccatttaatcgtacaaagaagaaactaggaagtccacgtacgaccagacgctcctacatggacttagagtgcaaatgttaccctaaaattacccaagtgacgtggcacgaaacaaaatgacacatggcgttaaatggaatgctagtaggcatgcaacaaatccagaaggtagaagattggacgaattaactggaagacaaggaagtataacgtactatgttaaatttgttgaatcaaccgagacaattcagcattgacgacgaccaagcgtccaagtagttggagtgaactggccaatcattgtgaacgaccaatgaagattaagttgatttctttaaaagaacgttaacaaggtggcatcctgcccgggccatccgaccagaaaaaataatggacttattccaaatccacaatattaactccacaattcctgaggatcaggtcattataggtatctagaatcgtgggattgagcgaataatcatcctttaatgaatattctgtaattaatatcatttattaacttgtaaccccatagatagtggcttatatcactatttagatggatttttgatactcagagagagctattatgctacaaaaacattcatttgaaatcctttggagaatattaagaaattcacttgactctagttcttgtgatcttcatattccaataagaaatactaagaaaggggagtaggttattaccatataattgggaccgaacctctataaaatttttgtgtc

SEQ ID NO: 385819 - DNA, 2367 bp, Cannabis indica
ttggcattttctctaaggcctcctcaaatggtatatcgatgtgtagtttcttgaacacttttagaaattcggtaaactggttatccatgttgttcttgcaaagcctttaaggataagggattttaatatggtgctcaataatgattggcgttgaagcttcttttgcttataggtcttcagtaaccttctcctttctatgcttcttatccatttgtactcgttcctgttgatcctgaccctcttcttcaactggttgcttctcactcggcccctcatagttctccccacttatcaatgtgattgccttgtagttttcttttagattaacttttgtggtgcttggaaaattacctagggcgcagttggccactaatgtagccaattgccccatttgagtttccaaattttcagatagaagaccaagtttcagccatgaattggtttagagcatcagacttaggattggaactgccaccagaattttgttcttaagcgaacttatgaggttgtgtagattgttgttgaggctattgttgattaatattatttctccacgagaaataaggatgattcttccacccctggttgaaaaaattagagaactaattgtttaagcgggggaagttcccaatttcttgggctggctccatggacatattcttaacatccgtaaaaggacattgttcataaacatgaggacccccacgaaactcacaaattgtttatgcttgctttgcttgtgatgtcactgtgttactttgcaattgcttggtcaaagccttgacttgagtagtcaacttagtaatttcattaatctcatgcaaactagccactttctttgaattattcctctcacttggcgattgttgattgttcatggccatttcttctaacaactcatatgcatcattagcactttttctcataattgtcccaccagcatgctgcatcaatgagtgtgcgaatagtttcacccaactcattgtaaaagtaatggaatagcatccccttttctatcccatgttgaggacacttttaaatcaagtctttaaatcttttccaagcttcatagagggactcattgtcaagctggtagaaattgttaatctcccccttaacttagcgacatttactggaggaaagaattttgagaaaaaaattcattgctaggtcattctaggtgttgatcaagttaggtggcaaagacaccaaccaactcttggctcgttccctcagtgagaatgggaataacctcaagcgaatggcatcatcactaattccgttcattttaaatatctgacacaactccatgaagttagacagatgcatgtttgggtcctcaaaaagtagtcccccaaactggacagtagattgaaccatctaaagaatggctggcttaattttaaagttgttagcatcgacagcagtggtcttatacaagactaaacctccatcattgtaggtagcacataatccctcagacttttggcaggtagattgtggccattagtctggtcttctactgtactcccattattaaataaaaattaaaaagagagtgaaaaagaagggaaaaataattcaaatactacatatgtataaaacgttaataatatgtataaaaggcaaagaaatagcttattagattgaagaaagtatttttgatattaaaatagaaaaagaaaggtgtgatttctcatacataccacattttttatactctattgaagatatttttaggtgggttatatattgtggattgtattttttgctatgtatgttttagcttcgaatcacttattgtatctccactagagatgctctaataaaatatgtgatttttcgggagcttattttaaaaacaccaaaaaaacaacaaaaaaagtttatatttttacgatttttttttaaacttttttattgatttttttcatgcacaccgttgattttagattgttgtaaaaaaatacgtttacatgttgtttttacgttacatagaaataatataatgttccaacaacatggaacaatgttgttttctcttttaaaaaaataagtcataatgtaaataagaaatacaattttaggtactttatgacaatttttactttttttatctttaaattagcatatttatatatttttttagaggattgccttatatattactctttatgtgttttttaatgtacagtttggatttctctagtggtttttatgtgggtcgtgatgtagattttagttgcgatttaagttgctctgttagttgctatgtgagtttctatgtagattttcgtaaaaatatatataaaaaaaatattttgaaatgtaaaaataaaaaaattcttatcatttattattattatt

SEQ ID NO: 385820 - DNA, 594 bp, Cannabis indica
gcaccctgcctcctgtgaggaacggctgcagtaagtttgttagtgatgtaatccacgccctcaaccaggacgtcactgtccgcgtcaacccgctccccagcctcattgtatcccccaaagtttgatggtgcaacctcctcctcttcatcctccttggaagcactactagggcagacatcgccctattcctcgatctcctggacctcaccatacccctcatgatccccctcctcttgcacgggcggatcttgttcggccctgggcaaggtggcgtgctaggccacgtgagggtcagccgcgtcgactttacgcattgtctgtttggtatgaggcatcatcctgtggctggacaggaaaattgaaccaaagtgtctgtcgtttgaagaaggcggacttgatcaaagacgaggatgatcctcgtgcaagagttgaagcaggtcctggtcgattcggtgttcgcttccccaaaactcacctgggttcatctacaaaacacaacacgcaagatgagtatttggtcgggatatcgaacattaaacaggaaaatatgtcgactaggagtactcaacagattaaagaatgaaaatatttgac

SEQ ID NO: 385821 - DNA, 1852 bp, Cannabis indica
agtctctatctagggcttccaaacatcataggccgcaacaaaaatgcagtgcttggtttcatcaaaaataaagtcatagctcgtattaatagctgggatggtaagtttctttctcgtgctggaaaagaaatcttactcaaaacagttgttcaatcgttgcccacatatgctatgagtgtttttcttattccacttggtacttgtaatgagcttgaaaaattgatggccagtttttggtggaaaacaaattctagttcaggacgaggtattatctggatgtcgtgggatcgcttagcaactcctaaagatgaaggtggaatgggatttagacatctacatgacttcaatcttgccatgcttgccaaacaaggttggcgattactttgtaagcctaattcccttgctggccgagtttacaaagcaaggtatttccctaattctgactttcttttgtctgatcttgggaataacccaagttatgtatggcgaagtatatggggtgccaaagatttggtgcggctaggtgctcttcgtgttattggagatggtaagagcactacaatacttgattatccttggcttccatcaacaagtagcaaagttgtcacttctactcatcctgggcttcatacacatacagtaagctctcttttaaaaactgatatgatgtgctgggatgatgaagtagtaagagacttattctccccacaagaagcagctttaatcctcgacatccccctgggctccactgccagacccgactgctggtcttggactgcagacaacacgggtaactttactgttaaaagtgcatatcaacttctacagaaccaaaaaccagcaacttcaagaccaaacaactctggtttttggcgcaaattctggcatttgaagatacctccgaaagtgttgaattttctgtggcgagctatagcaggttcacttccaacatgtgtgaatcttgtcacgaaacatgtcccaatatcgtcacaatgccccgtctgttctactgctgcagagacgacaacacacgccctgctgtcatgtaattttgcagaagcttgctggtctagcttcggtcggcctgtaatgttggataacaactcctcatttggctcgtggttcgaaaagctacagcacacgggtgatgttgattttatttgtagagcagcaactctgtgttgggccctgtggaaagctagaaacaaagttgtgtggaataaatataagcctactgtcaaagaagtccttgctaattcttctattactcttgaacattggaggaaagctcaagataaacatgctcttttaacactatctttcaataatagtgatgaaggggctgagctttggacaccacctgcaacaaacaacctcaagattaatgtcgatgcggcgctctatccacaacacaacacttttggctacggtatagtggcaagaaatcatttaggcaggttcatagaagccaaaactagctactgtaatggcagctaccctgctgaagtgattgaagcattagggatcaaggaagctctcagttggataaagaacaagtcatggagaaatgccgagcttgaaaccgacagcctcttatgtgtgcaagccataaaaagcaaccagaagatgtcttctacttttggtatagttatagaggaatgtcgtttgttattatctttattacaggatgttaaattacgttttgttaaacgatcagcaaatcgagtcgcccatgcaattgctaggcactctcgatttatttctgatggttgcattttagaacaagatatctggcccgatttgagggatatcttgttttctgaaagcttttaattcaatgaagttgctattt

SEQ ID NO: 385822 - DNA, 920 bp, Cannabis indica
atttaataattatataattttcactttttattatttaattttgaaaagaaaattatgatattacaaattttgttttcttactatatgaataaacttcattgaaaataatcataatatcaagtatgtaatgcaaatattagtaattttttaatttaaattaatacgtaatattatttgtttatttttttttttctgaaacttgcaatacaagagagttggcttgttctaatatgtcctcacaagtaaaccttctcagggatagtttttcttttaatttttttcatcaaaacgagtatctcttcttattcgataattatttagcacgaacattctatgactgacataagatgtcttactaatcaatccaatcaaagttgtgtcttcattacacgtaatacatgttagattttatgccctaaataaaatctaaattaaatttaatattattttcaactaatcaagctcagaaattatattttgattttatcaatcacttggttcacatgttttattacgagattatatatttaatgtataaattttattaatacgagaacatgtagttattcataattatagtgatcacatcatcacagtaaaagataattatgattatatgctttgaatatttttagtcccttgatttattagtgccactgaatttacactgatgtgattatcagcaataaagtttatttacacttttgttgcacttaacgtcttttctatgacattaagcaagataaacttaaaactggatgtatagggtatacaccgggacgagcccgatattgaaaaatagaatagttactgtaatctaacggttacaactattattgttatattatttgttaaaatataatatagattaaaatatttaaatgtgacaaattacatattaataggagattaatatatat

SEQ ID NO: 385823 - DNA, 1145 bp, Cannabis indica
cgctgaaaggccttaaaaaccgcatctaaagcccatatttatagtagtgtataatgttttaagaaaaaaaatacttcgagaagagctagaactacaacaagtaaaaaccgaataccaggtagcagatgtattcactaaagggctcaacactacaagctttcaaaaaataagagaccaatgaaacttaacacaaagagggaacgagttggtgctgaggggagtattgaagaatcatcaccaactctctagaattttctagagattaactagataaatgtatcattttgggtcaagcacattataataaaagtaattaaaaatggttgagtcttgtgaaatcttcaaaattattttagtaacaaaattaggtagaagtttctagaatattatagtttatttttgagtagtataaatagggacgttgggacctcgagttgtgcatctaatatgaagtgtttcaaaatgtgttcaaaagaggtagtgtaaacaaagtgtcccaaagtgtgagtcatgtattgtaaagatgttaactagtaaataaaagtgtgagtgtttgtgtgttgttgttaccataaaatatttaagtcttggtgtaattacattttgaataatagagcaattatgctttttacgtgttgtcgtgtgcaacatcttcctcttgctctttttaccttgtcttgctcaagtccatggtggatcccttcagttccttatttttgtctttattttgcggctggagaggtccttgatcaagtgaaaaatcgagagaaagaagaaaattcacttgttatttttttatatataatttatttacaaatatttcttgtttttaacattaatgaaaatgacaaggtacacatggaataaaatatgaatctctcttatgtttaacattttagtagtgacatcgaaataaccataatataacatgaagtttttaatctgaaaaaataagtatctattctatataaagtgtgccttatataacagaatttttggttatgagaaattcatgggtgacttttttttttaaggtttttattcaaaaataatatttttttttggctgaggttaaatggaaattagtatagttatttaagaagcatctccaaatagtaaaaaaaaggaagatgacttgcttaggt

SEQ ID NO: 385824 - DNA, 1954 bp, Cannabis indica
ccttgagtaagctagatgaattcattcaccagcaagactcgaaatcccttcgaaccaaatctaaacctccgacggctctactagcaagcttcaccttttttttgtttggcaatccagagatacattcacatggctaattttgagatttggctcaaataccatttgaaagaacaacttatccaaatttcatgattcaatttaccaacttgctcaagattaggttgattaatctcaactttatcgttcaagaatcggattaaagagtaagcagtaaagaacacagtgacttataagcttcgtctgcactgagaacaaatctcagtcgactagtgcttgggttctccaaaccagggtaataacatccactaaatccaaaagattcgtattacaatctccagttcactattaggaatttaatgcaatctttacaacaattagtaatgtattaccaacaacaaccaagattcttggttgtacacacaagattccctgtccagcagctaagttcttcttcgacacttttcttcaatctgaaatcccttcaaatctgatgacaaagatgacactgaactcccttcagtctgaactcagcaccaccaggctctgatctttctagtatggatatccatcaccaagctatacaatcagacctgaaaaatagcaacaaactatacaagataccacacacaatacaacacgatatatctgaactaaccaagattatgaattagctagctaactctgctacataatgaaactagctatttatagacaatagttcaaccgacctaagaacaatttatgccaactgttaaaatataacagactcacgtggacattaaaagaatactgatatacagttataataaattaatagcacagataagattggaatcactattaatataatctgtcaaaacaatgaacctaacacaatgctctaataaatatacattatagaaaatgagaaattgagtttgaaaaccaagaagaataattttagaaggaaattttattttacatgtttaaaaaaatacctcctaataaaattagatttctaattaatttatataattaaatgctattattttcaatctctattaaaaatacctttcctttcatttttctctctttgtttcttccacttcctcgctctctcttcctctttctcgcaccaccgagacacctagacctagacaccgaaaccaccaactaccactaccaaacctcctctcctccaccacaaaatctcctcatctacccaaaactcaaccctacaacctccaaatctcacctacccaaatctttcgctcttcctcctcctccttagcttctctcaaccaccatcgccactcatcaccaccccatgaattgagactgagatagaccactataagctcttcctcgctctctcttcctcttttgaatttgtattgttttctggctaaaatgtgattatcgatgggttattgatagtttatcgatggttgcactgctatttttgtgtgcaaacagaaatcatcgataacatattgataaatgacatcgataacctatcgataaagttaaattgacaaaattgtgttacaatatcataaatcatcgataaactatcgataagcatgttttggccagaaaaaaccataaccacaaccatctaaggtctgaaacaaatacaaatctaaaaaaaaaaaaacaaataaacacgaatacgaagatgaagatgaaggcaaatctggtgagcatctagttgggctcaaggatgaggtcgcattctcagtatggacgacgctcgcagataaagacaaagacaaaggttcgaggcctctggattttttgacaattaagtgttatggaggtccggtcttgggcctttgggtttcgtttgagtttttgggtagataaggaggtttgggtggtagtggttggttgtctcgatgcctggtctgggtgt

SEQ ID NO: 385825 - DNA, 2156 bp, Cannabis indica
tttttgaggtgaatggcctccttgagaatttttgttgatttgttattgtatttaatcttggcaattagattgcccatgtattattagagaagaattaatttgaacgtagttcataaattttatatcttattatggtgtattctttggagacagtttattttggaggaaaattcatttttaattttatttagataaatttagagataacttgaattataattttattttaacaagaattacaaaataactcaaatttacttagactttgtatctttagaaatgtattttcaaattagtaggatttaagagaaatttgtttggacaaaatatgcgtcattttgctctattttcacatatatgtcatttgttaaatatattttcgccatcaaatatttgtgattttgcttcgtgaccaattagacgtatgcaagacatagattctgtaatagattatatagagagacttggaatatattttaaaaaatagatatttatggattcaatgtgaaaattattatggattaaattataaattttttttgaaaaatcctaacataaaaatgtattgttcaagaatttatagttctttattttttctttatttacaatctatttaattaaaaaaagtaatcaaaacaatataataaaaaacatatcggtgtgttataaagtaaatcaaagcaattttaaatagtgtttttatctatagaaaatttatggcaggtactactgtttttacctcatgccatagggaaaaaaatgaaccaatcacagcaaataaattagtgcagttttctttcaaaacaaaaaaaaaaagtactcactaaatttcaaattgaaaaatcttgaaacaaagatatacataacaaatacatttcaaaagtgagcaatttatgaacagtttggtaatatgatgtaccaatatatcacatctaaatagaataagcaagtgtgtgaccatcataaatcatttaaagctatggaatcaaagctcaacacccaaaactttcaaaggattatacaacatagaacaatgtgttaaactgtagaatcataaatatgttcacaattaaccactatcaccacttaaaatcgttctaaatttaaaatcttgatacaaataataaataaaaagcaagcacctcatgctagcagagaaaaaagatttgaattcctactttgatacctcttatctacttgcaaataataaaacaaatggaagaggaagaaccttcaaagtttaagaacccttccagacatcaatacattgggaaggaagatccactatctcacattcactactttgtagtgcagactaatttgcaaggtgtgagagatgatgtcaggtgcagaatcttcctgccacactgacatccaatggttcttggaggtagccgctaagactaaaaatcttagcgaggatgcaagggtaatgccacttgcaatcggactcatggagataagtcctctgtggttcgaccttcatcttaaggccatttacaccatgaatgacttcttagatagagcagatggctttatcaaactagaagaagccatcgcccgggccgagggcttaaatggtggcaagaggaagtcaccggactctccataccccgacactgaggcacaaggcaatgggaagaaaggatgaactaatgtaggtaagagagccaacaatggtggtaagccaataaactccctcgatagagagaagtccaaaactgggggtaggcccttacgagattatgagccttgctttaccacctattccattctcttggccccaagagaggatatctacatggccacatagccaatagtgtcgtattgcaaacctcatcctttcaaagagtcagggaagagggatatgaacaaattctgtcactaccacaacaattacggtcatggcactaatgagtgtaatcaactgaaggacaaaatagaatttctgatcagacaaaaacatgctgctctttagcagtatgttcgacctgaagctctagctgggggcaatataactctccaatctatgctagttgccggcatgctagagattatgattggaggccctcacctagctggaaattcaaggaaggccttagaaaggtatgcaagatcaatatgacatgaactaagagccaaagtgctagaggtag

SEQ ID NO: 385826 - DNA, 886 bp, Cannabis indica
gttttctattcgatagtattatttcacttatctgaagtgtaaattgggttaaaagagactctttttgaccaatatttcgaaatgcgaaaatattactataaagtctataaaaagccatattattttcttaatctacgtatccaagcacatacctatatactattccaacttcatcttctcatctagtagtatctctttactttatattaatccttataaattaatatataatttatcattgctaatatttggttttaagatatatatctgtaacccatatatatatatatatatattaccaaacactcactctatatattctaaccactcttctaaattctaagatggagagagaaggatcatatatattgttaaaattaaccaaagacgttggaattagatgaaaagagtaatagggatttgttgtttctttttggaaggaaagagcgacaagtacgtcggagcagtctcttgggagaaggtgaattgtattggtttccagcaagcctgggacgacgtgcgggacttttcttttacttcttttaacaaaaaagttcccttttcattcctgttactgtttataatcacgtaatttagttatgtgaaaatcaacaacactttattattagaaacatttacaccaaaaatacaaattatacactttattacatataaacttacacacggtcaaatcaacttttttaccttttctcaatattttattacacatataccacatacacatcacatctatgcaccagtcacgtcaactcacctatcaaccatcatgcatccctcaatcacttccctctctctttttcttttgttttcctttgattttttttatttcatttcagttttttttttttttgtaaataacaaataa

SEQ ID NO: 385827 - DNA, 589 bp, Cannabis indica
ttgaaaatttgtgtagtatactatatttgtgttttagtagatttttttatttattttagcatataaaaaagatttttattcagtttttttttatgatcccttatattataattatataaaattacttgtaaatttttaaattttttgattagtatacaatactgaaattaagttcaattaattatttaccaggaatataagaaaaaataatagcgcatacgataaaatatttaaattttatttttaatattttaaattatttaaaaaaaattaaaaatttacaaacagtcttaaataagtataatttggataattataaaaaaaaatagaactaaaaaatttgtttggagaccaaaataaatagagtatattgaaagaaccctatggtgtactgattaaaaagataataaaaaatgcagatcctatatattcttactaataattattttatgattagtttcttattgatccttttttgtttttgttatttttaccttttaaaactaaacttgttgggaaatttacatcgtatactaatttttactatttttttataaaaatactgccaggcggtattttttattttttt

SEQ ID NO: 385828 - DNA, 1004 bp, Cannabis indica
aaaatttatcacgtgtaacttttgtataccgtggcaatccactttggtatttaacagaccaaaatggacggaaggaatgctaaccaaaatgattgtggaagttggggagtttagctataatttttccaatttaggggttttgaccgtgccaaacttcaaaatttagggagtttggccacaaattacccttaatataaatgatagttcattaaactaattatactgaaataggcactacatcatttatcaattaataaactaaaaagaaactaccatttcacttctaacaataaaaagctatagatgttcaaatctataattaacactcccactcaattataatgtcgagttttgaaaatgcaagtattagctacaccatatggtaatcttgtaacgaactaattaaagaactcaaaataacagaactagcttaaagtttaatcatgtcaggattcagatctaataaatctatgataaatcaagtaatattgtcttagaatagttactacagtaaattatgataattattctatttgtcaagatcggtcccgtctcgatgtaaaccctatacatccaattacaaatttatttgttgaatgcctttgaaaagacacaccacttaccaaaagtgtaaataaaccttattgctgattatcacgtcagtgtaaatccagtgcacaaatgaatcatgactttaaatattcgagacatagaattatacttattttttagtgatggcaaaactataattatgaataactatatgttctgaatttaatagaatttaattattaagaataattagtaattttttcccctaaattttcgacaatactgatttggccccctaaaatatacagcttgttaagaataccccctgaacttttacatttacaaaaatttagtcattctgttaggttccgtcctagtattctgtttaaatgctgacgtgtgtttgtaaattagcaactttaccccctaaactttgacaattatcaaatcat

SEQ ID NO: 385829 - DNA, 1380 bp, Cannabis indica
tttgtactaataaaaagacgaatttggtgtaaaactaatttttgcagctatcatggcatacaagacaatgccgggaacaagaagagcacacaaaggggtgcacattatactacatctactagctttgtttgctggaattttagggacatatgcagtattcaagtttaaagatgaaaccggtaccaaagattttgtcaccttacatacttggctaggcatcattgtcatcaccgcatacggtttacaggtaaatgtactaattttcaattccattcaatgctagcaattgtccatgtatcaaatcatgcttcttgaactttgacatgttccaaatcataacagtctgaaaagttcaaaagataattttaagatcctttcttttgagtatgaatatatgtagcttcaataattgaacaaattcagatcctttctttcagttcttgttaggtttcttcacctttttcttcccgggtgctgcaatgccagcaagagcaaacatcctaccatggcacacatttttcgggatggtgatctttctgctggcggtatgcaccgccgagacagggctgcttcaaagattcattaccttagggttaggattgaaccaagaaggactcatagtaaacttcacagggttgttgatcttcctctttgctgtgactgttacactcagtgtcatcctaccaagaaatcattattagtgctaataatttaaataggggtagaaagaattcaacacttgtgttagttcagtatgctgattatttatatctgtaatacaaatttgattaattgttattaaagaactctcatggtcatacagagatgaaatgtcttgagctatatttgctattaaagataagaatgttgttgagattgaagcagttgaccagccaagcaagaaaaagaataaattgtttgtttagatgtctaactaaatagtctctcttgcataatcatttaacactagattgggtgagccttaagaaaataaaaatcatttaacactttatttaaaaaacatatagtattcttgaaaattactgaaatatatatatgtttaaaggaaaaatatttttttagactcttgagttgagtagaccctaggcgcgggcttagttcgctttagcccaagcccaatcctgcatcttaccaattttaacaaggaaaacttataaaaatactgaaatttgggttaagttttacaaaaatactgtcacacgaaaaagttttcaaaaatactgtgtttttataaaacaccagtagaacacaaaacagaacaactcaaaacaacagtagaacaactaaaaaaacaccagtagaacactagtgaaaacttaacacaatatactgcagtatgaaacttataaaaaaatacag

SEQ ID NO: 385830 - DNA, 2239 bp, Cannabis indica
agatgtatatacataaactaattaagatatacatttaaagtaattgtgaaataaaaaaattacaaatattataagtaaatgaaaaaaattacaaatattataagtaaatagaaaaatattaatttttggatatttatacaaagttgatcaattgaatatatattcatatataaatatataaaattaattgggtaaggtattcaattgtacctacaaagagaaacaatattaattatttttggacaaatcggtgtgaatgaagaaatattttacttgtagtattttcttaatgaaatataatatatattgtgtttacttgtagttaataagtatactacttacatagtttgtaaacaatgtgagactcttataaaatatatatatactacttagaagacatactataaaatagataaaatattaatagataaatagtaaaaaaaaatgttcataagatgatatctcatttgatttgtatttttctttatatattgagaaaaaaaattatgtttaatttcatttaaaattttagtttgaatattttttggctaataaaaatatagaattatatatataaaatcttaaaataaaattaactcataataaattgtatattattatatattacatcaaatataaaaaacttaaatataaataatgaaatgtatattagatgaaagataaaaaattaataagacattaaaaataaaataataaaaaactcaataaggtaaaaaaattaaatcaaaccacccataaacaaaaaaatagttttaggattgaattagtatgtgttagagttagttagagtcagtcggtttagatgtctgttaaaatttcagttacaactgtaatattactttcttttgtcacgtggtcttatttctcaatgtaacagtactcagtataaatacaatctcagctcatctttcttattgagcgtctctttcatttcattctctgttctcttcaatttctttctctactttctcgataatcaggctgccgctctgcaatttcaagttcccaacactctgcttccattaaacatccgacttgatcgcaacaattactcctactcgcgatctttaatcatcccctctgtaagggctcatggtcttgaaggtgttcttcgtggtacaactcctcggccagaaccaattcttgcaggtacgaacacgataaaccctctctttgatcactggattcgttgtgatgctcttctaatgagttggctcatgaattctctttccgaggcaatgcttggccatgtccttcattgtgaatctgctgcggatgtttggaccgtctttgagagtctctttgccactcaatcaaaagctcgacaattgcaacttcgcctttccattcagaccaccaagaaagggttcatgactgttgatgaatacatattgaagatgaagaatcttgctgattctcttgcagcagctggacacaaactttcagatcaagaactggcgatgtatattcttggaggagttggtcccgagtacgaaacagtcgtggttctaatgactgctagagctgatgcccttactttacaagaggttcaatacatgttgcagaatcaagaaatgaggatcgaacaaacaactatgcccaatctctcacagtatgacataaaaagaatagtatttataacctacatagataatgcctatataatttataaacaatgtaggacatttagtttcatgtatttttgtagttgtattctaaacaaaataaaaaaaaaatcacaaaattttaaaaatagaataaaaaaaaatttaagatgccatctaaacttattttgtgctttcctttatattatatatagatagattagaaggggtgaatgtggtgtttgtgttttggtagtaaatgacttttttttttctttttgaatgaaagggataaaacattaaaagaaaatcaactggaagagaatacggtaaattaaatcctaaaataaaaccattaaaattaattaatgaatttcaataatagtattatagtttatattatactatagaagtagaattaaaatttaaataaattagaaaattaggagatgagagattagaaaataatgacaattaggctgccacatcaactcttaaaaacactcttttatatatatattgatattgattatattgattctattgaaacattatcataataaatatatgaaatcaataataacaatataaatattaataataattaaatattt

SEQ ID NO: 385831 - DNA, 694 bp, Cannabis indica
aataaataatagcctgttagttaatatattgtcttcaattattcaatttagtttatgcattattattttatttttcattgtaaagtacaaaatggtcatttgtcatttccttggcaaactacttgaatttggattcatttctttgttttttttaatatttattattcttcattttacacaaataaattaataaagacaactcatctaacaactgtaataattaaaacatgcatttttatttatttattttaagtacaaagatttaggtttaatttaagaatcttaaaaagtagtttgtacagcccttttttttaaatggaataataggtttttcttttaatttgtggaataaaagattgtacaactttgataagtataacaaaccaaacatacttgtttatttaaagcaatcatgtgtgtcatcataaccaagtgctctttcttttaaatttttattcattttccatcttttagtcaaatagagggtactttagtcatttactacatctcaaggaatttgaaacctgtggcccaccattgaattgatgattaaatttttgaaatgagggaaatgaagcttaacaaaggcttttttcacaagaacaaaggctataattaattatacacctaaatgttgttgtgataggtttgcttaatcatttctgttttttcatttcttaaaaaaaaaaaaaaa

SEQ ID NO: 385832 - DNA, 2001 bp, Cannabis indica
cccaaacaaaaatatggacttggactcaaacttggacccgagacctgaacccaaatcagaacacaaacttggacccagactgggacctaggacccgaacttacctcgggacttgggatctaggactcgatgcttggacacgacccgtaccccgtgacttgaaattggaaccaaaacaagaagcggatcgggacccaggaataagaccaagactaggacctggacccagacccaaaactgtaactggactaggaccttgactcagacacagacccatactcagattctgtgtctgggttcaggttcgggttggggtctgggtcgggttctaagtcctggtttgagtttagatctaggtctggatcgcggtcttggtttgggttcagctctaggtctgagtttaagtctccggtacgggttcaggattgggtttgggtcaaaatctcagttcagatctaggtaccgggtttcgatcccagtctgggtctgagtttgagtccaggttcgtatccggatcactatatatgtccgagtctttgtctgggatcgggtccgagatttaggtttgggtctgggtctcggtcccagtctgggtacacgaccgtgtctagaccaaagttttggtctcggtttcgatcaagggctaggtccaagttcgattctaggtctgggtctaggtctttttcacagtcctagtcttgttccagggtcctggtccagcagttcttgttcaggttttagtttcaagtcccaggtctaggtctaggtctcggtctgggtttgggtccctggctaggttagggttctagtttgagtcccagatttagacactgactacgagtcttttccaagccccatgtctcgaatcccgagtatagatctggatccttgtcacgtgtcccggtctggttcttgatcattgtcacggaacccgggttcaagtttatgtcttggtccatgtcctagtcctagtctggttcctgttctagttgcgattttgagttcgggtttgggttcgagttcgggttggggtttgagtcctggtctgtgttttggtttgggtcctgatttttgtctaggtctagatcaggctcttggtgtgggttcgggtccaggtccgggtctgagtcccaagttctaatcccgatctgagtccgggtttagtttcaggtccgagtctcaagtttcgatctcaatttgagtttgggtttagtttcgggtctaagtcctgaggttctgatcccagtctaggttcgagttcgggtccaggtccaagtcctaggtttgggtctgattcttggattgggtctgagttcgggtctgtagttttgggttctggtccgggtccgggtttgggtttggtcctggtccgtgtcaatgttcctgttcttgtttgggtctggggcaagtttcgagtccaggtctgggttcgactttggattcttgagtccaggtcagggtctggttcgggttcgagtcttggaattagatttgggtctgggttctgaggcctaggtacctagtctagatcccccatccaagtccggttgctcggtcctggtctgggtctaggtttgagtttgggtcctgagtcttagtttgagtccaggtcccagtctaggtctcggtcccagtccaggtctcagtcccaatcttggtctgggttcgagttcgggttcccatcagggtctggatccgggtcagggtttaggaccaggtgcaagtccaggttcggttcccaagtcacaggtcccagtcctagtcaatgtctacgtccgggttctggacagagtttgtgctatggttaaggtttgttcctggtctcacgtccgggtcctagtcatagttctagttctaattttgggtcagggttttgtttcaagtcttggtcttggtgtagatttgtgtcgaggtctgagtcttagtctgagttcggtacgagtttttcagatctggggttgggtccatgtctgagttcgggtcccaggttcgggtctaggtc

SEQ ID NO: 385833 - DNA, 672 bp, Cannabis indica
ataatttgagaccatatatttttaaaatccaatcacaacactaaaatataaaataaaaagtatatactctaacaaaatagaatattctatttattcttttaataaattataacaattatttaattatagatattattactagttaatcactaatttgtaaaatatatatatatatataaatttgtttttatcatatatagatttaatataatatatttaaatacactattacttgttttacttgttaggttgaaatgaaaatttagaaaacttgaacacaagtttggccatttcagaaatcacacacaatttgtaaaattgaagcaaccaatatcagtattctcattataaaaaaatggaattttctgacttgggataaatttattttcctcgatttacataattaacgcctatttaactattgtaaaacaagtgaaatggctgtcaatttaaaacagtcaagtatacctatatcctcgactgtttagaatcgtcggcaataattagcattgcaaacaatttattatactttatactaatattctttatcagttaaaatatgtatctattctatataaagtgtgcctatataactgaattcttggtttatgagaaattcgtgggtgactttttatttatattaaaaataaaatggtttatgagaaattcatg

SEQ ID NO: 385834 - DNA, 599 bp, Cannabis indica
taaaataatttccaacagaatggccctggtctgacccatctgttctttgcagatgaccttatccttgtgggcagggcgaatattaaggatgcaaaagggttgtggcaatgcttagagaaattctgtagctggtccaggtagaaaattaataagcttaaaacgtcaatcttctttagcaataacatgagtaatggtataaaaagaggcataaagcaagtccttggtctcaactatgccatgggaaacattaattacctgggacttttgttatttaggtctcatcttaaggatttggatttcaacttcattctagaacatcttgtctcgaaacttcacgggtggaaactaaagtctctatccaaagctggtcaggcaatgttgatcaaatcgattggccttgccttgccaatttatgctatgcagaccgcgaatctgtcaaagaaacttgcctctaaaattgatgggatggctagggatttttggtggggttgtgaatagggcaatcgtggtattttttgttgggttttgtgcccaaaataaaactcatttgaatataatcagatttacttattaataaagatcataaataacattttatg

SEQ ID NO: 385835 - DNA, 1042 bp, Cannabis indica
aacaagagtgtatttttgaaaaagctccatttgtatctcaagatgcatgtagagaagtactaagtactcatgacatttctctattaaatattttaaaatacatcattaaatttttatttatttattttatctcaaacttttaatttctatatttttctgttataatattttaataatatatttttagatattatttatttatgattaaattgtgaattttacttattttagcaactaacctccaattcacttatttttttacggcaaaacttccaaactacacttctgttaacaaattaactggccctcctatctccaatttgttgttttgctaatgatagcctaacttttgagttggtatgtcaacgcttttggacagtctgtgaattttgaaaagttttatctactttagttctcggatttttgacgagaataaaggtcgtctggctgccattcttggtgtcactttggttgcttgttatggaaattatcttagtctcccttgctacgtaggtcaaactaagaagggtctttttcagtctctccttaataggataaggaatagactttctacttggaagtctcgttccttctcgcagggtggcatggaagttcttattaaataaattatccattctatccccacatattctatgaatctttttatgctttccgtttctttaatccaggagatttataggttgtgcacgtctttagtgggggtggtaatgagaacaagaagaaactccaatgatgtacttgtgagaaattgtattggcacaagtctgatggaggtttggggctctgggacttaggtcttgaactataattattaaattcaaaattgcaaatcgcaccgctccgcacgattttggtaaaaatgcaaactacaatcgcactgcaaaaaaatttaaactgtattttttatgcggtgtggtgcagtgcgggcggtttgtacggtttaagtggtttgatgaacacccctagagactgtactgacgaaattatagaaaaattaaagttttacaaatattgagtattt

SEQ ID NO: 385836 - DNA, 1154 bp, Cannabis indica
tttttttttttgattgaagttgcctcaaagcaaacaaagagaacaaatagagaacaaaacacaagccaaaagcggttgtcaagaaaaaaacgaaactaggcagaaaatctaacaaactaacagaaaaaaaaaaccaaatgaagaactaacagagtcaataaaaaactatcctacgataagtcattagaacagccatctgcagtggaaacatgcaggaaactgtgaaaattggacggttcaacctccccgaaacgagaagaccggttcgcccatctggccacgtcatgggccacacagttcgctatccttgggatccagcaggcctcccaaagctcgaacttcttagcagtagcatggaatcgaaccactaaattagtaatgttgaaatgcaaatctgaatctttggagaaaacacccttaatggcctccactacgcccttagagtcactttggaagataacatttttgaggcccagtttggctgcctgttcagccccccaagtgagagtgtagagttctcccgctaaaggatcacactgcatgatgcgggttgtgtggatgtcggtgatgctaccatcatcaattctaaacacggctgcaccagctgaactattgacacccatagcaacatcagtgttgcacatgtgccaccctattggtgggggaagccaggttgtgggagtgacctccgttgtgtcttgattctgtatcaattccaatagtcttcgattggtgtgaatgatgagttgattcaaaggaatgcacttcccattgtggactaagtcatttctttccctccatatagtttcgaagatagtggctgctccttccatgaaagtacattttgtgatattaggcggtctattagctcccactttgaactagtgaatccaatcttcccatcccccacagctgggaattgaagttcttatattccagatgcaaccgaaccatatggcacgagcaaagtgacattcccaaaaaaggtggaaggaggtttctacttcaagggaacacattgggcatcggctgtcttggatggggaagagagattggagcctatagaacagatctggaaggtttgaggttaattggattttttttggttgagttatgattttttgaagttctgtctgcaaggaaccggaattccg

SEQ ID NO: 385837 - DNA, 904 bp, Cannabis indica
tgtaaagaaggaggaaagcttgagttcaaggatgttgccctagagcttgttaggattccggtcgatcgggtttcggttgatctttctccaaaccctactacttgttcttcttcttcttctcctaaaaaagttatgcttcaaagtatttgtgaagagtgttagtaataattttgttcaatattcatctaattagttatattagtagttttagtaactagtaatatagtagttaccttttttttttctaatgagtagttacttgttagtttttgatctcttaggaaaatttttgttatggttttttatttaatgggattatttttatcactttagtggtttttttagcacttaattttacataataatttaaagactgaatttttattttaagaataatttttattcacttgctctactttttctttcattttatcactaaccaatcaatagttgagttgggtagattatatatttatatatatttaatataatgaaaaagggaaccaatgacaaatctcatcatataacactttagaattagagtcaaataatgtttgaaattgtttgagaaatagaggtctctgttttgctgcaaatattatttaaattaatgaatgccctttttgtttttgctttcataaacataaaaaagtaaagcttttgtttttgttttttgtatgtgttcatttttcctttgaaaaagtgtattttaggttctggactttttcaaacatatgtagtgaaattaggcagaaataaaagatgaggaaattatactctataccctttttatattgtcctcttttatttttactttcttttttaaaatttattcatttttacctctttttttaaactattgtaccaattttacccatgtcacttcaagatactctccatgtga

SEQ ID NO: 385838 - DNA, 2549 bp, Cannabis indica
tatctattagaaatgaatacttagcttgttaatgagttaaattagtacatcgacttaggagatcccattggaggaatgaaaggcataattatgaattatgtactgtaggatcttatgattttgactaagcagtaacagttggacatacaaagttaataggatatctatcagtacagacaatttatacaataaatgaggatatggagttcatacgaagaaatagtgtactctaatgaaatcccaaaaatgatatctttggctatggtgttaagaattaaagaaggttaatgagaaccatggagattaaagcaaaaatagtataatattttattcctaaaagacaggtaacctgagaggatcaatgaaatattagaaacatgttgtgggcatattttataaaggttagattattttggaataatctcttcccctgatggagtatttatataaaagtgagaattaaatgtactattggttaggtactttaataagtgtggtacgagagaaatattagatacctgttcactggagtaacataggtgagaaaagaatacgatgaactgaaaagatccaaggaatttataaagccatagagtgaattcgagttgtatgctcgcttcattgagtacacagaaaagctacgatgattcaaagcataggaatatcgagttccaaatgggagattttgtttttctttgagtattgcctataaaagagatatgtagagagggaagttaaaacctagattcattagaccttttgatactggagtaggtaggctaggtagcctatcaactagccttgactcctgcattttccagagtgtataacgtgtttcatatctccatgttgagaaaatatgtattggacccgacccatattctgaattgtaacaatttttagctaattaactatatggggaataatttgtccaggttttggactagaagaaaaagtactttagaataagatgattctactagttaaaagtgatgtagagaaataacaaggaggaagaagcaacttgagagttagaatcatgaatacgggagtaatatcgtaaattatttacgtaaattttaaagacaaaatttctataatgagatgatggttgtaatattccggaaacttaaatatgaataattaagatttattctatattatggattaatgaggtagtaatgagtaggattataatctagctaatttaatttagcatcaattgtaaatttagctataagtggataaataagcgaaatttattaattacagagatttatttagaatatgtgtatataatgtaagttatttgtgaaataaaaatattttcaagttcgacgaccctagagacccgattgaaggctaaaaatatcacaatgattttagttagtattattgatgagattattaagataatttaatttaagaaataccaggatattttacggtactcgggttttaccaaatactctagaattagagatttcttagtggttgagaaatagtaaattaattgttattaataatattatattattattattaataaaaatatccatatcagtttaatatatattattaaattttaaaaatttaaattgaagaatgaacgaaaccctcttccttcggtgggacgaaaccctcacctctactatctaattttcttcaaattttaacctgaaacctagtaattcaagcttcgatagtagcgagatagtaaatcattaaagagggagagcttaaggtaaggattggttttgttttaaggttaatacaattggttttatatagtagttttgtgatttagagtggttatggaagttttgacttcatagaattgttcttgggtaaatatggaactagtttcgatgtttacttgctgttgaggtgattttaagttagaaatcgggtttagaactttttaaagcttaagtctgaacgttaatggagttttttatttaagggcttgattttaacttttattgcatcagaatggttgtacttatggtatatgtgtgccctatgaagtttgaagtgatttgaataggtttcggcagcgttttggtgagtgaaaaatttggaatttttgacttttacccctgccaaatcggtccaccggttggtgaactggttaactagttcttggggaagcggttaaccatttcccaaccggtttaccgtttttgggaagtttcaagaaatcgggaatcgtatttttgttgtaacttttcactcgaatgtctgttttggacgttatatataccattttgaagcttgcaatgagctctacattatggtgtgtgttttagagccaaaatataagttttattttaatgtatttgtactacagggtttggtaggaaaccttaaatttccctttgcaactattaagcaacgttttgggataaacacttattggtttactgttgttatgacatagggccaagatcatcggggatgtttctccacttgggttgaccgacatgcatgaatttggatcaaatgtaagaaaagtacattgtactacatagcatgttatattgcaatac

SEQ ID NO: 385839 - DNA, 1217 bp, Cannabis indica
tttttttttttttttcatttgttgaatggtgaattctaggtgttagaagaagaattttggagacaaaatatcggtgatggaaaatgtgaacatgatgttactctatgtgttcttccagagaagacgaaatggcatttaaaactccacattagaagccaagctacaccaccaagagcttggtttgacaaaagagagtggcaggaattcattgagaacaatgatttgaaaattaaggatgtcttaatattcgaattgatcgagaaaactgaagaaattattgtgttcaacattatcatacaccgagtcacccaacaaagccaacaattacaatctcatcaaggttagtaacttaatgatttcttgttggggtaaatatttttagtgctaattctatatacactttgttggtatgatcagaagttgaaggcaacaatatgatatctgaaaccaactccaaagatgacaccagctgccatgctagtaaagacaagccttcatcttcaaaggatggccaatttttcggagaaggaacggaacaatgctgttatcctagtttcgaagtgaaattgggagaatctattgatgaagtacaggtatgaaaatgtcataaatatttaaaaacacgattttattttattttatttgtgtatatgacattttgtagcagattccgaatgattttgtaaggaaacattttgaagaaaagccagaagctgtgaaaatccaggacaaggagaagaaattttgggaggctgatttgagatggagttcagatcaagtgattttatgtgatggatggtctaaatttgcaaggcaaaatgggctacgtcctggagatccttgtctatttcagatggttagcaacgaaatggatcgtattgtgctcaaagttaccgttatcttttatgtttgattacatcacaagtaatcttcttgtatatcctagctagtacaaagaaaaagcttgtgaagtgtgttgatggtgagagacaactctcttcagctaggtgatgtgtgcatctttgagctaatcaagagatatcaaattcacatatttaaacaaatagtttgactcaacagtagtatatatgtagtaattatgcaaaatcattaatattataggaaaattctacaatgcacacccttaaaatggatatattgatgcacccctatctaatttaacatccgaaataattttttagtcaaattttttctca

SEQ ID NO: 385840 - DNA, 915 bp, Cannabis indica
taaattgaaaatatttatcatactgacttgactctcttgatcttcttcatgttttgtcaagaatgttccatttaagtttgcaaaaacttacctgggtaagtcccaagatgtgatccttaaggttgaggacgggaggacctggcctgttaatttctcttatagacagtacagaggttgttcgaaaactgcatttggttgcggttggaaagaatttgttcaagataatgatttgaaagtaggtgatgttgtgcctttgttttgaagaagagcattggaataatattattcgaagtggttatatttgatgaaaatggaagagcaaatctcctgtgttatcatcaggtaaacaagaactgaactctattattctataataataatgtcttctatcgttctcttcacccttaaaatattaaaatgttagaagaagaagaagaagaagaagaatctgatcaagatgtagatgaagacgagaaccgctctctacagaagctgaagagaaaaatgacaaataatggtgaatacacaactgatgagcctgccaagaaacaggtttgtttgttttgtttttgtgaatactaaatattagtgcttataaatcttaacattatttgttaaaaatattacaggaaggtttaaactttgtgcaaaaaggagtgatggtatagttggagaatctgttaatcgaaagaagaagcagatttcaactttgtcctccactcaaaacttcaaatccagaaaaccatatttcaattacaagagacacatctgcaactttatcacatggtatgttttttttacttttttacgattttccaacaacacgaaaacaacaagataactaaataaaagtaacatgaaaataacatttaaattaatttcaaaataacaataaaaaaatcaacaacaaattaa

SEQ ID NO: 385841 - DNA, 602 bp, Cannabis indica
attatatattaccatctcaatggcatggtattttttggttttctttttatgagttgttgaatgttttttgaagtctcctaattaagtacattctaataagatgtattaatggtctaatattttgaaaaacgaatagtacatttttttttttttgaaacagaaacgaatagtacattaacaaacaaaaaacaggactttaatttgcctgtccaactttcaataattacactttattatacatcttaaaagataatgataatgtaagacaaatattcatttacgcatcacccacctaccccacccacccaattgcagaaacattaattcaaagtttatgcatagtactatatctgacataaatttttggttaattaatttttttgtctcgaactttcatattgatatgtaccgtctaaaaatattaaaatgtaaattgcttattcagtagaatctttatccaataatacacttgagccttaagtaaattatattctaattaagaggttataactaaatagagttacactataaaaaaaaaataatagaaaaccaaaaaatatcaatgtaacaataataacaataaataatcattaatactatat

SEQ ID NO: 385842 - DNA, 1709 bp, Cannabis indica
ctttgaaaagtcagggaaacaggaaaaggtcgaaattgaccctgggaaattgatttgtttattttgttggtgtaggggcaagatagtaaaatcctatcttaaatttcctacagatattaaatatttggttgatcttggagtaaaataaaagctatctatggagtttgtgagaaaaattataactagtttacagaataatcaactaaaatttaattaagaaataattagcaatgacaagaattacaaaaaccacacagcaataaagcggagatatatatataaaacagaaataaacaaaatgttagaacaagaaacaattaaagcaataataaaaaataaaatcaacactaaagatatatactggtctaagtcctataaatcgatgtgatttatagacttccgagaaacgctcttccaaaaaatatctaacatttcataatcaaaataacttttggagatctttacatttgaataaactatatccttgatcgagtgagtaattaagctacttctcctaattttcttcatcatcactaaaaaacgtaacagtagtactctacttcgatgcgcatcatataacctaggggacatataagatgtttctaaataataatccattaaatctacaaataccaattaaaagttaccaagataaagatccaatattaatctccagttcttctttggtcaataataatccatgttgttaatatttattatgtggaggaagccagtatctcttcaaatttatccatgatcatggcatgtaaaatattttcattatttcttctattctacatatgcatttaaatggtacatgttagaaagtaggaaaaccatatatgtgtccaaaaaataaaattactaattagtgggtagccaccaataattaatcaaactctctctctcacacatatatgtagtacaattattctatgatatctaatttctgcaatttctctcccacaatattgcaattctattgtaatagtgttagctaagcacatttgcttctacatggacaactaagagaagctcaagggcacatagtcatactttttataatccaccacttactcctcttgtgaaaaaatacaaatctcattagacatctcacatacaataattgaatctcaataaaaaagtacatacctcaaaatatcaaaaatgatacatataacactattgtctaacactaaatagtcttatccttatattgcttcaaaaaagaagcaccaatacattctgttaattgatagtaattttaatgaaaaatctacgtattcattattcaacccttattctttaaaaagaaatggacacatatgcatataataataataatatgatatatttgattattattattattttttgagaaattaaactatttaaatcttatcaaaatttgtaaagtgtttaaaattaagtgcaatatacaattatatacatcatataaaaaaattaaaatttattcacatgctaaaaatggttaacaattgtgtttccaaaaagtgaccatactatattataaagggtaacaattcattaagtcctgaaacacaacacaatatgaatttaacataaattatgcgagttagtattatgaagaataagtataagtcgaacctgaatgaaatgataatattttgggttggattaaactcaatgacataaaattgacacgaatatatttatatatatatata

SEQ ID NO: 385843 - DNA, 2239 bp, Cannabis indica
ttcatcaacacaacaccctattacccaaatcttacactaaaagttaacttgagcttaggaaaaatcaaagagaaagaggctagaatcatctaccttggattgatttgctcaaatctattagaactacacaaaaatgagctgaaaactccaaaccctcagttggtttctttggtgttcgaaagagaaagagaggcttgtagagaaatctaggtttttctatgctttgtttatttaataaataaaaagaatcaattaactaattaacttataaaatctgaataataatgtccactaaagacaaaactcctctagtaaaagaccattatgccccttatcataaaataaaaagcttagtaacatctaagggtaatttggtcatttctaaacccgacaatttctcgatacttccaatgcctaacaatgatgccccgctaatattattctaaatcatataaaatgtgactctctaatgacctaacgtcgtattccactgctaccaaacacaaatacaaaaaataggaaactcacacatagcataattaatacatattgaattataataagtcttcacaaatgtgtaaatcataattaataattcaatctcataattaaaccatgattatttaataatccaatacattaagcattcagaatcaaggtaacattagtaataattgcatatatatacatgttagtgtgcatattagctgtcagaataacatatcagggtatcagtgaggtgtacatagagttgtaccgaaatgctcagaaatatatattaagcaaataagtagctattagattaatatatcaggatattggggaagtgtacatagagttgcactgagatatcaacaaatatatgttaggcttcaagatagtatgaactaattgctactacattagtacgactagagtactgagtataggctgaattcgcggttatcatacttttatcgagaatgtttccgatccagttataagatcgttatttggtgtatgggcacctagttacggtaaattacgatctggatatatgtttatgtttatacttttcttactgagtcagtcgactcacaattattatgtgtatgtgcaggtaagagctagaaatgaactggaacaagtctaaaactggatgaagattgtaaatatcaagacgattagacctagagagttcaggatctttgagacagtttaggctcactttttgttgatcattgggcaacaacttatgtattatatattttgaatatagttgtaaacttttaacgagatcccagagttatgtaaattatgtttgtttattaaattttaagtttttttaagaaaattttaattcatcacatttttccatgaaccctttgattatcaaatgagtgcacagtaaatgagaaaacactgtagcgtgcctgaactagtagggtgttatagctactgaaaagaagattcgtcttgttggcataggtagtacccatcgatccatttaagcccttctcaattgtgtagttccatacctacacagtcttagaatcatcacacttgacatttttcaagagatgtggggttgcatagcttattgagtattcctcttacagatcacgggactgtgactgccacaccattagtgggttaattatatttaattattaatttaggccatcactaatcttacccacggtgtctttatctataaatagagcaatatcctcattgtaaaaggatttcgaagagaagttgaaatttcatctcgatcatcattaagtttagccaacgcaataactgtgagagatttgccattgttgtgttcatacaataactttcagcaatattggattataattctttaataaccgaaccacgcaaaaatacttgtctcataatttattagctctctttaatttgctcatttcatatttatttgagttgttgaatatattgatcaacattcaacaacatttaaatttataaaattattttataatgttgaatgagagttactccctttttcgaaaataataataataataataataataataataacttacactaaaagagcacatagaaacattagttttgtataaaggtgttcataaaatactaaatccaatccaattcgcacgatccaatccaatccaatccgcaaagtgcagatttccgtatttgtgcagattggattggattagaaaattcaaaatctgcacttgtacgaattgaatgttgtttgacatgtaaa

SEQ ID NO: 385844 - DNA, 944 bp, Cannabis indica
acatgtgttcacatattcttaatattattactatacttatatgtattcatgtatatcgtatgaactgaaattgccacgttagtgatccgttgattttctgtgcaactttttataatatatgataatattcacatataattaattgattaatgaaggcactatcacatatttttgtggctatagatgatacaattgtaatgttctcttcatgtatcatcaattcgtatgtatatatgcactagtctttttacatttgtcagcttgtgcaagagttttgattttatgtggtttacacttgtcctcaataaattacacaccacgcggatagtatacctatgtatatcttcttagtgatgactatgcatagtacggtaaatattttcttttaaggaagaaattttttgtgttattttttatttttggatagggagaagattacttattgaaattgaagattgatcacactgcatgcaacattcagttcaaatgatcattatataatattgttgaagtcatcatatatattataacgattaaagagtatttcaaccattatcgatcgaataatcaaaattacaaaatgctagaagataacctaacaatatttatatctttattattactgtaattaagtatgggtatataatttaaactatattgttagccaatcctagtatgcgtgcttaattgtttgagatatatatcttatgcgttcttaattgttacattatccatacgtgttgacaatcaacaatgaatgaatattacatatatattattaaacaatttatataactattaatgataatgttccgaaagaccttaatggccttaattagctaaacaacttaattaatcagcctaagaattaaggccacgtatcaaaggtcatggcaatagcctttccagcaataatgttccgaaagaccttaatatataattaa

SEQ ID NO: 385845 - DNA, 3197 bp, Cannabis indica
attgttataaaaatatttattatgtcttttaaatagaaattataatcatttcaagtaaatttatttaaattttgtaaggatttgtgttataaaaaaatatttatgaagttttttattattttagtatatgattattaaatataaaaatatttaaattttcatgttaatttttttttctcagtaggagttgtgcacataacccaattacaatgtcctttcgtagatgtttacaataagtacaatatacaatattataaaattataaattaggatataatttttctaggttgattaacgtcaccttggagggaaaaaaaacacatgtccccaagatgttgtctctaccctatcccaccaattaattacaaccacatcatcaatttaattttattactcagtagaaaattatgttaaagttaaagaattagtattctatctacattaattattaactttttttctcaagtatttattaattaacctttaatattataaaaattcaagtatatataaatctacattttttgttgagagaaagcatgtaatcaattaaataacatcagctgttacaggagtactaataaatctaggacaagcatccgtccacaattgaactcctaccgaactagtaacagactttgctagttcatgggtcacaccattcgcatcacgcaagatggcacaacaagaaccaccaccaccaccaccagcagcagctaaaagaaaaataatctcctcaacaattgatttaaacataatatataggattcagattattaatccaagagctcacaatagatgaatctgtctcaacccgcatcaccttgtaccccaatctggccgcccacaacagacccgtacacatggcaagaagctccgccaccacaacctggaactctccaaccccacccacagcccacgccgcccacaccacacccccacccccacggataactccaccaaacccagggaaacccctccccggtgtaatcgcgacatcaaccgataacacaaactcacctatattcgacgaaggccaacgtccagaaccgcccacatcaccccccccccccgtcttacccgccccaccactccaccagcattcccaatacccaccccagcaaaggcagcaagagagcctcccaatccccgatgatcagagatcaccgccaccccttgaaactcctccaagacatcctttgctagctttagaatcagatctagtctggactgtttcttcccaaacaaaacggagtttctatcataccatacccaccaccaaatcatagacaattgagcaaacttattctgatcaagtacctcaaataagcagaccaacaactctgctaatggaccagtcctgcatcgatttaaatgactccacacctagagctttgaccacatagggagcaaggaagaacagaacaccaaagcatgctccggagtctccgtatcctcaccacacctatgacaaatcaactgaaccgggacctttcttttgataagcttggaattggttggaagagcccgatgatacattctccagagaaatattttgactttttgtggaatttttaagttccacatgccattccaccaatgagattgattcacagaagaacacccaatcctttcactcaccaaatcaagggccaccgcataaccactcttcaccgagtaacatccattggagttgtaatgccaacaccacacgtctgcacactgtcccatcctcaacggcatgccgagaatgacatcaatgtccaaccgtaagaaatattggcctaaggactgaagatcccaagacccatcattaccaataaactcctgaaccatcacgttaccattaggtgccgtttaaataggtcgaaacgttcgaggtcggggtattcaaggatcacgaaacgcatcaatactatggccatcacccacaaccttcctcatactcttctacaacaattccaacccccaaatgagactagaccacaaatgagaagaaccatgtcgatctttagcttccaatattgaggtatggggataatacttgtgcttcaagacacgaccccgcaaggaattcggcgactgaagtaaccgccaaacttgcttagcaaccgtagcttggttgaaaagcgtcagatctttaaagcctaacccccccttcgacttaggttgacaaacattatcccactttacccaagtaattttcctcttatcacacttcatcccctaccaaaactgtaaaatgattgaacgaagtttatcacacgtcgccacaggcagctgaaacatgctcatcaggtaatttggcactgcttgcagaattgccttaattagaacctcacgccccccagctgaaaagaaacttcgcttccaacccctcaccgttttttgaactttgtcacaaatactagggaaagtctgcttcttattcttaccaataactgttggcaattacaaatacttataatgagtcaccactgaccccaagcctatatacccaatacacttgtacgttccgcctgatgataaatctacattttataacattaatttattaaatatctttcataatcagctatcagtttttttgtttcttcttccaagcattctttcattttcatctctgcgattttggtggtgaagaaaataagtataatatgctatagatatagattgcgttaatattttttatttctccactaataaaataaattattctattaaaatattttttattatttttactttataataaaaataaaatttatcttcttcatttgtttctttacacattgagcaatataatttccatatgttaaataagtagtgtatgtatatatgttatttcatttggatataattagattagataattaagggtatataactcatctaaacattatatatgttatgcattatactgttgttattaatatatttttttttttgcttactctattcttcttaaacatattttcttgcttaccttttactttcacttttgtctttttacttataaaaatgaacaatgtaattggatttttgtgtaattagagggatatactctagtgataggaaaatttactagaatgatggaatggttttgtacttagtataaactattactagattcatggatgacctaatcgtgatcttaagaaaagctagaactgttaaccaaggtttgcatgtttgtt

SEQ ID NO: 385846 - DNA, 840 bp, Cannabis indica
aaaccttaaaagtgggtatctcggtcaaataactgtgcataagataagatcaaataagcaattttttagcagttatatattttaacaattgaatgaaatgtggaaatggtccacgtttcaggaatagttatcaagataaaaacaaatagaataactaccattccttaatccttataaataatggcagaaaccacaagacaaggggaggacaaattttgggagaatataaagatccttacgatcaatacttgtatgatacttgtactctgtataaacaaaaaacctagaaataagatggacttatggactatgaagatttaacttcaaaactacgtaaaatttctttgtttattatttatagtcatctctcagtaatatttaattgtcaattaaggcttatttatgagttaatgaaaaattgaattaacataaagtatttgatgagtttataggttagtttagaagtttttttaatgtttattttgatggatatgtgcctatagtgaagtgtaaggaaaacttgagttttttaactcaaagttagacctttaatgacaacttccataatttgatttgatcatgaattttatcaatttgggaatgttatattaatgctatatgattgctctgtgaagtttcattacttttggttaggtttggaaggtgttggagacaagaaaaactcggggctcgttttttgcagacgaatggcagaccagttttggaaaactggtcaactatttttttgggcaagaagagccaaaacagtctgtcattttaggtaatgtttaggaccttgttttatcatattttctcaatatttagggtattgacatgcta

SEQ ID NO: 385847 - DNA, 1060 bp, Cannabis indica
ttttttttttttttgagtgtgtgatattctcgacacacaaaataatatattaccaccggtaaccaattatgactatgaattcttttatatttttgctaacaaattgctatcttgagtaactagttaccgtcattttaagtaacttgatacttatatttttggtaaccagttatttatatatcttaagtaactaattacatatattttgggtaaccatgtacttatattttgagtgacaagatatttatattttgggtaactaaatattaacttggataaccatctacttatattttggataactgagtactcttggtaacaatctacttatattttgagtaaccaaaaattatcttgggtaaccgtctacttatattgtgagtaactaggtacaatcatgggtaaccagtaacatatattttgggtagccagatacttatattttgggtagttaagaacttatattttggattattaaggacttatattttgggtaaccagatattaacttgggtaaccatctccttatattttggataactagatactctcgggtaacaatctacttatattttgagtaaccagatattatcttaagtttaggtaaccatctacttatattatattgtgggtaaccaagtactatcgtgggtaaccaatcacttatattttgggtaataaggtactcatgttttggcttattatatacttatattttgggtaatcatgtactttattttgtgtgactaggtactatcttagataacaaattatttatattttgagtaatcagatacttatactttgaatgcttacacttttggtaacaaaatacttatatttcaggtaattagatacttatattttaggtaaataggtaattatatgttggctaactatgtaatgttaaatatgtgaaaacaaataaagaaaaaataaataagaaaagctagagagggtggaagaattaaaaaaaaattgaaaacataaattatttttcacagttaagtgtcaacatggactgcttatgtgtgcactcttgtacacgtgacacgtttat

SEQ ID NO: 385848 - DNA, 2442 bp, Cannabis indica
ttaattaacttatccagccaatatatcaactataaatagaaggactcaagttcagaatacttacagcttcagtttactcctcaaatccagaaaaagagaagatgagagagatccagatctagtgagagttactctcgtgttctaaggaaagaaagaaaaagaattagagagatggagagaaaagaacgaggatcggttcgatcctgagaggaagtttagtagtgagattgagagagttttacatacctaagttgaagaagatgagctaccagacgatccatgtgtctaggagctcaaaaactggatgtaatcgttgatcttgatagtggattgtgactattcttcttcgagaaaagctcaccaaggacgtagccccatttttggtggttaataggggtgaacatcggtcggtttggttggttcttttctatataaaaattcagaattcagtttttggtctagattggtgcaatctgaaaaccgatcgactaatccagaacctatatttaagccgaccgttttgaacctcgatttggttggtttaaaccgcccaaaccgaacttcttcttttttctttaaaatatgacccaatttattctataaacatattattctacattttacaactataaacatacaaattaatattcaaaaactaattatcttattcttttaactttaatgttaataaaataataataatatattattaataactacaatacataaagcaaaaaaaagttaataaattaatatataagtataacggtcggtttattaccccaaaaaaaatgaccgttcaatggtgattttaaccgttagcgattttttcagtttttgattccgtcggtttcggctctaacaatatttggtatgtcggtttgaacggttttccagttttctagattttatgctcagccctagtggtgaaccttgtcaaaattgctctgtgtttgctcttgcttacccgagtctctttatttaatttgctgttaattttctagtgcatatttatctaaaaccagctcaagatcagagctggtttttctctcttcttaactttcctcttgaattgtctttgccctaattttgttgtgtccttcgaaaatctattcagacaaataaaattggtaaagaaaattcaaagaataaaataaatccaatacgtgtcataagtgtgtccattgatttagaataatgaaaggtcaaaattgaccttgtgcactaatgtgtgtttgagttgtgtaaggatactagtgtaaattcctatagtggtattagagtcgtggtttaaacaacaagaaaaactcacaaggaggaagagaaggtgatcaagattgaaggaagctgatccttgaaagggaatcttgatcaagaagagtttgaatattcgaactaagaattctcttaaaagaaatttgttatcttttctgaattaactaacatgagcaatataagagtagatataggtttgaagggtctagagattatagaatttggaggagaaagttcagatcattgctagcacaacaaaagttgcttagagtgctagatgatcctattgaatggcctgatggaactactaaagttcagcaagaagagttgcttgaaataagaactggaataatcattttcaatttatctgatgtaattatcagacaagttgacaaggaagaaacccctaccaaaatctagaagaaattagaagagcaatttcagaagaaatctctaactaataagatctatttgaaggagggggtctttagattcaagatgtcaaattctaagactcttgaatagaatctagatgtttcttgagattacttattgaattggctaacttggtgagaatgactcagtgatgaaaaccaggcctgtataatactcaactccctacctgagtcatatagggaagtcaagaatgctataaagtatggcagaacaaagatcaccctggaagaactaaactctgccctaaaatcaaaggatttggagatgaaaactgaaagacacaatagatctcatggtgaactaaatctaagtaggggaagatagtacacaagaaaccatggcacaaaaaggggaggagtacaagtagagattccagcagggatcatctctctggaaaaccaaagtttcaaccaagaagccttaaggatcctaatggtttctaccattgtggaaaaccaagacatctaagaaaggattgctatttctaagaaaagcaacaaatacaaatcagatacacaggacaataactcacagaaatcagatagttacaagcataaagaccattaagaagcaaacgacaatgatggttatgacagtggggaagtctatgtggcacaccctcaggaaaatagtcaagtcgaagcagtcaataagacacttaaagatactttgaaaaaatgacttgaatatgctaaaggaaactggccggaa

SEQ ID NO: 385849 - DNA, 1579 bp, Cannabis indica
aggaaaatttacatatgaacactttaaaatataaatatttacaaatatataagacaaattttattatacccatattttaatattaaatagtctaactaaccaattttataataactatcataccattaattacttttactatagtaatgttttttttcctaacgtatcaataacgttatttttaaagcttttactttattttcagttttagttttatctttttatatcaagtattatctaaatattttctttagaagatttttttctttttcattttatttaaaagttgaattaaatcggctgtttaatatgaattttttgtttaataatatatgtggtcttatttttatctacttgttagtattatattatgatacttattagtatgatatgtaatttggtactaattgtatctaaagtaatgatatgcaattatatattttatggtgtcatattgtactaattggtatctaaatatttgggttaactacttattgttatccacataataatagtaaaaagaactacaaattagtatttatttgcagagtaatttgcggcataaatacttaagttattattcggttgcaatttaatacctaagttaaaattttagcggcataaataccttccgttacactttcagacattctgtacgtaccttactgttatcttgcacactggacaacaggtggcatgccacatcatttaaaataatgccacatcatattataaaattgccacctaatattaactattaaaataaaatatttaatttgattttaaaaaaatatatttacataaaattaattgaataaatttatataatgtaatctgatattaaataataataaacattaatcttttttttttgataatattaaataataataataataataataataataataataataataataataataataaacattaatcaatgttacgttaaaaaacatacattgttcaaaaaacgattaaactgttccaaaaaaaatcaaaaacaaaccctaaaattgtggaagcttaatcggggagagagaaaatggtgggggctggacgataaactctgaccacgaccaaaaattctggcgacaccttcttcttcgactacaggaggagccatcaacgtcgggggagagacaaagtgttgggcgatagcttcttctccaaccacgacaaccaccaacgtcccatttttctcagccaaggttcacaattacatacccatcgcgacttcttgtggtggttcgcaattacatacccatcgccccatttttctcagcctactctctcaatcgttggtcgtggtcggagaagatgaacctcgaacgtaccgtagctgctggagggttgccgtggtcgtctcgcccaacactttctctctccccgacgctaatggctcctcccgtggtcggagaagatggtctggtcttgcaagaagatgatgggttgtcccgtcgtggtcggagaagaactgcagccgccactccctgactatgtttcctcacttttagggttttctatttgtgtttttgtataatatatacttttgattttgaaaatgtttttt

SEQ ID NO: 385850 - DNA, 2350 bp, Cannabis indica
ctctctctctctctctctctctctctctctctctctctctctctctctctctctctctctctctctctctctctctctcagctcatcctctcagtcactctcgatccctctctgtctgtggtggacattgaacaatcggaccacacctcaatccctcaaaaatcattcaactattataatgattaagttgtgttttaaccattttttagacattaggaatagtatgtggtttgtttctgttatatatgtgcgatgtttgtttgaactggtgttattttactatttttttatccgaaatgctagatctggttttctctcagaacctagattttttactgtttatcgatagtttattgattgtctatcgatgtaatatcgatttcttgcaagcaaaggtcagtgatgaccattatcgacatgatgtcgatatgttgttgacatgttgttgataataaacctaattttaagcatcgttgtcgacggtatatcgacatattgtcgataatatttggaaaatattttatggtaatttttatcgattatttgtcacttgtttatcgatactttgtcgatgtttggaatatttttttggtatttttatttgttgatattttatcgatagaatgtcgaccttaatacaaaaagagtgaaaacttttaaacataagtaaagacgaaataaagtgaaaatttttaaacataagtaaaagtgaaactagtaaaaacttttaaacataagtaaagacgaaataaagtgaaattttttaaacataagtaaaagtgaaactagtaaaaacttttaaacataagtaaagacgaaacaagtaaaaaaaaattaaacataagtaaagatgaaacaatcatgaactttaaaagtaacccctaaacgttaaatttaaaagtctcggtaatttgggtgattcatgcaatacacgcacaaccacccaggaatgaccggttcgcctttaacataacctactttgcaacgacagcacccttgggggaaccctaatggtggatatgcaagataaccatccttttcaatgtgttggaacctctatttgttcaccagcctttcacgttcaaaccgttccataaattccaattgctctttttgcagagtgcgaagatattcttcactacgtttctgtttgctctctttactagatatttacaacttgaaagagaagaacactctagggttaaagaataagaaagatatataacttataaagtataagttttcttttatagactagaatagttgttgagaaggtgtgataataaaatgtcaaaaattaattagcattaaatgtccaattgtacacgtaattgtcatgcaatgtgcatttatcgataatatatcgatacgttgtcaatagtttgttatatatatcgacatttttgtaaagtgtctcaaatgcttcaatgtcaagacatttctatcgataggatattgatcgaatgtcgagactccatcgatttatttcactgctcaaaatcatgacacttcttattgatgggatatagatgggatattgataggtcgtcgatcatgttaaatgtctgctatttttagggtttttgataatttttggttttttcttaactaacttttttttttgaattgcaggatcgactatgtttctttttatatcgtacgatggtttttagtgtgttgagggttttaattgggtttataaagccaaaggcagtttgacattgacagttagaactgacacaaccatacaacaatgtcaaacataaattttataccattatttgtgaccaaggtaaggaaagttgggaatctggagcgtactctgcctactaatcctctctttcaaagtgtggtaaggtttttcgttctgaaatagatgttgggattggtgtcaatgatgaggttcctactaatgtagatcaacaacaagaagctattgggctttcttccctaaataaaactctattttaatgtaatattttctattcaattatcaataaagaaacagatttattttcattacttatttagtatgtcatttggttcatgtgatcatttatatatttattttatttataaattcatccaaatccttatcacattgatattcttgtttattgtgtcgtcaacacaatggaaagtaataaaaattatgtgattaaatatattcttatgatttatcagtacacagggtttaattgataggataatctacaatgtagtttacttgcactttggataagtgttatgtcctttccagggcattgattaaagtaagcttgggttggatgcatggagtatgcattggaagtgaccgatattaaacttgaactagatatgttaaacttac

SEQ ID NO: 385851 - DNA, 1132 bp, Cannabis indica
aaaaaaaatatataaaatattggcctcacctaaatttcttagcttcgcccatgtatatattattattagaaaggtggtatctgcatgaataaatttcattatgtcaatcaatagttaattcattctttggggtatttcaactaaatatacaaagatatatattattgttggatttcaaatattaggttattacacggccaatattagaaacccctatatatcgaccattatcgaaactgtgtatatatttatattataattagagggaagttagtctagtctctcaaaacaataattataagaaataataatattattcaattatgaattgtctgtgcatatatataaaatgtgtttatttatttattttttttttggttaaatttacgtacgtcaagttgaccacactggttaggttttgaaaattattagtgtgttaattaattaattaattaatatcctacatttaatgacttaaaataattaagttttgagttacttgggacagctttttctagccaaacttcatctgagaccaattaattattaagatgatttttatataactttattatagtttacaattcattcatcatttccatcgtatatatattcatatatagaaagctagtttccacctctcataaataaataaataatatctcgatcaataatttggtaaggtacgtataggaggtaaaagtaaatttaaaaagaaaaaaatataatttttatttggtaaggcacatgaataaaagtaaactcaaaaacaaaaaaaattgaacccttaatatttatcttatatgttatctagtttaatcattacaccaaaattaatattatgcatataaatattattttttattataaatacatgttataactaattactaaaatgcatatacattttttgcttaatctacttttttgtaaaaaagcgactgtcccacctcgctttctatatgagtcagccaactaactatatatatagctagccacgtatctcaacaaattaacatgcctagtctagcatagcatgccaaaataatataatgaattattaaacgacctaatctataaatatttaattagtttttattttttatatttttattaagagtaatttgcggta

SEQ ID NO: 385852 - DNA, 725 bp, Cannabis indica
actatttttgttaaacaccactgcaatgccctaaggagcacatcttggcatagttgtaatggtcaaccaagtcaaaggaaattttatgccaattagcaacttttcattaataaataataatgggtatgactacattataggcaggttccaacctggaaagaatacaactatagtctattaataaatagtgtttttcttttttctttttctttttttgtcttccatttatcttttatgtgcatatactaaagtgttgttttatttatctgtgctgctacatatattattaaataaaaatttcatgcaagttgatacctctatctatactatatatgcaagtgtgaatggattcataacattataaaatattaccttaaagtaatttatgagcaagaatccaaccatgagaaaggaccatgaaagtaatcaatgtttagaatccccacaccacccaacaataatgatacaactcaatatcatttgaatattcacaatggatatcaatatattggaatctggtttttattagtactttgttaagtgtaaataggcatgttgaaagaattcatgtagttggattgaattggaacttcgatccgatagattatttcttattttgaaacattcggaaatttattagatcttggatcagattcgctctgtcccgcttgattgttttttagatcagatctaattcaatccggtatcaatatattaaaaaaaaa

SEQ ID NO: 385853 - DNA, 511 bp, Cannabis indica
agagagagagagaatgggagagaatagaaagcgagggcgaaagggtaaatttttgcggtcggcttaggatggtggcgatcagaaacggagacctgggctggccatgggggacggaaatggaggtctcaccggaaaatgatttatttttttttagaaattatataactattttttttctaattttttaatgcaaaaataaaataaaatatatgtaaatgaaaaaaaaaattaatatcgataaaagagaagatgagttataattacaacatctttgtaagttttttttgttttgatgattaagaaatatacgattattactaactaataatttattaattttgtagtataaaataaagataattaaacttttttaaagcaaaattaaccctaaaagtaaaacgataattttattaaaaattctttaaaatgactcgaaatgaattctaagatacaaagaactcaagacaagattcattaaaatttaggagaattactccatataatatttttt

SEQ ID NO: 385854 - DNA, 1047 bp, Cannabis indica
tccattatctatcatggttcaggaaaccattttgttgggtatctgtacttccacgaccaacaaattgttgtgcgagaaatttactttgatagcatcctcttcactgaatgttatggtgggttcccttacccgtggcacttttggcttactttcttcgatggccaggaccacttctttttactcatgttgtaaggttcgggcatacctttcttgggctttgcctgaatctccaactatgtgcgggcctccaataatgacttgtaaatgcccatccaccgatggtggcagtaagtcttgattattatctgtctgagcagccctctgattttgatcagccttaacgtattttttcacgtacgggttattctttcttattaaaaattcaatttcccgcttcagattgttgcattcattggtgtcatggccataatctccatgaaaacaggaaaacttggacacatctattttacttatgtcctttttcgtgggagcatgtttcttatacgaagctactaactgaatgcccatgcagatagtctctgaatcctctattaggacagagaaagcagtaaacttggaaggattttctctaggggcctgttcggttttgccagcgaactttccctttttcccattgtctttcctgttgttgttagaccttttacaacccgaacttgaattgcttgggtactgagagtgttgaacggatgttccagcagagggaacttgtggctggttcggtataagctcgacttcagcccactgaatggctcttcaagcttgatgtaaccatctccacgatcgagaaagtcactcattgaatctactgctccatctctttttatgtctttccaaagctctccgagaacttcgatgccccccagtatcgcagccaatttcccttcttcggttaaccgtgcaactttcgtcgcctccatcatgaacttgctgatataagctcggaaaggttctcctggcctttgcttcacttggacaggtcttctaaatgcaacgggagttggcgagaagaagaaaattgtgcatgga

SEQ ID NO: 385855 - DNA, 880 bp, Cannabis indica
ctaaaaaattatcactaaaattagctatttttgtagtaattgttttgtatttaatataatgaaccacataatatggtccattaataataaactctatacacttgtaaaaaccaaaaatccttgtgagattatttaccaacaataataagggtcagaattaatattatttggagtaaaattgataaataataaaccatgtaataataatatttatgatcatcatgatcatgacaagcaagtatataaataagagttttctttttgtagttgaaaattactcatttgacatatacctaaactggaaagactacaattatttacttattaagatattataaatagtgtgattgtattgtatcatataaaaacataatcatgccttataataagagattgtgttgtaaaaacctctcttgtcataaatataaattgtgttatgttactataaaatattataaattgtatcctattgtgttcatatttatattgtcttgttttcttatatgtgttcaaattggtgctcttatactttggttacttttcttgagtttgtagatttggttattagttactaatatgcgaaaatctaaaacaatgtatatcaaataataacttgtcatcaatttacagagtggtacccaatccataccattttcttcagttttaattcgtaaaggtggccatttattaggttttaacttttagatactgttaacaaattttaaatactatatatagtctttaagattttatttataaaaaatatggctttttattattttcatgttatattcttgttattattttgttgttagtgttttgttttttctgtatttttttaatattactttttatgtggttttttattatttttaaaaaa

SEQ ID NO: 385856 - DNA, 863 bp, Cannabis indica
aatttaggtttctctattggagatgctctaagtaagttcttcttccattttgtacataattaagtacacagtacaaatattttatcaaagaaaataataataaaggtacgcagtacaaatacaatctttgtgttgtttatatgtataaataaacaagccttgttcataaaatattcaatttaatttattatgtaagatccaatttaatttaatctacacgatgtaatttaatatatccgcacttgtgtggattgtattgaattaaaaaatataaaattcacacttatacaaattgagtgttgattgacatataaatgtaaccgatttaatcaaatttacatatatattaaaaaaaaaattatatatacaattgatatttaatgtaaaaaataataatttaaaattaataatacgtcaaatatatatttcatttttgtttattaaaaaataaatctataaaaaattaaatattttttagtaggtacaatttttttcttgctttcatgaatttactatttttttattttatttattttaatttattattaaatatataaaataacaatttattttattttattgtaagtaatgtaaataaaaatcttttttaataaatattaaataattcaatataaaaaataatcaatctaaaatattttaatagttttgagttaccaaatttgattggatatccaaataaaattaatacatagtacagattataaatcggaacagtcttatgaataatattacatacaattttctcttttaaattattataaattaaattattgggttacttatttttaaataaaaaaaataacaaattatgagatgttgtcacgtaaagggttatcattcat

SEQ ID NO: 385857 - DNA, 943 bp, Cannabis indica
tttttttttttttttgcaaggggaaggaaacaaacttcaaaattaataatagaaagaaagggtgagatgagaataatttggtgtgtaaaattattgagtggagttggtttgcatgagcagggaacattaatactattaaaacgcgcttttatatatcaatgcccacttatagacatcatcttatcatatattaatcagctgcttttcaccgttgcttcgacgagtgagttcatgtcaaatctgactcctttcacatatcattctctctctctatatatattttgggtcatgttacttttttatcgttatattaatttctgtataaataacttttttatgaagcacgtcagcaaataagctactaaattcgtgtgtaaccagtgttgcatgcgtagctctctctctatatatatgtcaccacttaacaacttctaattcgtttaattgcttttgcttttaaaagaaattatatttaaaaatgttactcttgcgtatagggtgggcatccgatccaatctaaccttttttttttttcatccgatccaatctaattagtaattgaatttgaaaaatcattatccgatccaatccaattagatctcaaaatccaatccaatccgagtaattgaatcggttttttaattgaatatacaattatacacctaaatttcaatattaacttaaaaatatgaagaaaaaaaagtagtaaaaactaagtttcaccttctacagtatttaagtttaatacttatatacatactattcttacaagtgtaatgtagctaaaatttttaaataattaaaacaataacatttttaagaaataaaatagaacaaaatatcatcaaaataaatacacaaaacaatcaaatattacaaatttaacatacaataaaatctaataaaaatctaataaatatctattatatttttcaatattttt

SEQ ID NO: 385858 - DNA, 1297 bp, Cannabis indica
tgtcttggcagttggtaacttgtggctttggataaatgatcacctaattaattaccttaagcattttcaaagaataattacattacacattgtgatttgtcgatataatttgtgatgttggacaccaatgctctttagcaacaaaaagatttatgataagtgtgatacattgttgccttcattaaaatgaaaattatggtgaggttttggtttgcatttgatatttaattatattaataattgatataatacattgtgcatttttctaaaatacaaaggtagacgcttttgaagtttcaaggaggctgcatactaagtttggctctctttcatctctggttttttgccctaggatttctaggaagattttacaatttctaaaaaagaaaaacagagactaattttggtgatgagtttgatgatttcaagttcactgttttatatttttttctctagaattgttgtttcttatgttaggaaaaataataataaaactacttataacttgacaaaacatgttatcgaattggatagttatataatttaattagttgaaaggaatgctatttatcatggcaatgttgttcgaacacccaaggctgttgctcaatatgcaccatcgtacctagcagagtttcaagctgctcgtgctaaacgtccacaagtttatactcaaccagcgtctattatcaagacacctcggcctgcaacagagttcactcatgcacctaaatggacagctccacctcaaggaaggctcaaactaaacacagacgctgtaattgacaaagagcataacattgttggtattggaacaatacttagggattctgatggctatgttattgcagcactatcaaagcctatcaaaggaaatttcaaggcacaagaaatggaggctctaggacttgcgctgagtctgaattggttacttttgcacaatctctcaatcgactacatagaaaccgattcactgctagtagttcaaggattgaaatcatcacatgtatttctttctgtttttcatgctattcttaataatattaactatctagtatccttattcccacgagcacagattgatcatgttcctcgatctgctaatacttatgtctatactttggctaagttaaatatattgaaagtatttttagtgaattgttaacaaagtgttggatactataaacttataccaatcaagagaaaataaacactcaaatatatgaaaattttaatgtatactctattgaataaacaaaacaaaaaaaaaattgctaaatcttcatctaagattata

SEQ ID NO: 385859 - DNA, 928 bp, Cannabis indica
tgcccggaggttttctgctaggtaaaagtgttggctggagtatgccacgtgtaagtgtcacattagatgcgcaaactttgggataacatttgccccccaagttgtcgtatgaatagttgtttggatggggacttttgatacctgtacgggtgctggaagcatgagaggatcatgtggtcaatgctctggtgactgtaccgtgccgaagtgaacgatcacacttttgtctcttcaactaaacattaaatgtcaattccgataatggtagtttttaaagtatattttgtgggaaaacatgctgacgactgcattcccccataatttctttttttgctctttccatttcccatgatgatctaattgggaatcaatttcccctttaattatttttttaggggaatgtaattaaatgaagcctatataaaggcccttctttctcctttagacttttactttcattttttactccttgaaaaagttcaagagagaaaaatcaagaacaacttcaagaaacctaaagcttcttccttcgtcttctcaccgcacaagagaaaaattgcaacttgtcttcatcaccgtctagcctcgcccaggattgggtaacacttaggctactaggtcttgaattcgaagaattgagtttaagaactcatttgtcactctttaatggtgaatttgtgtttttggagaattactgagttttgattaattgtatacattgtattttggttatagaattgttttggaaggcttgagcaggtttgaagaggttgtggttctaaaaaccatagtttcccattctactacaagaactggttaacaggttctacaggtactgtgaaaccggtcaaccggtttgctagcaggggaaaccctagtttttcgttcgaaaccggttttgtttggggtgttttttagagcttggatt

SEQ ID NO: 385860 - DNA, 1548 bp, Cannabis indica
caatataatcagaaatcacataagatttgatgcccccgtatgtatcgtctatttaacatagacctatgtgttacgctcacacatttaatcacattaaggccttagaatagtttatctcgattctgattaccgagtctaacctaattatgccttacgtgcataattctttatatcaacatacaccatatcatattgcattcaaaattatttaaatactagggtaataaccctagaccacttaagcgctaagtttagggtaataaccctaatctcggtttcttacatagcatacacaaatagcatacatgggcgccaccgtgcttaactctacgtgctagtttattgtcttacctaatattgcaagtatgtggagattctaaatccacgagtgttcctgagcaagagcctgtaatcctaatcacacattcctaagattttacatatagggataatcccaaattcaatttcatataaacacataattagcattccatttacagattaacatttagagctcaaaatgagctttccaacgcaagaacatccaaaatggagtcctgagtgaaaagttttatggcaaaaataagaaaccgaaaattcttgaggaaaatagggcatcgccgcggcaagcaaggccgtagccacggcggcaccttccagattgcccacactgcggcgaacccagccatggctatgtaagggccctagaaacccccaaaaattccataaacaaatctcaaaaatgtattttgggccccgaacctagttcagcacaaaatacctgattgtgactgtaccgcgccgacttatcagaaaatacctgcagaaagatagaataaacatactatataataatatagtccataagaacgatataccataaaattacgattttacccttctcggatcaaaattacgaaaatgctcctcacataccaacggggtcttaaagtgcaataaactagaataatttcacatattaaattatatactgatataattccacattaatacatatttaatctagttagggttactaatccgattattaaatcttagagtattacaagttttcttcgaacattatttgacaaatacatgatgatcgtgtaatattccatctcctccatttctgatttttcttctcgtttcttttcagccaataacttctcatcaccaaggactttagagaccttttgatgcactaggatcccttttaaactttctcttcatagcgcaaagtcctcaattctatcaaacttctccaattcgaatctctccattgatgacattaactgtttctttaagaattgcagtggaaataatcttgattatgcattcttggtcgattaccaagctttgatttgtgtgaaaaatatgactaaagtgcataatcaaaataactaaaatttcaatcaccaaacagtttagcaacgacaagattaatgaaacgcaaatagtaatcagagaaaatagggatgaatagagttgtctaagcgattaaataataaaaaaaacactgagatatatactggtttaagtccaata

SEQ ID NO: 385861 - DNA, 1971 bp, Cannabis indica
gggtttgggtccagggtctggggatggtgttaggccgggcaagggttcaccctagaactttgtaaatattataatacaagctaatatgggtcatttattatgtattaaataacatgacttataatgtatgaaaatttatagtcgtaataattgatacaatgtaatattttattcaaacatagtattatttttgttatttaatacaatataattcttatatggcctactaaataattaaactcttaagctagctatattaactcttattagaatggggcctctattagaattgtgctttcaaactttttgattttataatagttttgaactatttgaaatataatataattgattatgtattaggttattcccttacttctataaccgttaaattaatatagttagatcgatcaatacgagtttttctaatgtcaaaattatctaataatttttaaacttgtttgttgttaaatattagtaaatattgttgctaggcatgcttaataggattcaaaatttatagtattgtttggtaatattcaacacgcatgtattgtaattgaataaaataatataataaaagttaagatcctttattaagagttagttccacattattaatgtgtggaaataaattgtgatatataagatgaatggactactcctcccattgctaattagttttgagataaaacctcattcatcttatccccacattctaatatggtatcagagccacttgagatctattgtgagcccaaattgccaccagtccaaacagatacttgcgctctctctcctttaacctgatccattggtgtattaaaagttagtcccatattgctaatgtgtggaaataaattgtgatatataagatgaatgagctactcctcccattaccaattagttttgaaatgaaatatcattcatcatatccccacattctaacatcctttccattaagattgatttactaaaattactaaaatttatttatatttttatttagttaaaaataaattaattgtaaaatgtacataatacgaaacacaattaacaaattaaaagaaagaacaaaatcaagaatataattcaacaaatgaaaactatggtgtttaatttttccatatctttccactctgacgtttaataatactaattttaatttatttttttttcttattatgatggtagatttactaacactattaaaaaattgggctatctcgacgtttctgtgtaccaatctcaacagttacatacaaaattgctgagatttgtgaaaaaaaaaaaattgatttttttttaaaaaaaattgatcagattaaaaaattggtactaataataaaaaaaattgtagaactaatagtatccaatgacctttaatgactggccagacttgatagattaaaaaccaaacaaaaattaatgaagattgaggtagtgaacaatccaacattactatgtaatgtgataattatgaagaggatatctctcatcatcttttctttgagtgttactttaagtaaaaattgagtagttttgaggtggagttcatgctgcttttgtggctacgcgccatggtaatgaagcttttttggttgcgaattaaggtgagaaggataaattcaattgtgcatgtaataatatcattattcatgtaataaatagagtccaaagaattatgcccaaacctgttagtgacacggacagtcaatgatttgatgcctattcataggtgctgttattaaaatatattgttttgatgatttgaatgaattttttgatttaccaacaacggacccagaatttttactttgtaggagcttatttatcattaaaaaaatatttatacctatattataatcactctattagatttatttaattttgtgggggcttttctactattttagtctacaattatcaaattaaaaaattacatttcattttttaaaaggcaatattttt

SEQ ID NO: 385862 - DNA, 674 bp, Cannabis indica
tggaaaatggataaatgcttatactgaagtcaggaatacaagaggctccaagagcttgttacacgtattcaagattattatttcattacaaaataataggagggagtaatgtggcagagattgtacttgtgctgtaatggggctccaattccaaaggtctgcgaccacagtactctgcttaataaattttataatatagaaatttatacagtaaacaaaatttgcctttttttttataatggggaatttcacttattgttattattattttctttgtaaaactgtcatttgttatttttctgtagtgttgttttggaaacaacagaaaaataaaactaagaaattgtagatccgaaaaaatataaacattttgccatttttgggtatttatgaaagggaaatttgcggcaaaagtccccaaaaagttcacgttgatgctgattagtccccaaggtccgaaaatagcggcaatagtcctcaaggtcacactttttatttgtccgttggtctccaagttaacagatctgttaaacccaattcaaatgccacgtgtcgaaatattattggtgggtattattattttaatttaaaaaataaaaataaaaataaaaataaataatttaaattttttttttttctttttctttcttttcttcttcgtcttcttcgttttc

SEQ ID NO: 385863 - DNA, 974 bp, Cannabis indica
attcctgagttaaactccaatctattagttttagtcctacgtagtattttccaaaaatgacatagcatgcaacatgagtataattcaattaaaaaatatattgaattttaatatcaaaatttaaattttaaaataaaaccataaaaaaatcaaatttattctaaaaatcaccaaaaaatatatattgaatttttctaattagaatgaattattaaaatggaaaaattaacagaagataaaaattttcttttttataaccatttttcatgaatgatttttatttttattattattattattttaaagtgtttgatcataaataaaaaagaaataccagtaaactaaaaatctattctgtatatatataagatggagaatttgatcgaatcgttatgctcgcttcaagagtcttcttcttttttttttaaggttctttcctgaatatctactctcaaattcaccacccattttataaaaaaaaaatcagttttacaatccaaaattgtgaaaatgcaaaattgcccacagttgcacaatgacggcgttgtggtgcctggagctttttgaaaaaacatttctttgtaaagttcacgcagtggcgcctccatggcgctattactggtgcaacgcaagtgttgagcgcaaagacacctgacgcccgaaaataaagtttcgtctctttgatttagttccacaccatattttcgatatttgaccaatttgtacattgcaagtgtcaaaacttgaaaccaaagaaaacagacgcaattccattccaaaaagtgtctaaaaagaagaaaattaactctaaaattagcccgaataataagttaaaaatagcctaacaactctttcaatgtcgttatttatttgagaataattatcttttttaccccctgtacttatgacactatactattatgccccttaatctattcagcttgttataaatagtccttgtataattttatatg

SEQ ID NO: 385864 - DNA, 1731 bp, Cannabis indica
tgcttattcatggcaaaaagggttcttttgatctcgtctgcactagggcagtcaagtagattctctgcctcctctgaagtaattctctcttgaaataaaccactgcagtcataggactgcccgttgtccgccccagcgaagatacccttaaagaagtcaataaactctctgccgatacgatccctaccagtgatccaaatattgtctttggttaataaactctcaatggcatttctcctacctttaatagtagccgacagaaagaagaatttagaacacttgtccccatctttgagccaagaaatcctcgctctttgtctccaataggtcgctttcctttcccgggattcgttcaaagatcggcgaaggtcgcactcccggttccagtctcgggatcccgcgggaaggctttgcaaagcgttgagttgactttcaaggtgcttaatctccaaatcaatcttgccaaattgagtgcgattccagtgcaggagagccaccctagtggctccacttttttgaacactcgcgcaggagcccaagagtgattaaccgacttccaagcacttgctaccaccaatctacttctctcatcacgagtccatccttcctcaaacttgaagcatctcttgattttaggctcaaaaccgcccgattggaggaacaaaggcctgtgatcagagttactagtatggaccgaggaaagaatcgctcttggaaaaagatcacaccaagcaccattggctaaacctttatcaagggcagatttaacatgacctctaccataacgatgattatcccaagtcatcttatctccttggatggtcatattgataagaccacgggagtctataagattcgagattatcgggataaaggggtccctgcccgaggacccttctctttcgaaatcactgagaacaaaattcaaatcccccaaaataagccacggaccaccaaatctgtctcccaattttacaaactcggaccaaaattttttctttgcatgcaaatagggggggccataaacacaagagagtaaccacgggtgggaaggagggtccgaatacactaaaccagagatatgattgcgcgagcatgatatacattcaaaaataaaacctgacttccaagccaatataataccaccagcagaaccagaaggcgacacacaaatattaaagtaaaagtggaaagtcttaagagtacgtaccagaggctttggatccacttttagctcggacagaaaaacaaagtccggtgcgcgcgctgctaacagggacttcagttccagaactgtagaggtctgccccaaccctctatagttccaagcaatgcctctcatggctcctgtggaggagattcggcattctcctccaaagggtttcgagagtaagcagacacactggagccagaatcttcaataacaaacgaaccaagaagcgggtttttcataattctggaccggctcagagaagtggaagaattctcagaaggctcttctgacaccaatttagactcattatcaagttgtttagtgtcccaagggaagtcacgaatgactcccggatatttgcgatgtatcttatgcggcctagagcagagtgaagcagaagcttcaaattttcttttcttaaaaggtgtggtcctctcatttacgtccgaagaagtcgggacaccaatatctccaccaatcttgcgaatctcatacaagtctaacttcccaaagtgttt

SEQ ID NO: 385865 - DNA, 1280 bp, Cannabis indica
agtccgccatttctccatttgcaaaactcgtgtcccaggtggttgtctacactgcaagcgcatgtggcagcttcttgacctgcattctcgtttgtgtaacgaccctcttacatgcaaagtcccactttgcaggtaaaacaacccctcattcatagtataaaatgctttgtttcagcttttcaattagttggcataattcatggtttttctttttcttttctaaaagccatttcaaggagaaagttgtgcatcagtgcaagaaggacgaagccaagtggaaagtgttggtaagcaaagtaatagctgcaaagaatgcaaggggaccattcccagctcaccgctccagcttcacatgacactttatatgcccttcattactctcctctctaccagtctccctatacatacacacatgtatataatgtaaatattcaaacatagaaagaaatgacattggagtttcactgaatcatttggcaacttacaacgatacttattttctgttcttttcttttaattcatttctgtcgtagatgaatttatttgatcattgttcaaataatcaacctcaacaaagtgattgaatgtggtaatcactcattcactaacgataggataaagcataaatcttggatattgtatatatacagatcaaataagagaacatagcaccagtaactaagccccatctgcaatttcccatttccatgcactggtgtagatagagaacaactgcatggtcatgagagacagaaaaaaggaggtagaaatgaattaaatatcaaaattaagacttttataaaggtatcctcacttaccattcattattatttggctcgaataaaggcatagccatagttgttgttcaacaacccattgcagtattccatagtcatagatttacccgcaactgaagactgacctcaaactaaaactctgagggatctcattctcatctgttctttaaaccaaaacaaaggtttttgaattttctttgggtctctgtcacaagaagacaaaggtcgggtctcattttcattgggggttttctgattctctatcttctctcagaatacaatgatgacacccattggaattgggatccggaaacagattcttcattcctctcgctactcgtctattcaaccactcctctctcgcttcactcttactcccttcaatccaattccaaaatcattatcttcatccaccgtaaccattcgaacccaatttcaatatacaaaccccatttcgagatttagattccccaataccaagtc

SEQ ID NO: 385866 - DNA, 1159 bp, Cannabis indica
ctataataagtgttaataagtgcgacatttatttatttatcttttgaataataagtgttacattactattctaacaaattgattaatatgtgtcataattatattctacctaagttaattctgcagtttccacgtcaggacatcatgattagtgtccaaaaatttgcgtggcttcgaatttattttcctttaatgaacttttattatctacatgaaaaacattagaaagcattaaattccatattatatgtaatgtgtaacgtaaatatatatttatagaatgctattaaaatagtcattcattggcataaaaatttctttaaatatttgtaattatgtagattatattaatgttaccagggatatctcttaggccgggtgccaataccgcattattagggtggaggaatgtttactttttttaaaaaaaaaataaaaaaatagaggaatgatacttatttctacactttctcaaagtgcacactataatatataattataattaattatgtaacactttaaactttaaagtgagactcccatatgatttcaaaaaaaaaaagtgagactcccatattttaatttatatggttataaaaaattatgcaaaataatgcatatagttcagattttaattattattgtctttcttttttataattgtgtattgtatttgttgattgagattttcagtagctattaattaaagttgtttgaagtaattaatgagtattaaaaaagagaatttttacgtcgttgggagattaatgagtcttagtccacgagttactatattaatgagcgtttttgtttacagagaattttttaaaaatctcttcttctatacattattggagtatttatagctcataatcgtaataaaaggtcaccattgtcgaggttgtatgaaccatgctttgtacaatttcccaaatttaatcttaggacatgattgtttttttgtatgatgtatttgggccaactataagtatttggtgagttgttccacttaggttgatcgacacacctgaattcgaaattgaggtaagattagtataatatcatgcatatgttattacatgtttagcgtacatgttgtttatgcctgttagattacattgatagcagtaatagtatacatagagttatactgattact

SEQ ID NO: 385867 - DNA, 1204 bp, Cannabis indica
gggatttttgtttcacaaagaccatatgcattgcaattgttggaggaccttgggtatctgggatgtaaacctatgaacacaccaatggaagctaatcccaagcttggcctagattagaaaaagcttgctgacccaacattgtacagaagaatagtaggaaatctacagtatttgacaattactagactagatattttctactctgttaacaagctgagctagttcctatgtacacctagagtcactcatctacatgcagcacaaagagttttgcagtatgtcaaaggtagtcctagataggggattttctttgctgcaaacttagatgtcaagttgcatgcttacactgattttgactgggctgcttgtccaaatacaaggagatctacaactggtttttgtgtctttgttgggacatccattatatcatggaaaagcaagaaaaaacatactatttccaaatcatctgcagaggcaaaatatagggcaatggcaaacactacatgtaaagtggtttgactcctctccattctaaaggaactgaaggttgagcatgaagggcctgcactactctactgtgacaacaagtctacacaacatatagctgccaattcagtatttcatgagaggactaagcacatagaaattgactatcatttagttagagaaaaagtgcagcaaaatgtgatcaagatagttcatgtttctacaaaagatctaattgctgacattctaactaagccactattccctaaccaatttaacacatttaaagacaagatgagattgaaagatatctacacgccatcttgagggggagtataaactttgtaattagttggttagttagggagttagttaattaattgcttgctattcttagtaattgagtagtgtgctggttttggtttgtaatatcatgctagtataaatagctgtcattgtttatattgtaagtgaataaattccattcaatacaattctgttttgactctctttcattcttgttcgagctcctttaagctaatagaatatataaaaaaaaattagagaattaagttatcaattctatttttgttcatatataaaatactatgctgccaaatgacatacattgaatctatatatatatatatatatatatataattctgtgtacaagctaatgttatgtggcatcctctcctactaagaattgctaattt

SEQ ID NO: 385868 - DNA, 667 bp, Cannabis indica
tgtaaagattttaaacaactttatactattgagtattgaagatcctcttagtgtcgtcttacagttccatctagggttttgatttgttcagcattcatataaactcactcacatgtaacataagatacataaaattctttttggggatcacaaaggaatatttattgacacacatgcctacctttgccttctgaccccctttgaaaacgacaatagtttgtgagaggaatattttggttttccagaaatacaatagcaaaatccaagagttgatatatctatattggccggcaggcattaacaatgatgatatgtacactgaaagaccatgcatgtgatgaagtattggcaccttcatactgagtacattgcctcttgttcaatctttatatctatattatagggaaatttgaatttccatacttacaaaactccattatttttttcctaaatacatacttactaaaattggtaatatatgacaattttactaattttccaaaactaaccctcccatttgaattcctactctcagccgactctctctctctcaactcaccaacacccaacgccacccatcaaccccaaacggtcacccacgaaacgctcacccacgctcaaccccaaccccaaacggtcaccgacgctcaacccacggaacccgaag

SEQ ID NO: 385869 - DNA, 1045 bp, Cannabis indica
aaatttttttaaaatatttaaaaattcttctgaaacagattgggatttatccatgaattttgctataatttataaaggtgccaagtttaacgtaacatcgaggttgcatattaccaacatgtacaagtacaagtaattctgctttttctgaacaaaacaaaaatctgcgaccgccaatatattatatcattaattaatgaaatcaagatatataatagaatatttggcggggcactactacatcacatatattatcattaatttttgctctcaatgagaattgctaaaaagcaccaaaacactcatggtaccaagcactctcttatgtgtgaatattgctattagtataatttaatattaggtctttaatataacttttaggaagaatctctaacaaatcgtaagacgacacgttttaagagtgctaggcaccactggtgcccaatagtaatgctcatttttaatcataaaagtaattaaggtgtaattagggggagacacacggggtggagaattggtggagaatactctctcgttcgaatcaagatctcttgttagaaagaggtgtcccatactgtgttaaactaatcaaaatttgacacgtcaactaattgtttatttaaaaaaattaaatctttaattgaatcaataaaatagttaatatatttaatataaattatattaattgatgtgtcaacctttgattgatttaacacagtatgagacactaatttttaacaaaagatcttgattcctctcgttcctatctccgttaaggattttaattcccatctccgcttattctccattagaaatggggcgggcaattccctaatggaggcggggaatcctctaataaaaaaataaagtttataataaaatttttaatgtacaaaaatattaaactacataaaaattaaaatattacacattaattattattcaataaattaattattatccaaaacacaacttaaaattcataaaaaagatactaatatactaaaaaatacaaacataaattataaattataaaatattacta

SEQ ID NO: 385870 - DNA, 1735 bp, Cannabis indica
tgcattccactgttaccaggcatcaagcataaaattgacatatagcatatataatactcttggaatttaaatatatctctataattgagaaaatattttcctaaggcctatttctgataataagtcctaatttatactaaaaaccttattaccacaaaatattaattaaatcttctaagtatctgcaaatttcaatgatttaactatgcagtcattacatgtgaagtcttcatcaaattcataaatattttggattggatgatcgataaaaattacaaaaagaatcaagtaacccctgatagacatgaagaggtaattttttttttactcatagtgtagatctaatttatgtaaaagtatttttgaatataacatgcttcctttttatatttttatttgggctataaaaactaatagtatgatgtatgtagtgttgtgtactagaccaaacatttgcgatgaagttaaagtagtgagaaggtataagttaaacccaggaccacaacattggactgcagtcaagaacatcctaaaatatttgaagaggaaaaggaattatatgttagtctataagggtggagatctcaacccgtaagactacaccaactcagactttcaggcttgcgtcgataatagaaaatctacgtttaggatggtgtttactctttctggtgaaattgtgatttgagaaaagcattaagtagtctgcaatcttatatatattcttttatagaggccaagtacttagttaactctgaggctactaaagcattggtctagctcaagaagttctatacaaatcttattaagttttttttttaaaaaaaaaaacaaaaaaaaaaaagaaaagaaaaagaaaacagaaaaaaaaaagaaaagaaaacagttttagcatttttaaaagttgtgctaaaaaaccttggatttggaaagtggaatattagagcatctctaattgtgatggtgatgcttgtagagaatggtgatgtagaagaataattgaacggaataaaaatgtttgaatgtcaaatcaaaaagtaatatttaataaagtcaaaataaataataatatgtgaggtatggttgccaatttggagagtacaaaatattgacatatttttagaaggttgttaaaaataatataacaaatagataataaaatagaatttttttattcttacattttaaagtaatttttattattttttttttttacagaaatccacatgacaatcaacagagcaacttaaatcgcaaccaaaatctacatagtaatctactgaaacaaccactgaagcaacccaaactataaatttaaaaagaaaaaaaaagttaaaaaatagtatatgaggtaattccccttttatattttccattgaaaggtattttgttaacgatatgcgataaaatctaacataattcatttatatttaacacaatttaataatggtcctaaagaactttaaatacaaacttattctctcttcttaaatgaaaatatcaaaagtaaaataaaataaaaatagaagaatgtatactacaaaaagtagaaaattaaaaatattaaaattattttttttaatgtgaaattataacaaataaatcatagtaaattatgtaggtaataaactttaaggctaaatttccttaaaagaaaagaaaactaagagtcaagtatttatttttcactcattattcctacaaatatatacatatatggaacactttttaatgg

SEQ ID NO: 385871 - DNA, 1837 bp, Cannabis indica
gaggaactatatgttagtcgatgttgacctcaaaaaattatcagctgacagctgggtcgtataaatctaacgcttgccacgtgttacacaaatagaattaaaaagtaataaacacatagatgtgttatagaggttcgacccccttatgatagggagaaatgacctactcccctttttgtgtaatttacaccgagggaaacactatctagatcactataggtgggatctactatagcacctttaagattacaaagtatgaattagtaagaaaatctcaggtgttggacaacctagggtgctggccagcctagtgtaggagtgtgagagagatgaagagaagagaggaagatccttgatgggcgtctacaagagagaatatggctttcaaacctaaaactatttagaggctaggtgacttagagtcaacttaaagagcttaggtttctaggctaaggttaaggcctttatgtaggaagcctttaaccctaagcttgcaacttaaatcccttgaaaatattatagttagctagatatttacgtaagatcaaaatgccctagattctagatacttttcagcctatctattgggcttttggggccccattcacagccaatgtctttgtccacgtgtagagttgtacatggagtcttcgtaagtcaatcttggttgtccataggccttgaaggaagtctagctgaccatggccttgccaggtcaatcctgcctgaccatggtcctgccaggacttggcacgacaaggcctacaagggctggaaggtcactatagcttcaccaagaagaggctaacctttgaccgtggaggccaacattttgtaagttgaagacaattttgtacgtcctttccttggagaggttaggctcccttggtcgaacagagtctcattgggtctggaagtcacttcttggcctgctaacttatgtatagatcctggccggcctatagactcaccctggctggccaaggatgttggtacaactccttgtgtggtttcttcactcccttcggtcactgcttgactgttttgatatagcttgcacagaggctctattctactattggcggggttgtactccacaagtactttatctttggcttacgtggacatgccacgtcaggaggacaaaatttgggataacatttttgccccaagtccctattcaaattttgggtcagatatgaactttctagctattttcttgtctatagtagtctctgttcaataaccttatctagccaagtgttggctttttgcctggcatgctttcgtaactttgatcttttctccctatatgcatctcatcttctcctcttaggtatctcttctttatacctgctattaacaagtttcttgctttttaagcttttggcaactttttgattcacatgttagtttgtaatcttttttgtatatagatcctcatgacagttttggaatatgtaatctgtgacttttttattgaaaatattcaattttgggcttcactatgattcttgactcttagagtcataaggaccgtagcctagaagatcttgcttgagaccttgctgaccttaagggttaatcatgggagttggccatctttagggttttaccctttaaagcttgcatgttgatgcctgggtttggtgaccctggccagttcttgactgagtcatgggaccgtagccggccgttccaaggcttgagaaccttttccagtatgggccttggttccaagaggtagccaattttctatcctcttgtgactttggcaagagtttagctctgtaagcatatacaaccttaacctcgtactattggaaattattttacc

SEQ ID NO: 385872 - DNA, 1847 bp, Cannabis indica
tattacattaaattatgtaggatctaatacttattagttggactaataaagatattaacttgtaggatgatgcaagacaccactagtgtcttttagtatttttccaccacctagtctactcatcttatctgttttggtattcttgagaatattttaattcattttctttttcttgattatacatattttgtattttataattattaattattaaattaaataccgaataataaagttgatattaaacgttttacacattcgagtttggtatttttcacaacgcatgacaagctaaaaaaaatataaatttgaacataatacgatacgaataaatatgagcctagacacaatacaaaaaaaattataagtttaagcacgacattacacgaaagtacgaatttattagtacaaaaacacgatacgtaagtacaaaataaaagtacgaattaaatccaaaaaataaatttttgtttagtaattcttctattttcttattaaaaagaattttgtgtaatttttttaaaaaatattttaaaattatatgtatattttctaaagtgtttaaattatttacaaaacaatatcataaatttctaattctacaattttttgttggcttcgtttttttcaacaaaataataaaaaaaatccattgttatatatataaaaaaaaatcgatttattgaaacaatttatttatgccttaaaaattaaaaactaacttggaaatatcaaacaatccatttatgcctcaaaaaaatttcctaaagataatgatgcttgtttcttctcaatgtaagattttaatgaattttctctaaggtttacaatttgttcttctctttatttgaattcgtgtggttaccaaaatagttagaaatatataatatcactgaagtataattgaaccactatcttccacataagaaaaactcttttctaaagatgagaaaaatattcaaaagctttaaatgtaatcctagcaaagtgagtatttatgaacacacatactcatattagccaggtaaaagtgacctaagcccatattaaaagtttcacaaaataaatattcaatttgatataatcagtaggggaccttctataattgaaaaactatgtgaacatagactataaatagaaaaaacctttctttgattttgatgaggattaattggattttttccaatttaaacttgatcacacaataaaactttaataacaattaaaagaaatcggctaataaaagaaataaataaataatttgattttataatattatattatcaaactttgcagatagaaaattttgttatattattcttttaatatttaaatcaattaaaatatataaataatatgtatataatcagccagattaaatgaaaaaataaaatatttttgtcaaaataaaaaatacaaaaataaaactaacagatatatttaagctaaatagtcatgcgttgttaatggacttttggaactttttttttatgaaattttgttaaatatcttaaataattatattgtataatattataaaaaaaattagactaaaaactttttttcttataaatttactcacaccaaaataacatttatctaattactaaaatgttattattgggttataggatgcatcctacacacattttttagggttgcataatattttatttccctaaagaggagtgttaatatagtgttcacgcttcaagcctcaattgggccctaacacccacaaactcatgactcttatacacgagttctttgccctcactcgaacgctttttgggaaaactttctaggacatgtcaagcacgcttaactgtggagttctttcgtgatgg

SEQ ID NO: 385873 - DNA, 871 bp, Cannabis indica
gagagagagagagagagaaacaagcatgatgttttgttcttttgtattttcttgaactttctaattagaataactaagagataataccttaatctcttacataactaaaagccagatgtcaacatgctaaagtgacacctatccctttaaataaaaagacaaaaatgccctctctgtaaatgctaacttaataaatggcttaggtgtaaaatggtctgaaactataacccagcctaatcccaatatctaaaatgtcactaatgaatattcctctaaataaaaaggttttaattaacccatgcaactaatttggccattcgtcgcattttccatcgtcgctgggcaaaaattataaaaaatataaaatttgcatacaaaataaataatatacttagagtttaataaaatctctgaaattgagaaactataactttaactcccaattctaaagatgggacccacaataaatatgagtataaatattcatatataattaataaataacaataattaatgtttattgccctactatcccttaaataatccatgtggtcactacacaagcagtgttgaataaagtaaaataaaaaagcaaatatcagaatcaaagtttttattaagggtgcgtttggaaagccacaatgtaattagatttgtgtgtaattagaggtaattagacaatttggcatgtttgtctgaccatgtaattacactgtaactgtgtaatttgaagcaattgaggggttccaattacactctccaattctcatggaattgaatgtaattacattgtgtaattactaaaaactttccatattaaacattagctattaaaaaatattatttttccatataattactaattattttg

SEQ ID NO: 385874 - DNA, 1383 bp, Cannabis indica
ggtaaaaatctggagacaagttgttgcgtattagactaactgttaaaaatgtgttactaaaaacttgtaaaggcatttatttttttaaaaaaattgaataaattgatagaacagttttttattttttattttttttgaataaaagcattcatagatagaaaatgtttagacctcactgtcattacaaaaaaggttagcaaaaatggaagtagtcaataaacaactataccgcttgtgggtaaaagttcactttactacattatgggctacaagtacaaagttataagctctactaatattagaaaaaatacaactaacaaaaaagaaaaaaatcctattataaaaagaagagtagttattaagcggccaacaagactccttcccattgagagtattaataaccaccttagagtcgctctccacgataatgaacttgcaaccatttcgtttagctgcttccaaagccaagcagcaggcagctgcttccccacacaaaatatcaaaaaacgctaaccgacccgtttgaacccaaaccacctcgctgagatggtttctagctaccgctgcagtgcacatgctatccagaccaactttaacataacagtttagtttgtgccaattctggggaagagggtaccaaatttccaccaagcacggagcaggattagggaaatagaatcatggtgatctgcataagagttatgaatagagttaatacattgttgcacattgtgtagtttattattgttgttaacgactagaactcgtcaacaatataatgaagatttggaactattacttaataaaaaaaaactaataaaagaatgtctaaagtagaaatctcaaaagcatttctattcaaagaagaaaaagcctctctttacaatgaactcaagggctctatttatagtgaacccttaacactttacaattttattagatcccaattcatatgatgtgaagtcactttcacacctgatagtattggattgtaggtggtctgatgtacctgacaccctacgttatactaaaaatacccctgtcattttgtacactggacgaaatgaactttgcccccattatcgttactcaccgtgctgttgttatcttgtctgatactccttacttacattgttggtgtcagtagtgcaaagaagatcgatggggtgcaggaagccaggcgcgtagggatgcggcacaggcacatggcacagagggtgcatgcaaggcgcgtgagtgcatggggcttagagggcacgtggggatgctcaagtgcgacgaggcgcggcgtgggcgcggtgcaggcacagggcgtggcgtgggtgttgggttttataccctaaataaagctccatttcaatgtaatccattttattcaatatc

SEQ ID NO: 385875 - DNA, 1234 bp, Cannabis indica
aagtagggaacctaacaacagttctggatcactgtcgttatctatggagataactgacaagtagagacttgacaacgatcttgggtcactgtcgttatctatggagatgactagcaagtagggaacctaacaacggttccaagttaatgccattatctatggagataatcggcaagtaggaaacttaacaacggttctgggtcactgtcgttatatatggagataaacggcaagtagggaacctaacaacgattctaggtcactgtcgttatctatggatataaccaacaagtagagaacctaacaatggttctgggtcactgtcgttatctatggagataaccgacaagtagggaacctaacaacaattccaggtcattgtcgttatctatggagataattggcaagtagggaacctaacaatgattttgggtcactgtcgttacttatggagataaccgataagtagagaacctaacaacggttatttatattgaagcataataacaaaacatgatataacaatgtcacaaatttgtgccaaatttttgtgcaacaaaacaaaccatatgagaagttctgtcgctaatgttgatggcgatttggattatgaattcaaagtttgagtagtaggattcatcaactaaattcatgtctccgaaactattaccgcaaattgaaagataaaaaaagccaaagtgataactaacaaaagaagaagaaaacatcgattggaataactaacacagcctttgttctagtcggaggctgctgcttcttctttttcttctgatgtagtagtagttgttgttggtcttggataatgtttagcaggcctaaacatttccaaatcaatttcgggactcatttgtaagaataccttaacttcgtagtattttccatccgtacactgcagtgtaagataataataatcgaatcctatttgtatcacatttataatctctctaatctccaaattagcaccctgcacatatatagaaaatcaatacaaataataaactcattatcatatattaatgaagcaaaacaagagtacctcaagtttgttatattcagcaacggctaaattagctgcttcaatagtatatttacaacaagaattgcccaagattttctgataccagttccttttgtgtttattaggaaggtaatcaacatgaaaaccctaaaaatagattagaagaattaatattagatctaataatgaatgtag

SEQ ID NO: 385876 - DNA, 721 bp, Cannabis indica
cactctagactcaccataagagcaaacaagattaccctataccacgttgcactccataggattcctcctagcagccttaggctcttttttaggctcagtctgatcagactcctcctcttggccggccatgggctcctttgcctggctagcctcaagttatttagcttgttcaacttgataaactcttcctcttgtcataagcttggtaatgtttaaaggtagtatattaaaagaatagtctaaatttttaagtatgttttaacaaattttccttttgttttgtatgtattctattttcttgttttgattgttattcatttatttgttccttttttgcaactattggtgtttgcaactatttgtgtaaaggttcacctattgggttttttcagtaagtgttgagaaatctaatttgactgagaaaaaaagaagagaaaaaagaattgtttttattttaattttattaatttttaaattgtgttttcaatatttaaaaatttaaaataattggactaattaagtacaaataggtggctgcaacgtagatttctagttatacttacttgttgaatatgtatttttgggtttatttgatacgtcatattacaccgtattgtattgtattatattatattttatgcaatatgtttatgtgtggtattaatttttatgggcacttaaatatataatattttagtataaattaaagtttaacatagta

SEQ ID NO: 385877 - DNA, 1160 bp, Cannabis indica
agttgaaacaggaaagaaaattttagtgtaatcattaccctctctttgagaaaagtctttttccactaaacgtgttttatacctttcaatctatccctttttagttcttaaaatccacttacaacctattggtttaaaactattaggtaatagaactgactcccatacattatttttctccatcgacttaatctcatcatccatagtttctatttattttaaaaaatatggactattaagtgcttcacttaagtgggaggatccacaaaatgaccaatatcatattctcattctccaaggtaaacaaagttatcatcacaccttattgatttcttttgtcattcagatcttcttagaggaggtgcttctagaataacttctatttattgatcattattttgaattacatcttccacaagtagaatttctctaataatatgaccttcttcaataataggcccatcatcaataataggtcgttcatcaataataggaccctcgtcatctttgatttcgagagcaatatattcatcagcaattggagcattatcaactggagtaggaataagactactataattatcatctcttgaaaaaagacatagaaataaaaaattcccttagatgactctcccaattcaagagatgttgtaggaatgttttctgcaacatcaaattccaaaaatttaggagtttgagattcaataatttgcgtaccatgagtaggacagtaaaagtgatagccttttgagtgcattggataaccaatgaaaaagcatcaaactattcccgtgtctaattttttcaaattaggatcatacatccttacttcagttgaacagtcccaacacaaagatgaatcaaactaggcgttctcttagtctaaaactcaaaaagagtttggggaacaaatttacttgaaacatgatttatgatgtaagtagcagtcatgagtgcttcatcccataagaactctggcagatatgatctactcatcatgcttataatcatgtcaattagagtgtgatttctccttttaggaacactatttttctcaagtgaatcaagcataatgtgttgagcaactatgccattttcttgtaaatattcagcaaaaggccccatgtgttgttcaaattctgtataacgaccataatatt

SEQ ID NO: 385878 - DNA, 1173 bp, Cannabis indica
tttttgttgtgttgaaactaccatgtatgagtgcctcgggtctgatagttggtcgtgtaaactgaagggattgagctattgatgcttcgtacaggaatggtgttggtgctcgacagtccttgctgctggcggctcgaagtagaggctcgcctgggtgttcgtgcgtggctgtggacggaatagaggcagtgaaaatggtgattttgaaagtggtggacggagatgatggtgaatcacgaaatggtgaaggatgcagagttggtggttcgacttattggtgaatcaactgggcagtggttgaatggtcgaacttggaagtggctcggcttgagatggagtgggacgagaacagttggttcgtggtcaggtgagatcgaagtggtgtgggttctcggttcgactgggttgagtaactggaggctatgtgcgatttgggtgctacgggttcgactgggttgggttagctttggatggctcgactgggctcttgaatggtggtggcgatggagtgctggtagtttggtgattcaggttggtgatggagcggctggagatgaggttgatggtgaagatggtgatggtcgaaggtgcgtgggttggtgaatggtgcggctagggctctgagctgaagaaaatattgattttgggagtttgttttctctttttttttaataataatatgtatatactatatttattaatactaaggttataaggaagcaagaaaaatatatttattaatataactataatcttttgtatattttttttttttagtagatatgatattgtatttgtatatatttatatatatattttttgaagaaaaatccctcaatcagtgagaatgcaattccaattccagtacatttagaacccagtactcccagtacagcatcactacagcattgctttagcaatttcattttttagccatccctgcttcagaatgctgaagtgatgctaatcaaatgttgtactgggacctactgcttcaacatgcagatctgctcacactatattgcagcaacctccttttttttctgccattccactctttgcacctgaaatcaagaccaccaccccattgcaaattcattagtaactaaagaattagaattatatatataattatataagtatgtatatatgtatagttatatattttttttt

SEQ ID NO: 385879 - DNA, 1524 bp, Cannabis indica
aaggtcctttttctgtattattttacaaaaattaaatgagtagagtaatttgcggcataatttccttaagtggccaggtttttgcaactaacccgcaattctaaaatttttgtggtaaaacctcttaaactcaacttctgttagcacttagccctttccattcatttttgggtgttaagtgccaagttggaatgtctacgtgtacacagtgtacacgtggcacagtttaattagtccacataataaatatttaaaattaaaataaaaaaattaattattttaaaaataaaaaataaaaaaaattatttttctttaaaaattaaaaaattaaaaattaaaagaagttgagtttaggaggttttacctccaaaattttagaattgggggttagttgtaaaaatttggccacttaaggaggttatgccgcaaataactctaaatgagtactattacattttgatacacattgctagaaattcattatattaatacttaccacatcttctcttacattcataatcccactctgaccacttcaatgtctggattggatttttgctgatcgttccctttgtactttacttaatttctacaatgcaaaaaatacgttagctaccaatacttgcatttaaaagtttatcttagtacaaatataattaatacttgaaatgtaggagttaagcgactttgaacaaatttcaaccagtcattttgtcaattttaggatgcttttcaaagcgtctgccaaccgttgcaaatcattttcttctaatgtgagcataaagatgtccttggttattctattcttgaaattttttattaacttcccaacaacgatcatgcaattatgtttaaaatcatccggaactataaaacccatctagttttaaggtaaacaaatatgtttagagttaacatctgaattaatcaaacacaaatcaaaattctaaaaataattgcttacctatatatctttccaaatttcatttttaagttcaggattaacctgcttccaattttcataggacatccctattatcatacgacatctaaacactaaagtcgatacttgcttggcatagtttctgccatagtactctcctttatcattgacaagaagagaaagtcttttttcttgttccatcaacttggacacttctttcatctcaattctacctcgtttaggtttcgccctggacactctgctactggatccaaatctaaatctgagtctcaacttgagtttgtcatatctacaccattaacaaacaaaatataaagttatctagacaaagcaactacataaattgttgtaagctagaaaatcgatagcagtccataataacacagctttcaaattaaagaattttttttaaaaccatcatagacctgaacaccattctcatacaatagtattaaatcatcaatcaatggttccaaatatatatcaatattatgtttggattattgcaggcctgatatcattaaagaaagcatattaaatttccttttcatcactaacca

SEQ ID NO: 385880 - DNA, 1291 bp, Cannabis indica
tcaagcactttaaagagtgctttctttgcttcgctgtacttctggactgaaatagcatctctcttggacttcaaacttgctaactccgctttacatctgcgaattcttagtttaaagtttccagtgatctccttacctcaaatactcaatttttcagcacatagagagagttttcctgaaagattgctgttagtattttgattccaacaatctttaataatctcaaaacaaaccggttccttgagccaggcattttcaaacttgaacttgcgattaggagtgaattcatgtttaatttcaggctctaacagaatgggacaatggtcagatgaggagatctccaaattaaagagtacaacaagaggaaaaacctggagaaaacgattgttcactagagctctgtcaagtcgaacctccacccaagtagtcgtgcccctgcctttttcccaggtaaaagggtgtcccgtgaggtctaaatcatgaagatgacaatcattcaaggtttgttggaagccagaaattaattgttgaggataccttctgcctcccttcttgtcttcttgtcgaattacattgtttaaatcgccgatgacacaccatggtagatttgagtctctagccaaaaatcgaagcaggtcccaagtgaggtgtcttcggtttcgaactggttccccataaaccccagtcaacctccagtcgcctttctctgctgagtgcaccattaagtcgatatggttattagaataacccaggatactcccttcctcttgatgtttccacagtaaagcaaggccccctgaattcccttgggcctcaacaaaaaactttccttcaaaatctagcattcggccaatcctttccattttaattttatcaccttttgtttcacataagaagataaaattgggtttcttttgagtgacaatctctttaaggaactgaatagcccgttggttcccaagcccacggcaattccaacttaggacattcataattctcggcgggcctgtgaaccagaacccgccccaaaacagttttttgtgagcccaaaaacctcagcacctatttccatatctaccacctctgttatcccagtggtattattgaaatccacattaaaactattattgctatttgcttccagcggcccatgtatgttgtcaaggcccattctcctttttttattttctaatacaataagtgcctcctcagtgttgacttgctttgccttgtcacgatttccttgtatatcaactactcctctgggaccagctctctctttattactcaa

SEQ ID NO: 385881 - DNA, 1127 bp, Cannabis indica
aacttaattattattaaataaaacgcaaaacatgaattatttcctagtatttttatagagtgagtgagatggggtccattacataagattttttttgagcaagtttcttggattattctgtaactaaatttataatatagatttaaataaaaaaaaaaagaaattgagagtcagtgatggacagtgaaagggacatagatactaaaacagtcacatggccattgcctcgtaaaatatcagccgtccacatacaccactgtgtctgatcgtcatcaaccaccagttgcggccccacacacggttgtttactgccacgtggcgatctcttatgtgttagtggcagtgaacgtgtctagtcatttgcccattcaatcgtggccgttcatttctacttgcttgattcaacgaccttttattatggagatacatccagccaccagctggggtcatctcaacagttatcatagttgtacaatattttgcccttcactcagttttttttctcttaaagaaaacaaaattcttcattttcaaattaagtataggttaattaggattttactctttcaattttgatatgtactaaattatattttataaacttttaaagtctttaaaaatatctcctgaattattgagattattagatttaagaatttttgttcaattttaataaaaaaagtctaacatgaataaaagtttaagaaatatgatttaatacatgtctaagttcgaggatataatttagtaaatatcaaaatttaaggagcatgatttagtacattaaaaatctttaaatctaacaatctcaatagttcaaaaaaaatttaatgatcaaaaaaatttaaaaagtatatttaatacctgttaaaatttagggggaacaaattttaattagcttaagtatattttacggtttttgtcaccccaaaagaggaaatttctctcatattatttttttaaataaccaagatacggaaaaaatttcttaaaaaaaaaaaaaggctaattagcaattttcccttccgaattttgacatataccaaataatgctctctgaacttttttagccgttaaaaattctccctgaactattgagattattaaatttaaggacttttgtctaa

SEQ ID NO: 385882 - DNA, 2255 bp, Cannabis indica
ccaatttcatatgtgctcatatatattacataccgtttattattcaaaaggattttaatataaatatatacacacatctatctgccctaataggaatgttcaaaattgagtgttgttttagttagtcaattcgtagaccattttttcagcactagctagtatacttaaaacatatagtacgagccagccaagttgaagtgtacttgaaatgtcgacatgtttggactactcatcaataagcaatcattaggaatcatttctattttttataataattctgtacatttaaatcaacaaacaattgtattacacgcatcatcagtgacattgtttagtgtgttgtgtcttagataactgggaccaggtagtacatttttattttattttttttttgaaatagtgggaccaggtaagtaaagtgaaaaaatgttattttatgctaaagacaaactagagacaagaaaggttgactaatacccttagcatgtttttttttttggaattgctaaaaaagattaatactttctttggtgtaatccaaggtgctgagcactattggtacccaataacaatgtctttttcttttcaggtttcgaggagatatcctcaatacttaaaattatcttttgtaatgaacgtgaagtctaattttcgttctatgaaaccctttattttcaaaaaaaatatcatgtaggggcaagcaagtaacactagtagtagctgactacactaatgagactctaattactataacaatttatcaactgtaggtcaggaaacagtttttgatatttttcatgacaatagttggacataaaaatatttaaaggatgtaatatagagttaaaaaagatataactattaaattttatccatatagttatatacatatgttgttagcatatacacatcaatattcacgttctcatgattttaatattaaaacttattagtgtgtttctttaattagtggctgatcaattcttagaccaacttttagtactagctagccatatacttgaaaaacatgtagtactaaggtaaagtacttgaaatgtcgacatgcttggactactcatcattgagcaataattaagaaccattcgtgtaatttaatattcctttttattacatttaaaccaataattgtgttatctacaatactcaagaatgttcagtgtaatagtaaaaacttggtgatggtatgttaattttcatttcaatttttaaatgcgaatctattatataaatataataatgatattccaatccaaaaaataatttaggtggggtttagttagaggtaaaattataaataaaataaaaaagaaataattttttattatatttctttatttggttgcattttaaagtattagaatgtcttttctaatagaatgtcctttctactattttggtggaataactatatttcattttataatatgtaacatgagaaaaaatattaacgattttttatcaattttttatgcatttcaaattttattttattctattcctattccaattcttatattttcattcctcctaatcaaacgtcattatctgaatatttatcacacaacgatctttcaaaattttctttacatctcaggatgtgtatctatcattccaattttaaagtctttaatgcatataatcataaggacaagtttgatggggtgttgttgagttgcttgtcaagtatgatattagggttgggatgaggtggaggagagaggataaaaaaaatttgtgagttaatattgtactgtggttacaacgctcactattttatttttttaataaaagaaatacgttgattggttaccttttgttttagatcctctatagtaatttattaaattgcttccgttaataatgacctaatattcagaaagtagtgataattattaaggtattttgtttttttttttaaaaaaaaaacattttgttttaatgaaaataacttcatgaagataaatctacaaactaagcagatagaacttatgtcttgattattaataagtaactagaatcaatggtaaagtaggtattttcttacatttgattacttaattaaacatgttctataaaactgttttcactttttcacttaattaattgagaatcaaaattttaaaaataaaaccacggccctggcgctaaacccgacctccaactcgaatccgaattcgacccgaacctagacctgatttaaataaaataaaaaaaaaatgaaaataaactttaca

SEQ ID NO: 385883 - DNA, 4195 bp, Cannabis indica
taattcaataaatgtaagttattgacggtaacaaaatcatttagaccaataaatgaataaagatattaattataattgtgtcaattatttttcatactatactaagttatgactttaccgttaaaaatgtgtacaaaggctctgctcaagccataaattcgaatagacaaaaatttaaattgtgcagtacaagtgaccaagagtcataagtcagctcggtcacttggggtgcaactttacccgtactaagcatagataaataacaagctcaaaaaaaacacaacaatttgaatgtgcaactactgaaacttaaggaaacacattcattttaaaagacaacaaagcacgataaaccctggattaaaggctacccgaccttaaaggctgcttggtcgaccacattgtactaaaaaaagcccatgggcaaactgaaataaaaaaatagaagatagaaaaaattcacacggttggagtccttggctctttgtatgggttgactttgtactcagtggctagggggtcaatgctttggctggtgagaccttcagagttggttccctcggattcgtctgtggattttggggcctaaaaaaaactaagatatgcctcatttttttattgaggtaattaaagtttgcatgtgggtttgccttccaaaactcatagaagacatctagggcgaccgtctcctagttatccacctccttttgaaggacctcccgcttcgccttctcagagttaagattgtgttccaaatcttatttctccttggttaagttagcaagaatagtatggagaccttccctctcatcttttaaggcattaggatccttggtcagagcctcaatgtaagcttcgaattgaatagtggacggtatatccttgatctcctgctacagttcctcaactcgcttgatggcagccaaaagttgcttattcacctcgcccagattcacactcttttcctcagcctccttcttggcatcgtccacctcccacttcaagttggtggtggttgttatagtctttaaggccgaagactttgcttgggagtaggtgtaggccatcttcatgatgagctgcacaaagaaaatttaaaatatacacaagcaaaagaataagataaaaaccaaaggaaaagtacttactcaagtagcctccttcagcagtatgcccatcagcagctccactgacatgtcttcccctctggaaaactgatcgtttacctcggggagcacccagacctggtagaactggagcatccccttaccgttctttgtttcagggttcagtgcgacaaaagtgcttgaatgtcgggatagtctagatccatccgtcgccccccccccctccctttttgtgcccttggacgcggtagctacctcctgacatttttagatcttcttggccaatgggtccacctccaacactgcttccttaggaacctcaattggagacacaacagaactcttctccttgacggtgctcgggactatgtcattaggcagaacttcgtccacctttgaccatttgaccggagatatctggctggagccatcacccgaccttttcttccaagtggcaacaccttctgagacatagctgtacatgaattaaacaagaatgtcaatacaagtgcgatctaggtaaatgcaaataaaattttaataaaagttaaagtaccctacgtgtaggcaggagcattttctcgatcaagtaaagaaggggcattgtcgtctaaagaatcctcctgttcctgctccaccaggatgattttttccctttccaaccactggggcagacggttgagcaacccttttagggccatctctaatcctgatggatcgctcaatgggtacttggttacttggaggagccttcctctttttcttcttcttgctcagagcctcctgtctgggtacaacttcttctactgcctcctcagcctttggaaaaaaatcaactggataaagcttatatttgacaaagttgggagtcatagccagaagagagatgttccattcatcaaaagagagttggagaattttttgagccctcttcctgagttccattgtgaacggagggcggtagtaggacaaaatctgctaaaaactagtataattggtgtccacccccttaataaagtaatactcatctatgaagcctcctatctttgtcaccttggtgtccgtggtgcccgtcaaccacgacttctcaatttgaaaaaattagaagtaccccgacctgttctgcttggggcttgactttagatcgaacaaccaattgatgctgtgggggacgactcaccccatccttgtgaggcatagagtacgaaacaggccagacatatacttgaggcccttaggagtgaattgggttagactaatgtggtagtaattggccatcttcttgaaatatggaagaaagggcagcattaaaccctgcttggtgtgagctcctgaccaaggacaataaccctcttcagggttggtagctagttggccgagggagggaaggaagcattcgacattccccaagagatcgtgctcaaacagattggtcaatttcttcatggtcatcacggatggtggagaaatccatcgatctctcgttcaaagtttcttctcaaaggatgagcctcggtatattcctcaacaacgtagtcctggccaccctctaagacatcacctgcttcagacactggttctccatcatcattatagccactaaatggcagcacctgagctaccccttcttcctcattgccttcggcatcggaaggcgttgtaggatgaacctcgccctggtcctctacttcttggacttcaacgtccccgacagtatcttcctcattagtggcaggacgggtctattctgccctagccagagtggctaggcatgcaatgtacgagtcggtcaatgaagatttcctcacagtctatttggttcatgccatcatcctatgcttgggcaaaattttactagaggtgtgcctagcaattgtcacaacaaacttggcaatgggtttgcctgcagcagcagggcttggacggcccttgggcaaagtgtcgaccacgttcggatgaactctatacgtctagttagcaggaaggtaacgcgtccaacctttcttgagtttccggatgaaatgaccgtattcttcatcttgaattcggtcgggataaaaatgatgtcgcacctttggcactggggaaggtgtatgtatgctacttacttcccaatctttgaagctaaattggaaagattgccaccagatgaagatgggctagcacggagacaagggtgatcctcgtataaaagttgaagcaaatcttggtcaatatgatgtttgcctccccgaaactcagcaaggttcatctagaaaatgtaggagacaagaaagtgagagttggtcggagtaacaatgcaaaatagattgtatatactgaccaggttcgaatgagaaatcaaaagaaatgttttcacccaaaaatagaattttgatccttgaagttcgaaactttaaattggaatctgattttcaataaaaccctatggacgagtggaaatgaacgttgtaaggttaaactcgaagcgcaatcagataatcagatgttatggttaaacgtaaatgagattttcaagtcctaaacctaggtattctatggttaacctagaacaatccagaaatcaggcatgaatttcattacaaatatgtaaaagaaagagattaagaacttactcactgacttgaagctttattgctctcctcgaatggaattgtcgaaggtttttctatgaatcttctcaaagaatttgggaggaaatttagctaaatatcttttgctctggtgtttaagagttgaaatggctaaaacgattgcaagagatctttaatcctagttataagcaatctaaaaagagaattaatcctttgaaaattcaaaattttcaaatttctcccaaacgcatacgttacacactcattgcagggagtgtaaccgtcaagcacgtgcaagtatcaaatgttgactcgaattacatccgtcaattagcattaaatggacagaaactgaagagacccctagtcacagtattcatcatcagatatcaacgacaagcgtgacccatctagacaagactctagactgagtgaaatccacgtgcgaccaggaaggtcccacgcagacttggg

SEQ ID NO: 385884 - DNA, 2030 bp, Cannabis indica
acaaccatactcagaggcatcttaccgttgagttacttctagacagatatcagaaggatctgaacgagcaacatgatagagttccttgagcgagttgatggctttataaagttggaagaagctgtccagcaagcctaaacaagagggcaagtcaatgttaatagacacaggacatcatattgccccaaggaccgtccgacgtactgaccaatgcagacgatctctggtaattcaccaacaatgagaatggtggaggtaaacgcatcaacgatggctctgactgacataatggcaaaagagggaaattcaacgattcccttatgccatgaagtctaagcgagaaggagaagttcacatgctttactctcctaccaagactcccaatgcaatgcatgccaaccatccacgtcgactggtgtcaccaaaacctacagcacctggtcaacactcaagtggaccaccgaggctcgaccaatataaggccactggtcaactaagcatggccaacaaaggccgagaacttgccaatttgatggctaaacatagaagcatatctccctaaatctcttaaagttcaagagaaaagcaagagccagagaagaagcgagagcaagagcacacaactgaacctagaaggtgcattgaccacctacccaatgtaggctaggcccttagaacacttggggggcaatggctacacgaggaaaaaggttagtttcaaagcttctataaacgaggtcgacgcttcgattgctggcctcaggctagcacacaaagcgtaggatagacacctagacatacaccacgactcttaactagtcataggtcatgtcctaggtgaatatatagctcaatacaagaagatgatggcctacttaagctaatttcaagacttaaatagtcagtttaaaggctgtactaaaaggcaagtccccaaagacaacacaacaactgatgcactcactcgactagccagttgcgccttgacaaccaaggcaaacttggtacctactcagttcttcaagaaactaagcatctttgtttcaaaaggaacagacaggctagacaaccaacattgatacacctacagcagcatacctccaagcaaaaaccttgctagaaagtaaggattaggggatgactgcagggtgtccgatcctaaacaacataacacacagacatggtatctcaatattatctctaataagtgttaccaagaaagaagctaaataggtattgacaagagtgcaaaaaggctctatggcaatcatgctagcggcaaagccaactgagtgtagaagggatcaaactacaacatcgaccaggcctctgaaaggctaaccgaccctggccttaacaggctggcaaaccatagaatcaacaacctagccagccactacctcaacaggttggccggccatagcctcattcaacccaccagacaatgctctctcaacgtggctagccactgagtctataccctaactagcccgatccacctacaatctactctcatacttctggtctatagtgaccaagaggtaaaccactttttgctggcaggatcccttgacaaaacaaaaaaaggagaagagaccaagccaactcaaagtagcatgtttgcccacaaagagttaccaggcccttcaaaaaacaaactgaggaaaaaaaaatacttcgtaagagacttactccatgaagagtatcccttgacagcaaagatcctgcagcaagcatgcttggaccttattgaaaaggttcccattgagttacaagataacaataaatgtgcctacaagcctggcgagtataacgagaacttagagttgactcttctaccaaaacattggaatagagaacatctcggtaagtactctcactagacaacttatacattagtttctctaacgtttcaccatgcagggacccataaaagagctagtacccatcgctcttaagcgatggcctcccatcactcttcagtgatggcctttgaacggtaagctctgcagaggtagccatatataaaa

SEQ ID NO: 385885 - DNA, 967 bp, Cannabis indica
ctcaagcgaaagggtgttgaacacacttgtagcttgtgtttgagatattgaaatctgtctgtggagagaggcttagtgagaatgtctgcggtctgatcacaggaagggacataacgaatttcgagttgtttggcaatgatctgatctcggatgaagtgcaagtcgatttcgatgtgtttagatcgagcatggaatacaggattagcagctaaggatgcagctcccaagttgtcagcccaaataattggtgtagttgatataggaacattcagttcactgagaacagagcagatccagcgaacttcagcagctgtattggcaagcgctctaaattctctttctgtactcgatcgagcaacaacaggttgcttttttgcagaccaagacactaagtttcccccaaaaaatatagcatagccacctgtggaacgtctgtcatcagggcagctggcccaatccgcatccgagtaagcttggagtgaaagttgaggtgctggtttgatcagaagtccctcagtaatggtacctttgagatatctgaatagtcgtttacatgcctcccagtgagtggttgttggagcatgaataaattgacttaacttgttgacaatgaatgccacatcaggcctagttaaagtcaaatattgtaaggctccaagggtgcttctgtataaagtttggtccataaatggttcaccttctgtaagagacaacttgtgtgtagaggatgtaggattgggacaaggtttggcaccttccatatgtactttaaccaataaatccgagatgtatttggtctgtgatagatagatgccagatgtgtttctcacaatttcaactccaagaaagtagtgaagtggaccgaggtcattgatggagacaactgtgtttaactcagagatgagagtgttgatgagcatcttgttaggcgtcgttactattgttgggaattattttaccaggatct

SEQ ID NO: 385886 - DNA, 1339 bp, Cannabis indica
actttattctcttagttccaagagaagagatctatatgacgaaccaatcaaaggcaatgcatcgcaaatatcttccctttaaagagttagggaagagggacgtgaacaagttatgtcgttatcacaatgattacagtcatgatacaaatgagtgtaatcagttgtgagacaagataaaattctgaatcagaaaaaaaagcatttactcttcaactgtatgtacgacctgaagctatagttggggacaatgcacctctccagtctgcgctagttttagaaaggctcaacatggtgattagtggccacacttggctgcgaattcaagaaaggccttagaaacatatgaaaggtctttacgacataagccaagaggagaagttttggaggttgcagagcatcctccaaagactcaacgctacgaatgtgatctaatcacattcagagattttgactcatatcatgtcagctaccctcacagcgatcccttagttttttaggtgaaaatatccaacatgatggtggaaagggtgatgatcgatgacgaagcattctaaaacatcttgttcaagaaaaccctaatatggatgggtttgtaactgaaagacctagagccatgcaaaaaactaatttatggctttagtggagcaagcatagctctgtgtggtaagatcaaactaccactcttatttgatactgctcgaactaccatcatggaaacattcaaagtgttggacgtgaagtctccatacattgtgatgctcggaaggccagccctatatgacctttgagctatctcgtcagtatgccacttgtctctttggaaatcaagggattgtctgcaagtgttataacactttttaactcttgccaagaagacttcatctaatgctttgggaccagggggatgagaaaggcctctaccgcaaaagctggaaaagcaacaaagacccctggggttgaaaatacggagaagaaagagacgacacttaaagccacttgaaggtgcacccaaggcagggactacattcacctccattttagggaaattgactaaggagtttgtccgatcgaggaactcaaacaacttcccctcaacatggaagacccgtccaagaatgtcaatattggaacaaacttgatggaggctttgagcgaaaagctcatggattgcctcaggagaaatcaagacattttacttgatcgcatgaggacatgattgggatcgacccccaggtcatctgtcatgcccttaacatagacaaagcaaactttagacttgtacaaaagaaacacatgttccttgaaaaagagtgctccaaagctttcaaggaagaagttg

SEQ ID NO: 385887 - DNA, 1227 bp, Cannabis indica
aatgagtgaggatgcctatgatcttaccagatacctacaactagtagaattagaaaataggtaacttcgacaatgcttggctaaatcaaaccgatgaaatactgagttggagcgagaagccgtggtagccagggctgcacagggaacagttcttcaaaaccaacctgatctaattgtaaggagaccacaaggaagacctcgaggctctaggaccaggagacaggaaaatagccaagggaatcccctaaatacttgggaagaacaacttgggaatgcgagggatgtcccaatggatagagaaaatcaacccaacctaattaatacaagacgtcaagaaaattaacgtgatgttctaggaacttcccatggatttgtgagctaagggaatgaacgtactgatataccaaagtcatctcgcatgaatgcagaggtgagacaactacgactaggaaaccaggaaattcctcgtaatgatgaaagaaatcttggaaaccaacctagatcaagtgctcgatccccaagacatccgcaaaggccttctcgcatagacaaagaaaatatgcagacttacctaggtaggggacatgtgtcaaatctctttcgaagaagaagaccaatgcgagatgagatgcgtgaagcaagttcaagtacaggagaatcacgatcatacaggcatagtaggtcaactggaacacataggcaaacacgagacggaagccgatcttgatgttattatactaaccaggaaagtataagtaattcacgtagttaccagtataaaagttactcaaggactaggtctttaagtaattatgagaaaatgcattgtgaacctgatctccgcgagagattaaatcaaagacagttaaaccttcgcaatcacttgaatagaaatacacctgatttgcataaccaacttaatcaaaatgcaaatcaagagccggtggatcccattcaattacgggtaatgcaattggtggaaaaatttagaaaatatcaagatggagaatatggcaacttgtcaggatataacttagatgaagaaattgagccattctgtaatacccgaaattaagaaatggattagcaaaaccctaattagataattataaataattgaggaattatattattatatagttcagtatatgtgattttatatgaattttaatatgttaaagaccgcattggtgagccaggggcattttggtaattatgaccagagaa

SEQ ID NO: 385888 - DNA, 876 bp, Cannabis indica
attcaaattagaaaaaaaaaaaatacaaaactctctctctctccaacaccctctctctctcgacctctcaagaaacccagcagaaagcttaggttttcaactcaatttttaagtgttctagctggatttggtaggatcattaagaaccaactcaaggtaagcaagctccctcccccctttcctttcaatttttatggtttttaagctttgtatccatgcaattttgaggattagggttctgtaggtttttgaattatgttgattgtgttttctgaggttaatttcagttggtttaggctttgttgagttagatttaagggttgtagttggtgctgagcaagtttgagttcaagaactcaaacttggttcaactatggtagattttgtaatttcaagttattttttactttaccacttaaaaatggtttattatgttgtatttaggtgttctggagcttatggtgtagtttagggtacttttggtacgaaatggggggtctttgtttttctgtagtgaaaaatgacaggtcgtttctgtggaaacgacctattactttttaggcaggttccctgttttaggatttttctcttattttctcgatgcttaggactttgtcttgctagatatcgataggaaaacttttagtttcgagtttaatgtccccgaaaagtaatttagtgtatcacttatcagttttacgtatattgtgacttagatgcctgtaaaccgtcgagcagcaattccactcaagttgaccggtacacctgaattcagaatcgaggtaagacaagtataatgacatgtatatgtgaatacatagtatgcatgtgttatgattgcctgttagattacattggattactagtatcagtata

SEQ ID NO: 385889 - DNA, 1058 bp, Cannabis indica
tgaaggaacattcagagggtgttgaggcagacaacactcagccaaacatttcattgctcgagtccatcacgatcaatacctctagcgatttgacatcaattccaaacaagtgcagaaaattgcagtattttcatattgagggttgtcctaaggttgaaattgaagtttgtccattatacatgtgagttatctctttttatctctcagttttgttaattagattcattggtagtgtaattttcgtatctgttaattcttttttcagtttgtgtagggatcaacattgcagtgtgatgacaaaagttgaagcatgaatctccatggattggatgggttatatatttatatcagaatctgttgtttaatatcttatgactctcacatactgtacaacttagttagtatcaaaacacttcattcaaaaaacagatttttctcactctcaatatcttatgtcactttccaggctataacaagtctaataacaaactgagaaactgagttcttcattgctctacaatgtaataactctattaatgaacttataagtaagctaagtggagacttaatatgatatgatgacaatgtaatatcatatcatttgtgaagggaagcatgatcttcaattgttacatttaggatgggaagaagttgatgacaataacaataaggtggaaaatgacgaaatgttactagaaggtttgcagccaccttccagcctaaaagagttgtttgtctcatgtttcatgggtgtgagatttggaggttggctttcttcattggataaacttgttaagttggtgttgtcagattgtaagaagtgcaaatatctcccaaaactagatcaattacattctctccaggaacttaagatttcagaagtcaaagcagagtacatgtgctcctctggtgaagatgatgattttgacaccaacttgttctttccatctctagtgactcttgaaataagattttgttcaaatctcaaatggtggtggtggaaaaaggaagtggatggtaatgagtttattattagatcatttcctcgtctttccaat

SEQ ID NO: 385890 - DNA, 1823 bp, Cannabis indica
aaaagaagaatagttttcaatcttccaaaccaaggacacatgattacgagatcgaccgccactcttgagtcactatccacgatgatgaatttgtgccccttaagctttgcgtttcaagagctaaacaacacgcaacgcctcgccacaacaagcatcagataagtctaaacttgctgtattagcccaaactacctcaccagaatgatttttagccaccaccgcaatgcaagagctttctgatcccacattaacatcacaattaagttttagccaatcctgaggaggaggccaccaaacatctctttggatcgaggaagcagcagggaggagaggaccttgcaaatttgcataagaatagtggataacatcaatacattggttcacattagaatgataattattgtgcacattttcattcctgacgcgccaaattgtatccaccacgaccgaagcatataaaaagacttcatctgcattgatgcccttactttttaagctccatatgaacttgacccagtcctaaacacggaaaccagagtctgacaccaaaaaaataccccacggagaagagcaccaaaggtggaaagccaagttgtacttaagaaataattgttcagttgattcctcctccatcccacaaattgggtagttaacatcatccacacggaatctctaaattgagaatggcccttagaggcagtgcattagaaaggatactctaccaaagcacgttatgcctctccaagattctaccattccagagcttgttccaaagaggtggggacacctcgcaatgagggactcttttaaaagcttgaataaggaggccaattttcacaagaatagcccattatgctctttagtccatatccatttttcctttccttgaccaattggatttcctcctttcaaaatagcagagatggtatcattgtcaaaaatacactttaatttctataaatcctatttcccattgactgataaaaggtcaggcaccttgtgtaaacccttagcaggccgcccattagaaacagggtaaaaggatctgccatgagccacccacggatcatcctaaattcttgtatccctacgatcagacacccttttacaagctccttctcttaagatctctttcacttttatcacatttttccagatacaggaatctaagtcattgtagttgcaattaagcagcttctttcctctgagatacttggctttcaagatcttacaataaagagatcaattatcatttagcaagttccatccccacttggccaggaagacctgattcatctcattctctttcctaaaaccaagtccccctagacttggggagacacaatttctcccatgccttcaggtggattctatggtttcctttctcagatccctaccaaaaatcctggaccaagttgtcaatcctggcaataagacggttagagagcttggtagtttgcattgtgtacaaaggcatcaaaagccccattgattttatcaaagtagctcttcctactttcaaaagcacttttgctttctacccttccagctttgaagtgacgctatctagaataaatttgaaatctgcatctttttgccttgatcggaacaaagggagccccaaatatttcacattgccttatgttccctaatccccaactcatcttaaatgcgcttcttcagaactttcgatgtattgttgctgaaaaagatttacatttttagcttgttgacctgctgcccaaaccaatcacaaaaattctcaaagcaaagccagaatcctttagcctcttccagagaggctcttgttgggttttatgccc

SEQ ID NO: 385891 - DNA, 1291 bp, Cannabis indica
gggagagaagttgagctatgagcttaagctttgagatttaatggcaaaatcttgatttgtgaattaaattgaactctaagttgtttagtatgtttataatgcattaataaactgttttggaaaatttgattgggtttaaacaagttttgaaggttagaacttaaaaattttaagttgcagaaatctacagtaatccgaacactcaaatggtagaaccaggtgtttggtttctggtggtgcccaaaattttaggcacccagttagaaatttggtttcccgattgggaatttttaaaggtacctcgatttttgtatatttagggcatttccaccttatttatcgataagaaaatttcagattatgaatttaaattctagaaagtgttttagcgagacacttactagtttaccactaatgtgactctccgatcgttgagcagtttcttaactcaggttgactaacacatgaatttggaatcgatgtaagattggtatacaaatgcacatatgcacatatgcacatacgcatgtatgttatattttcttgttgttagcatattagagatgtgagatagtgtacatagagttgtactgggataccgacatctaatataatcgatataaagtatgaattaacattaccagcactactacgattagagtactgagtgtagtttaatattatgattaatgatactatagttacaaacgtttgagactcagacatacgcattggatgtgataggcagattttatggtaattgggtgtagggttgctatattacaagtcagacatatgttgtgtatgttatgcttttcttattgagtctgtcggctcaaagatatgtttccatgtgtagataaaggcaaagtaaaaattgaacatcagtgagtggtgagcttgatgaagattgtacatatccgatcgtcttagcattgaaggttgcgatcttcgggacaccgttggcagtattttggttatgtcgctagatgataattttcagttattgtatatattatgtatattttaaaacaaattttaggatcccgaattataaatattttacaaaagtattttatgtttattaaagttttagttactacaaaaattttgctaagcacacttttatgttaaaatcttttgattagtaaaggttaacacaataatcaagaaaatatagtgacatgccttagctagttggcgttataatttgatatcagagccaccaggtttgtttttcgaagatcgactagatatgtacaatctgtaggaaattattttactaggatct

SEQ ID NO: 385892 - DNA, 646 bp, Cannabis indica
atgttgcaaaaggtgtgcccaaatttgcacacaataaatgttcttattttgtttattttctttgtcaaaatgtattatttcatattaattgaaagttttttaaaccatttatttagtagttatttttgtgtataattttatgaaaatttaatgacatatattgatgttttagattttgtaccttctccattagagcacaatgttaaaaatcaacataaaatttacactatgcaatagtgattaattatttttaatttaaaaaaaatcaatttttttttttgtgagtataaaaaaaaattcaattttttgttaaaaagaaaagaatgatcaaattgattgaaaaagaacctttataattattttgaattaataagagatttcttataatattaaattattaatgccatagtactaaaatacatttataatatgttgttggctcttgagtgtcttcatgaggtattgattggtactatggcttctcaaatttattgtataatcaaatcaattgtattgattggtaggtactattacatacatttatagaaatgtatacaatttaaattgatcctttgttgtatgcaatttcccaagccatagtaccaatcaatacctcatgaagacactcacgagccaacaatagtgg

SEQ ID NO: 385893 - DNA, 1198 bp, Cannabis indica
atagttacatcgagtgtattaaagtatattataatttttccaacaacttaattaataacaagaccgataccaaatattagtattgtattaaataataataatacaatacaatacaatacaacacaacacaacccaacacaatacaatacaatacaatacaatacggaataccaaaccagaccccaaattactaatatgcactgtctcattacttagaaataaattttaaagactaaagtaggttactaacgtgtaatagttttttttcttcttgtgttggggggggggggggaggtatacatagatagcacctcattgcttttgtttgttatattagagttatttcaatattcttctttgggggctttatgatttaacaaccttcctaccatgaacttacttttctttctttcttcaatgttatttactctttctttcgctcatgcggtcttggtcaataataatggattatattagcttgctagttgcttaacctataacaatttaactagtgctatttccttttaaatccatttcactgctaaaattattacataagctttattttagagaagttttatttgataaaaactaatttcatacaaatacaattttttgtgaattggttaagagcaactccaataagacttcaaatttgaggttgtagtagaaatatcactccaacgtagcatcatttcatcattatatattttatatgcagttttagttacagtagctgcatttttttattgatattttttagttgatttgtatatatattattcaatgttaaaatatattatattatattaatataataataaaatatattttttagtgtaaatttcagtgttatggttgaagtggaaagagtttttgacatcaaatttggtgatagtgtgacaccaaatttagtgtataggttggagatacactagattatgcactaaattggtgtgcaccaaatttcatttattaagagtatctccattggtataccgtttcaccaaatttgtatagaattttcacacgatttcactctatttctacatcattaatggtgttaaattttgcatttacaccaatttgattataaaacactttacaaaagttactgactaagcaaaatacttgtcgcctagcgactaattacaaaaagccttgttgtcccaaggatcgtacgctccaggcctaaccg

SEQ ID NO: 385894 - DNA, 1340 bp, Cannabis indica
aaaaaaaaaaattaaaacacaatagtattatactaatttttcacataataatgcagcaaaataatgcaaatcaggatttaaaagaatactcatttactcggaaaaaaaagagaaagaaagagtattgttcatcgaaaaggtaagagttgttcatggtctaaggaacataacctatttgcttgaaacatagtttggtttctaatagtctataaattgccaatgacatagagctatttgagaaactagctaatcgagaaatttatgaagtatcaatacatataaaataatgaagaattaattttttttattttttaattattttcttcacgttatttaacaaatgggagggtcatggtactctctagcccttagttatgtgttggcttaaataattagttaaatttttagacaacaataatcaaaatagaaaatgatttttttctttttattttttgaaagaaaaatataaaatgacttaaaaagaaacaaaaaatatattataagtttatcttctagttacaaataaatatttaagtttattttttcacagtaataatgcttaagttatatttttaaaactcataggtatttaaatatcattttttattggtatgtttaaattaaatttttttaaaaaaataaaatttaatgacttaaattaatgaataattactatgtaacaatttacttaacacttaatatgtatgtacttataaaagttctagaattataatttaggtattattactgttaaaattaaatttaagtatttatactgtaaattattctaaattataatatcaaatgttatttttaaaaaaggtaaaaaaaaaaagaaagaaagcaaattatgaaggactaaattgttaaatatgaaaaaaagaagggacaattatgagaaatagggaaattgatgagttatgtgggaaggtgtgttaattggtgaggtttggtgtgagtgtgatgtggtcccctgggagagaggttccaggattgttaaagtgggacccagtgcagcgggtcctaactccaacgtcgagccctgtgagtgactttgatagtgggccccactcttgtcgccttgtcgtttggagaccctttatttcatatcctgcctcctatttttaccgtaatttctttttctctttttattttctcctgagatattgataatttgcttggctctatttatttattttggaatattatttactgccacgtgtctactttgaattgaagtgtcacctgtatcattagctcgttgatgaaaacaatattatcaaacattgtggttatttgttaagtttttttattaagttgtattaaattagattatacat

SEQ ID NO: 385895 - DNA, 870 bp, Cannabis indica
ctctcttacccctttcgaacatctcttccaacttagatacaaaaaagtttagaattagaaaaacgaattaaataatcaattgtcttattcttaaattgtttgacaaaaaaacatttatatttaattttatctaccgctcagaagtagagatgcacacagggtggaaaatttgcgaagagtgctccccaattctcattctcgttaagaattttaattcctatcccgtttattctccatcgataacgggagaggaacagggtgcggaatcttctaatgtaaaatgaaaatttattttaaaaatttaaatgtataaatttttaaattatataaaaattaaaatattaatcattatttattatttaatatactaattattgtacaacaacataactttaaaataaaaaaaaatgatgatactaatgtattagaaaaatacaaacacatattataaaatataaaatattaataaagataattaagtgttatccttgtgccccatctgtttaacattcgaggataaaaaataatctctgttcctgttccgtttcttatataaatggaaaatccataccttattaagggcaggtccccgcgaaacgcatctttatgaaaaaaaatgtacatctttaccattagaagacataacagtaaaaatcaataaatgagatgtttataaaaatatagagaaaaaaagaaagttttgaaaaaggaaatcataaaaaaataagcaaaattaaatgggctatttacaaaaatatgggaaaatgaagataagttttgatatatatggcataaatacttaattacactaaatatgacattttttaaaaaaaaacttacaaatatgggaaaaagttataaggaatgcca

SEQ ID NO: 385896 - DNA, 735 bp, Cannabis indica
actgtaattgtgaataacaatatattttaaatttagtagaacctaatattaaacttataattataaataaaacatgtgaacaaagcatatggctaagtcgtgatatgatttctgatgtttattgaaagtaaataaaattacaatgaaattgagttttatttaggacataaaattctaacaaaattgaatatgagtcagtgtccaaataatgagtttgaaagagaagaaatgaataacattcattatgattcagctgtcagaagcctagtgtattctcaggcgtgcggaagacccgacattgcttattctattgaagttttaggaagattttagagtaacccaaggatagaccactagaaagctacaaaaaatgttatgaggtaccttcaaggtactaagtattacaaacttatgtttaaaggaatggacaatttaaaagtagttggctactcagattcagattttgttggttgtacttattcacgtaaatcaaaatctacttacatgttaatgtttggttgtggagctgtgtcatggaggagtaacaaacaaacactaactgctacttctactattgaagttgagtttgtttcttgttctgaggctacatcacgtggtgtgtggctaaagagttttatttcatgccttagagttgttgattccatatcaaggccattaagaatgttttgtgacaattcacctgttatttcttggctaagaacaacaaaagtggaa

SEQ ID NO: 385897 - DNA, 1536 bp, Cannabis indica
aactgaattgatatgtacatttggcagtgaagatctccgactcatggttgacttatcatttcctttcttttactagcaccacaaaacaactctgagttacaaagactactaacaaaaaaaataaaaaaacaactcatatacaacatatagaaataactaacaatattaaaactatcaattatattaatcaagcttttaactcatgtaggaaatcacaatataacacaaatatttacaattgtaagtgtttgtttattaaaataaactattctcgatacttcataaaatatccactaacttccattattaaatgagacaaccaatgttactatcattgcctagtgagacaaccgataagtcaaaaacatataatagcggttttaatttagagtaataactcttgcttacaaacggtaattaccgaatcatatattgacacttcatgcggtacaattgtacttttcttacctcaaatccaaatacaagtgtgctagccaacttgagtggaaaacgctcgacgatctcaggccctatgtcacaacaactataaactggtaaataactcatttaatccttttttaggacttaaactcaaaacttaaagttttcctatcgataaaaatcgtgacaataccctaaatattgataaaatacaaaaatcaaggcacccaaaattggccctaaccagttaactgaaattcccatatgattaaccgaaattacaagattttggttcagtttgcaccaagaaacacaattattgaggttttatcacccaaatttatcccaaattccttcaaaacctaccaaacttcacagaacagttataatatcaattctaaacataatccatagctcaattaacacaatagcacaataattaaaccaccattgatgagtgagctttgaattcttagagctcaactcacttaatcaagctacaacgaccaccctaactttaatttaaaacacaaacaaccttaagttaaactcgagaacaagctctaacaagattaaccctatacataattgaatttgcaaaattcaactcaagacatattttcttcaaaattcaaagaggaaaaagtacaactaggcttaccttactcctcaaacaaacaactcaatccctttagttgattccttgactaaaaattagtgagaagctattgatttttttttggttttagggtttggggtttccttaagttgatttttttaagagagagagaagagaaaggaggagagagaaaagtgttttgatgttgtacaatgcttatcctattgggatttatgccctaaaagtaattaatggataatatattataaaatatatgaaatacaattataagataaatgaatacattaattatagaagtataattaataaatatcttaaaattccttattcatatggaagtggtataatcttgtaaggttgtacaagagaattaagattatacaatatgaataaaacaagttggtagtgtattaaagtaaagggatctttaatatggaactactaagtacaattta

SEQ ID NO: 385898 - DNA, 605 bp, Cannabis indica
tcatgagagagattgaaaaactctcctacccggaccttgtgatcttgatattctttctaaaacaatacaattaaaagatgagtaggttattaccgctataagggatcgaacctctataaattttgtgtgtcgtttataagctttaatcattattttattattatataattgctttaatggactaagtgtcgttggctaaaagtgatatcaacaatagcaatctgtaatctaatcgtgacatctccctcgttggaattacaatcatgattagaataaaaaaaaaacaagccaactaatcaatcgcctaattctcggaactttttacaaaggaaactaaaataaagtcaattgaaaaagattacaacatcacagttaaccttaagaatacacatattcagtttactccactgctcaaaggatacaattgcagtcggttcattcaacccctcagcttgagcattcaactattgtgcaaggtatgtaactgtactgctaacaacttcttcagccgcaaaaaacttgcgttctcagccacaaataacaatttgatggcgaggtattgaagaataaaaagacaaaccaacaacgaaataaaataaaataaa

SEQ ID NO: 385899 - DNA, 1572 bp, Cannabis indica
aagatccccttgagtaagctagacgaatacattcaccagcaagattcaaaatcccttcgaaccagatctgaacctctgatgactctaacatcaagcttcacctcctttgtttagaaaatcccaggatacattcacatggctaatatttagaattttgctctgataccacttgtaaggaccgtcaaacaccatctttttccccattggtatgatattatttgcttttggcctaagcccttacgaatttgtttttgggcaccttctcaaaaggccacattccaatagagatggtgttcctccttatatacccaagatcctttccatttctaggtagtgtgggactttggttgtacacccaacagtttactttgaattggttactttttaatattaagttatttagtatttattaaaaaataattttttttacataactaacaataaaattaaataaattattattcttttaaatctccaataataaatttaaaaaaatatatgtaaaaaggaaataattaattttgttttaaattatatttttcccatataatataaatttaatctattaaattttgaaatatatttatattatatatattagattcttaaaatattatttttttttgtattaaaatattaattgcacatataatatttttaaatatacataaatatgtgtagattggattggatcagttactttacatatcaatcaacatccaaactgtacaaatacaaaatttgaattttttaatccaatctaattcgcagaagtgcagatatctgcactttacagattagattagattagattttgcggattgtataagatcgtgtattttacgaatatccctattatatattgttccaatttttaacataaaaataaattacgaaaatttgaaagtgttatcagcatttttgtaagcatgccatgtggatattaattaaagacggacaaggggtcattaatcccgcagaagctcggtcgaagtgtgtcagcctacagacctagggaccatggtgtgtttatgtacaatgttagaggttgtctcccatgccatggtgtcgtgcaaagcatgagtgtccttgtgtactgaaataagcaatccaacgactagcagaaagggaaattcaaatgagaatggctcaaaggtgacacgcgtccaaaacccagcctgtacaaccaatacaatcagacacccatacaagccacatgggaaatatgccatctacaaattcaatggtggtatttcatccctacgaagatccattaaagacagcccatgcaatgtggttggcctataaatacctcatagataacacaagggaggggattctcttcttcagaccttcaccttgagattgaagactaactcttcatcaagaaaatacattactgtaaccctattattaactctagagtattcctactaagcttcatcttcatcaagaggagcacagtggaaaggaataaaatgttgggttttatgccctaaataaaactcatttcaatataatcagatttacttattaatatagatcagaaataacatttaatgttgcatggtt

SEQ ID NO: 385900 - DNA, 1375 bp, Cannabis indica
aagtttaatcaagaagcaaaattttaattaatcacgtttttccataaacctcgttgattagcaacgagctgcacagtacgtttaaaaatcacgtaatacgcctaaagtagttagggtgttacattactgatgaatatggcgacacaagatggaggggggaaccctctcttagccatggataaaatcatagtgtggaatgtttgaggagccaacagtcaacaaaaacagcagctgatcaagcagtttatcaaaacacaaaatgctagctttgttgggtttctcaaaactagggtcaaagttcataagcttggaaccatggacctcagtgtgtttaaggggtggtgcttctcgacaaagatagcttggaatcaaggagggaagattgttattgcatggaatccattaaaatttgttgtagacattctcaagtgcacttgtcatttaatgcatttgaaaattgctacagcatatggaaggtttaattgtgtgggctgatcttttctcattggcaacaaatggaaaaatggctcactatgggagatttcaatgcaattttaactaaagaagaaagggtggggcatagagtaaaatatcacgtggatacaaatttcacaaattgtaatcaacattgtcaacttgaagatgtaagagcgactagttattaccttacctggtctaataagtagcaacgaaaggataaactttactcaaaaattgataggattttggaaaatcaagaattgcttgacaattatcctaatgttgaggcaatgtttgttaataaaggggtatttgatcatactctaggtatcttatctttgtaccccaggtggaatagtggaaagaaacctttcaaatattccaggatgtggtcttcacatcttgattatttagcaaaggttactgaggtgtggaacaaggaaatcagaggggccaagatattttagctgatcagtaaactaaaggctctaaaacctatcctgaaagagatcaacaaaaagggatcctctgatattcaggttatttatagacaggctaaagaagagctcaatgagctgtaagataagcttcagcttgatcctctcaatattgtcttgcataatgcagaactggctgctagagacaaactgaatgttgcttaaaagaattatagctccttcttacaacaaaaagccaaggcatcctggattcaaaatggagatttccattcagctatttttcatgaaagcaccaggcaaagacaaaggtagaatcagatattgtgaattgtaagggaagatgggataagagtatctgaacctgaacaagtatgtaaagactgcttagcttaatttaaaaattagcagataattaggatttaattatggaaattatt

SEQ ID NO: 385901 - DNA, 1050 bp, Cannabis indica
aaggaaattttatgagcaaacaatgccatcctattcgcaaagtccacattagcttgaattctacctagtcttggcaaagtcaaacaggccaaaagagaagcattactgatactacacctctatttgatcccgagagaaaacttttcaattattatttgataatataatatataaattaaaatatgacactgtatattattatgtgaatactatatatttaagtgttagtacataaattatataacctatatgatttatttaacctatatattgtaccatagaaatgagttacgattatataacacatttataactctttttttggttcatcacaaattatgtgtaattaaaagagttgttgcacaaattcattatgcgattcagaactatcattatatagttgtttggaggccgttacgatactcatttaagtgattaaaacaagttggaaacgttcagaattgaaaaggagtcgaaaggagttgcaaaactctattttggagcatgctgaaactgtacgtctggcgatatgtcgcctggcactaggaaaaaaaaatccaaaacattttagttttaattgggtttatatctaaccttattctccatcgtctataatcccaattttactgattaatgtggtgataatatccatgaaatgtcatgaatattaaatgtaaagtgtaatcacttaaacattataaaatgagatttttggtgttcatttggatgacctaatttctatcaaaaaagtattttgctaaaaaactctaaaactttataattcttaaaactattttcatgagagttctcttagtgcttagtattaggagaaataaactttttagataaaagtgttatgtatattgttcaagttatgatcattttcactaatttatactcaaaattgtgagtaagtattttttttattttttttatttatgatcatattatataatatatgtgtatagtgtgttatattgcatattgtaatctcttttcttttactttttttttatatatataatatatagggtaaatagcagtataagt

SEQ ID NO: 385902 - DNA, 1383 bp, Cannabis indica
caaatcagcatagatatggaatagtttattgagtgtactttatagtaatatttaaattaattatgatttcgataacataccaattggttcttttcataaaatgattcactttaaataaaaatatctcgtgtagataatctttaatttttagattagttattttaaactacatgttcaatttttagtttatattacattgattaagatgtacttttatattgtatatattttttttttgtgtaacaatatttatgttacctttcgtactatttaagaaattgatgtgttacaattaagtaaaataaattatataatttattagcaaaaaatttaaatttctaaattagtaaccaattagtttttttaaaattatgctatggtatctttatattatctcatgtaacattacttttataaagaaactaataaattaatatataatattttttaaatagaataacaaaatagtaacccataaatttgatggcatattatattttgttttaacattaaaatttggttacttttttaattaactaaaagaaaaataaactactcttgaatgttgtaattttaacatataatattatatttttttatcatcgccataataaaaaataactattgaattgtttatgctacttaaaatgaagcaactacgatgttacttttccatgcacaatacaaaaatgatctattcctttattagttataattatcctagttattgaaaaataaattagttgctttagatgccaataaaaaatgttattatgttgaaatttttttatggtgattaatgatattttaattgataaattaatgtagtaccaatatgttacttgttgataaaattttatttgtatacattgatgtataattaataagtatatcattgatatagtaagcaactaaataattatttcaattttaaaatagacgagaaaatatatgcttctcgtatctcaaaataattacattaaatagtagatcatcatagtactatttttgagattaaataacaagcaatgttgccaacaaaaatattttaaagtttggaaaaaaatcgagagataaaacatagttatgtattctttattattaatcaaaaggaaaataaaataaaaaataaaaaaagtaaatagtgtgtgaatatttgaagtaatatgtagtagaatgaaaggaatctcacgtgatttaagaaaaatgtcatcaatattttatataaacgttaaatcacaagctattatttctaattgagaaaacttacgttaaatttgtaaattacatgtaaattaaggtgctacgtgtaaattttccggaatttaaccttaaaatgaacaactgttattaattaaaaaggcccaaaactaaatgggccta

SEQ ID NO: 385903 - DNA, 1284 bp, Cannabis indica
aaaaatgtaatttttttacaaaaaatttatgttatatgtaatttatccgttttttttttatgttagagatttttttacatcgcatacttgaattttttttttattgaaggtttgaagtttttttttttcaaaaataatgtgtactgtgttaaattttcactattgtttcacggttgtttttcacttgttctactgttgttttaattgttttgttgtgttgttttacggttatttaaaaaaaaaatagtatttttataaaaaaattctgtgtgacggtaaaattataatcttttgtctaaaatttagtattattgtaaaaaccccttttttttagattattacatcaagacgctttttgtaaattttttatatttttacgtccaatgacttttttatattgttttaccgtatgctataaaacaacacgaaaatagacaaaaaaattatataaaagtaacaggaaaataatatcgaataacaacaaaaaataacatacagataataaacaatcaacaataaattaacaagagtacaaaataaaaatacattaaaagactgtattttctataaataaaatcgtaaaaattatttaaaatttcatacaactatttttttgtaatttttttattattctttggtatttttgcaataatttttttttaagtaaaattgcactcccaaaaatgttcacttattcatgggattttaacataaatgtttgtgaggatgtggcacacatgtccaaattggtaaatattgctgaatgaagaaaaatattgctgaatctcaagctaaagttgttgcactcaacaatctgtcacatcgcagcaatgaaaaaatgattgaattaaatcactctgaagcaatccttgatgatttgttggagcaagaagaaatttaatagcaacaacgctcaagggtagattggttaagcttaggtgattgtaacacaaagttcttccatgccgaaattcggctaggacgtccaacaacaatataaaatttctccttactgaggtagggacacgagttcattctagggcagatttggctaccacaatccaagaatactttgcttatattttcacaaccaccacaattgatgaagatgctctatcttaaatgttaaatgcaatacctacattggttactgttgaaatgaatgacgagcttacaagacctttcacgctactgaagttgaacatgccctgcaatcaatggcccctgacaagagtccggctatagatggcatgtctgcatgtaatatccagattaaaatagtat

SEQ ID NO: 385904 - DNA, 1020 bp, Cannabis indica
atgaagctgtgcaactaaaactcagtaatttgtttggcagtttttcattgatgggttcgtttatattgtttttttatcttgttgaagatactttggggattctatatgcttgttcccaagtgaaaagccaaaacaaaacaaaggatataataagaaacatagactacgctaatgctgctgcccaccctctcgttatggataacaacactatataaaatgctgtagttcttataatagttacaagtgtttaaatgacacatatataaatgtgttctattgttaaaatttattagattaatgctagtgtaaactttttattactaattttttaattaatttttacgtttgaaatacatactagaatattttattcaattttttttccatagtgttatttgttatagttataacattatctttgtaaatttttaaattttttagataatttacaatgttgaaaaatagatttgaaattttttgagcactaatagtttattgaaatatcaatactgtaaattactttcaatttttcaaaaaatttaagaatgatattggaacaaatattgctgtaaaaaattattctaacttttagtttaagatataaaaattaagtaaaagattataatagataatattaactaatactgaatatagaccactcaaaaagcccatttggcttggcttgacactcaacattcgaacattgtggaaacaagctgctcaattgagtcaattcagtttccatagatatcactgtcagatagtgtctcacctcacacgctaggaatataataatgtgatcattaacattaatgaaaatcatcaactaaaattgatgggctcacctttccatttgacaaaaaaagaagataataattaaaaagggaaatgatttgaaatatattgatttttttaaaatttagcaaaataattaaagggaaaaacacataaacatacaaaaaagaaaaaaaaatacaaaaatactatgggccggcccattaaacatttatacagtccaca

SEQ ID NO: 385905 - DNA, 1744 bp, Cannabis indica
tatgtaattattcctttaaaaataagtttctttacaaaaaatttttacaaatacaaaaactcatacataaattttacttgcttcgtagaagctttaagacttgaccaccaacccactaccaaaattaaaaccaattacaaatttttatgagagcatctcataatgttagtattttatgagagcattttttttttttttttacaaaaaagcaaatgtattaaatgtgtagcttttttagaattaggattgtattaaaaattgggtcaaaatttgttagtgttaggaaataaaaaatttcacccctagaaggagaaaaatttagaactaagattaaaattatttagctaaacttgaactcatagaatcaaaagattaattgactaaaattatttgtttttctgaaattaggattatatgttctattttacaaaatacattatttaaaactgtctttatactgtcataaaactgcgcgaaacgcgaatttatttcctagtttaacataaaataaacaacccaaaacaaaaaaggtagaatatatcttgagcaaacgaaaggataataaataatattttcatcttttcatgttattttgggtattcttacacgcatgtataaatcatatgcgactcctctttcccctttaactaatggaaaagtactgcttttgggtacaggttttagctataagctcatcaaaattatgattaaaaaatcatatgttaacaacaaaacaatgcacataatcgtccctgcaaccaacaaaaattcttccaccaatcatgacaggtgaggaaaacacatctccttcaaggtctagccttgcaacttcctcgacgtcatccgattctccacgcgcttccatcttcactcgaagcaaaattacacttccagagctagaacatacacataccaacctgcaaaatcgttttagaatgtccatatgaatgggtatttttctttaagctaattccgtcttccctatcaaaaaaaaaataaaaataaaaatctcttcctttgcgtttatttttacctgtctgataaaagagaagaatccgacgtcaaacgcaggtgctcgtcaacatacgcagatgcagtaattggatctccaacattgtattgccagagtattgtacccttttcctgcattagcattagtatcaatgttaaattttcacaagataacttataaataagatcaaaatagagatgggatgaacactgcagcttacttgttcaaatgaatatatcctcccatctctagaacatatgagcacctacagaagattacaaagaaaaagtttacatcatcatggtcattgccattcttcttattcttcttctgtttttttttttccggttaatgtcatgttttattcagttatacttgtcttttaaagtccctccacgtttttgtcttcatgtgattcagatcactaccaaaaaaaaaaaaattgtcgaaggaaatttaaaaacatacttgagaaggaagagcagagcatatggtggctccagcaaatattggaccggaaattttacactgaaataagagcattgacatcatcaataggatagaactttaattagtctaacaaaaaataagtatggagagaaagcacgataaaatcagtgcacgataaaaatcagtcgagtagcttcgttccaccctacgatcaaaccacaagcttttcatgtctcgtacacatgccatgctaaatcaattttgtattagaaaattcttttt

SEQ ID NO: 385906 - DNA, 1525 bp, Cannabis indica
aaacaagccataaacaactaaaagcaagctttaaagtagtttctaacacgattctaccttaattaaaactactcttgaattcccacaatcataatatagaaccaagcttaaaccttaaaattcaaagagggaagagaactaggattaccttgatgaatctctcaattcctactcaaactatagctaaaatctttgttggatgatgaagtaattgatgaacaaaatggttgaatatccctggtttgcttcagccaaaagaaatagagaaaaggaagaggttaatttggttttttctttttttttttttggattattctatgtaaaaaagagttatgtgctaggacagggtccaatctcatgctaccaaacagttctgtttgattcccaaaaatacttgtatcttaatctttgatgaaaacgaagaatatgccaagaagacttcttgaaaaaactccttggaatcagccaaagttgacaaaatattaacttgggcgctgggcctcctttttggcctccaacttggtatgtttcttccttaaaagtactttattccttgtttttgatgaagacaaagaaaaaacacgatatagttctttggtttgatgcttaaaagggccccaggttgacaaaatgtcaatctgggcgctgggtgcctggggcacctggtgtttcaagtgctttaaaatgaaagtactccaaatctgattttgatgcgtcaaatatattcgtgacacttctaattcatgttccagtataaaattttgacatatttttactaagatggtctcggaaactgaaatcctaattgggttgttaacttgggcactagtgaaaccctaggcgcccgggttgatttttgaggtgttatttcatgtatctttcagttctcgagccttggacttggatgctttatgtctttatggtacagaatactgaaagatagtgagttagaaacaacttggcgtgatctaaacacccattcagagttcttgaagtcaacctgggtgcagggctagggacccctcccaggtcgactactatgacctaggactatttaactctgagatgatttctttctggccacatatcaaatattgatgtccacatcactagagtaagtttctaggttaatagagtccattgataagtacataatgaatgaatctttgttaaaagacccaacgtgaagaccatatgagcacaacatgtagttgagctaacacgttaaataaagcaaacttacaggagtttttctctttattttgcattggtgttattttattgagccttgaggaaagtatttatattaggtgtgagggaggaaaattattgtgtctgtaaagtcttttttttggcaagttagttgacaaaatattttttcttttatggtaagattcttgtgcattcaaaaccgatttcttaccttgtttattcggattgtagttgctcttttccttgttaggaaagttgcacttttcagctggactttcttttatttggaaacttcttaaaagagaagcaattc

SEQ ID NO: 385907 - DNA, 601 bp, Cannabis indica
atccaaatgtgcttgcacagaaagatctgatgatgcaagggcctgtttgattggcccttcttggttgggttgcaaccttgaattggccaaagtctggcaagccataccatgaaagaggggatgtttgaggccaaccatccctcggcctgacaattggctctggccggccactccagggtaggggatctggccatggttggccaaccctactgtgggcatctgctcttagccggccaaccctatgatggatagggcccggtcgcacgttcttccttgattggacggtgcagcatgtacattgaaaaggggtagatcacaccaattgttggagttaggggggtctaagtatctgaagtgactggtctcacttctcaagttattgtcgtcttgagtgtttccacccgttctaaacctagccgattaaagattggcatttgggttgctcggtctcggatgttctgggatgggagttcacctcattggccaacagaggtgcaccactaaggggctatccaccaaaggttagccaatcagcggtgttgttgttggaaatatttttaccaagatctagatttactaacaagtatgtttcattaacatc

SEQ ID NO: 385908 - DNA, 1941 bp, Cannabis indica
gtggcaaacggaaattcagactcattgaacgacacactgtgggctatatatagacgaccattaggatgaagacatttgtatcctttgtggtttggactatatccaagaaagacacatttggtggatctaaaatcaagtttgtgagtgttgtaggcacgaaggtgagggaagcaagcacttccaaacaccttgaggaattttaaatttggggtaactttgaacaatatttctatgggagatttgtgtgccaaagtgggtgtggagaggtgatttatgagataggtggatgtgctaaaagcatcccaccaatatctcaatggcatggaggcttgtgatagcaaggtgaggcccatttctatgatatgttggtgtttcctctcggatttaccattttgtgcatgtgtgtgaggacaagggtgtctaaaatgtacaccaattgactctagaaatggtgctaagtttcgatattcacctccccaatccgattggagagttttgattttggcatcaaattttctttctacaaacttttggaagttgagaaaggtgttcttaacatctgattttaacttaagagggaatatccaagtaaagttgctatagtcatctatgaagtgcacataatatcgatatccttccttggataatatgggtgagggaccccatacatcagtgtgtatgagttcaattggtgattgagctttagtgtgtgaagagctgtaatgcttgtatttggatttgcctatgtgacaagcattgcaaaaaggtatggaatttttgaaagagactttttcattaatcaacatgtgttttagtacattgatattgggatgaccaaggcgcatatgccacacattgacgtctgaattgaaggtagactcagcaaataaagaaatacacctatgagtttgactcgatttatttgttactgtgggaattttggcagtgtttctgctcttggaggaaactataaagctcgagttggtgtggacagtgacatgtgatgacgatgatggagtgattttcaattgatatagtccgttgttaagcactccccgaagcacttcctccttcgacattagatccttcacaacacaaaaatcagcataaaattccacatacaccttgttatctttggttagttgagatatagacaataagttcttagaaatttcaggtacacaaagaatgtcattgacaactaagcagccagtggagttatgaatcttacttgaaccagatctggtaacagccaagggaaaaccattaccaattaatagttgagtggtacctttcaagtcagttttatgctgaatattggaaggttcagatgtggtatgattggtggctccactgtcgatgtaccaagagttgtcagcatgagcatctgaactggtgaaaaaggcttgttgatcattgttagtatgcatgttgttgctgttctgagagcctgaagattggctggaaccaggagccaagaaggagatgtcgaatcggtggtaacatttggaagcaatgtgcccgggtttgctgcacaattgacagatgggtatgttgttgttggagcgtcctcgaccgcgtccacgacctctggagttgtaagaacggccaccagagggttgattttggttgtgtccttgattgctgatgttaaaggatctgcgcatttgtgtggcaagatgggcagcaggcatggatgaatcaccatgggcagagttgagttgttcaagtcgaatttcttggctctgcagcatgtattgcacttcttgcagtgttacttggtcatgcctagatgtaagattcaccacaaccgcttcatattcatggccaagacctcccagaatatacaagattagatcatcatctgagagtaattgacctgcagcagacaaaccatcagctatgtttttcattttcaaaatataatcatgtatagtaaga

SEQ ID NO: 385909 - DNA, 1400 bp, Cannabis indica
cacaaaacccaacatgacttaaccggttatactcaaccggttaaccagttctcttcaagaaaacccttaaaaactttgaaactcgcactaacgttttaccccaaattacaccaaacttttacaaaatacctaattaagccaacaaaaacataatacaaccagaaaattgcaaacgaaaaacccctagaatcaagtctgtcactaatgacctaagtttgagacttaaaagctacaaaccttggtctatctcaaaccaaaacaaaccaaaactagcaataaaatagttcaaattaactacaataactaaaacctaaaaaaaaaaaaaactaaacccaagtaattcgtacagtaacccaattaagaattttgcatgacaaaacttatcccaaaacttaaaattcaaagagaagaagaagaagaagcttaccttgagctttgatctttcaaatcctatgaattttctagccaaacctccttgaattgctaagaaaaacttgaatccccttaggcctaggtgccgatcctaggagagagagaaagacttggaatttctaattttttttttttggtgaaaatgcttagtgttatttggaataaaaaatttatgttttattcagttcataccattaattactaaacttaagattattcaaattccactcaaaataaaagataataataatctaggtaaaatgaccttcttaccctttcataaccaagatgtaaacaacactccaaggggtaaaatggtcctaattcataacccgagatatttctgatattccaaatgtctaactctagggccctgatatttctaacgtacaaaactatatttaagtggctgtacaggtcatacatcgcatttcactattaccgggcataatatatgaaaattttaaaatttcacatacatcataattaatacacctagaatttaaatatacctccataatttcataaattataataaaaaatttatttctaattataaggcctaattctcataataaagctaagcagcaattacaacagaggtcaaaagaattaaaacagagttgaaagagcataagcggacaagaaaacacgcgaggacatgaacagagttgagtacacgtggaccaatttgaacgagagtagggagtggttcaaaaaccatttttgcctataaataagagacccgtgtgtagggtttatgccctaaaaatcttgtaaagatattttcccattatgaataagagttgaacaatttgatatatacatgaatgttacgttattcgtatttagtattaaataatttatgtataaatatcagaatattccttattcatacatgaggttgttgttggaaattatttgatgctgaatctcctttgctgttgatctttcttcacaatcttcct

SEQ ID NO: 385910 - DNA, 1363 bp, Cannabis indica
aatgacctaaaccaatcagggataaccacgtggtaaattacttaacacttcaaagtcaggtacgtacaaaagtttcaaaattataaattaagtattattatcgttaaaaattaaacttaggtatttatttacaaatgggagttaaacttatatatttgtgtcgtaaattactctaattagaggtaattgaaagacttcagtatcactctttaattctcatacccctcatatgaattgggtgtaattacttaaatatttccattttaaggactataaattattattttcctgttaattactaactattttttccaaataggacattagaaattcataagtaattaccacttcatatctaaacacatcttgtattttaaaatatagtgtgattactatgttgtgtaattactaccacagtaattacactactcagtaattatacagttacttccaaacacactcttaatattgtttggtgttaagagaaaagatataatgatgtatttaaaattcaaaggtaaaattactaaattattttttatataatatataaaattactaaattatataatatggaaggatgagagttgaccctaagttaatttgagtcttagaaaaaataattttttgggttcttattataagaataaataatatttttaaaattttttaaaacaatatgtatatttattaaattatatttatttttatttggatacttaagatgaatgggccctagactaaggccctacgcacgggcttaatctactttagcctaggacgaccgatcctgagaaggatatatattgtatatggaattttctataaaaagatttgttttgttataaaatccttcattttttgatggatttattttggaggatttggagggatagctctttcctcaatttttcatttccctctcatttgttttcttgtaaaataattgatattcgcattcctcccagcccttttccttctaccctcattacaaaaaatttaacttttagtcaaaacaaaatttataactaaaagtgaaaattaaatataaaatattattcttatgttattactaaaaagtttgtcgctaaaaatattttattcataaattataatttgttgtcactaaatatatttttaatcagatcacttattgtgactaaaactaaattaataacaacttgcatgtaaatattactttttagtaacaaataatttttattgtgactgaaaatgatatcaagtcacgaaaatgtatatggttacaaaaaattatcactaaaaatagtaattttagtagtgcctttccatccttccacaattttttcttacccaacatagtataagtgttgggttttatgcc

SEQ ID NO: 385911 - DNA, 1011 bp, Cannabis indica
aaaccctacaataactataaatataaagctaggtatagaatgaatgttctatcatgcaattataataacaatttaataacttaataagaaaccatttattaaactaacatgatcaaatcaacataaacaattaatgttacaaaaatcagaaaaaaaaaaaacttacttatttcccttaatcttgaaccaagcctcagcacagttcctgtgaacagcagctaaatcatttttacaagaacaacccaattcaatcggagctccagattcatggctattactctccaaacccagatggcaaattcgacaatctctctctactttactcaaatgcactttaatttcaacttcggattccccaaccagaaccgaacaatccgaaaccgaagagactcgccgagaatccgaaacgacaccgtcttctacatcagtaccactgtcgcatacgaaaccgaagctacactcgtcgtaggaaccacccgtggtggaatagaactgggaatagcaagacccttcatcggcgtcggaaaagcattggctgccgtcgtcgcttccggtaactgaacggcggtggtttccttgttctaaatcaacgtgggacattttttaaggctaaatttcgtagacccagaaggtgaaaactatcgaaaagattgtaagaaagaaagagttgatcgattaaaggatttaaagaaatgggtattgtattaggtgaccctttttttggctcaactccattaacgttcttctctgctctcccaccgagaagttgattagttcgaagatgaggttagaaacttgagatttggattgaagaaggaaataaaagaaaaaggaaaattaaattatattttatatatattgcatgagagaaatgaaaaagaaaaacagagagagagttgtgtttggtatatgtgggagtaacgatggtagtccgacacaaagactcatgctttgtcaaaatttaaaaaaataaaaaattcaagtctttcaaagagtaaaaacaaaaagggt

SEQ ID NO: 385912 - DNA, 1294 bp, Cannabis indica
gagagagagagaaaaagaaatggtgacaagctcaactcctccgacctaggattcgttctcttcctcaacttttctcgctgatcaacaccatccgatgagtatgtcatcgtagatcactctacctccgtcgctacttctccattcgaatccgaagatctgaaccctaactattcagattcttctccttttggtttgttcacgtcaagaatgggaacgagctttggtagagatagagcatgaggaaggttactctcttcgtgaatgaagacagtgagtttctaatctgactggtttagctcgtttccttttctctagtagcaagcttgtagttcttagatatgtgattacttattgaatttgcgtagatatgtggattttagaaattagctgaatcaatgtctagcatgaaactgttggaatttatgccctaaaagtaagtaactaatggataatatattagagtaatatatgaaatacatttataagataaataatatattaattataagagtatgattactaaatatcataaatttctttattcatatggaggagatataatcttgtaggatttacaagagaataacaggttatggcatgtgctcacctgattaggtgatgcaatatatgagtgtcaagtatggtacggacatgcctgattaggcaatacaacatatatgattatcaaggtaaagcatcgacttgcctgattaggccattatgatgcaaaattaggtgattaccagagtaaagcatcgacttatctgattaggcaatgttatgcaatatatgcttactagagtaatacatcgacttgtctgattagacaatgtgatgtagttaagatagttattctcattttttatattagtattatattacgtaacattgaatgtggttgcttaatgacggtaaagtggatatttaattattatacgtatttcttttgctacttttcttgttgagtccccgtgactcacgggtgtttatggtgtaggtaagggcaaggtgaagttaaagcagccatgacgcaacagtcttctctagcaaatgtacatattgactctatcggcctatgtgctaagttgctaagagttgttttgggttgtatctttcgtgtattttgatttcatattttaacttgtcgttgtatatagtctttttgtaaaatttctataacagggatcctcagaacacaattttagtgtcgttatgatgtctgttttgtattttatcttagtgaagtttttaatattatcatagattttaataattaattaatctattagtacta

SEQ ID NO: 385913 - DNA, 735 bp, Cannabis indica
atggccccctagaccctagactcgaactcaaactcggaccacagacctgaactcaaaatcggacttggctccaggacccgagacttgtacccgaacctcgaactttagactcgcaccctagatctgacccgacccgacccatatttttactataatattctaactacattaaaaatgtgtaatgttaattccttaaaaaaaggtgaaactcaaatatttcggttagttatattaaggtaactaaaatttatttaaataataaatttaaataaaataaaataaaatattaggattataaaaaaatcatatatttctctttggtttggtattgttttttttttagataccagtatgtataaataaaaataataacagataaatgcatatgtctatgtacataaacaaattttactactactattactactaataataataatatagctagattatgatgatataataaatagttatttttataaaataatatatatatatttatttttacattctaaacaatttttttattttgtatttttacagaaatttacatagtaaccacgagagcaacttaaaccgtaaaaataaaattaaaaaaatgttatgtgaggtgattctcctaatatataaaattctcgttctcatgcataattaaacaaattttatttggtacgctgtattatattgtgttcgattgtattgtattgtatttgtattatttaatgtaatactata

SEQ ID NO: 385914 - DNA, 1338 bp, Cannabis indica
tttttttttatatttattgcatttatttagttgtaaatttatttatttttcttacaaaaatacttgaaaaataattaaaaacaaagcttgttctttcaacataagcaatttttacttaaggaaatttgaaaaagttctcaaccacacttaataattatcctagagagtttttattaagttgtaagtaagtaaaatcaaataggcttgggaacaagtgaaacgaaaaaaaattgaaaaatttaaaaaataattataatatcttcatgttataagtatgctttgtggttgtagtttctgactgatctttcacatcaaaaatttgtttcttgagattatttgtgatatttgtgacattgcatgcatcgttgacaacattgttcaaaacatcgtttgataaaaagagtagtaactttaggtaaaattgaatgtgttttttgaaagcttaagcataatagaataagaacctaatattgtgcaagaaaaaatgctacttgaatatttttcacctatttcatctaatttcaaaccatgcattattttgcctactactaatgccacttattttgaacataaacctccaatcattcaattgttgccatccttttattgtttagaaagagaggatccttacatgcatgtaaataatttcttagatatttctcaactttttattttcaaatttttttcggatgaatcagtcaaacttaggttgtttcttttttcccttaaaacatagagccgaagcttggttaaaatcacttcctacaagaaccataactacttgggaaaactttttaataaattccttgctaaattttttctcatgtcaaaattgataatttaagaagagaaatctctgaattttatcaaatagataacgaagaattttatgaattgggaaagatttaaagatttattcttaaaatgccccaccatgtttttgaaaaattagcacttgtaaatatttttatgatggtttaactccctcaaaccgacaaatgatacaatctatgtgtttatcgagatttttggaaataaaatatgaacaatatgaactaaagaaataaataattaaaagagaaagagtaaaaaagaaaaatagttttttgtgtggttagggcattaattagccttagtccatgagtcagtattatttagtagctctctagtttcaaaaatcctttgagaatacaaagaatatacgttctcaagtttccctgagcaaagtttgcaagggagttcaacgctttatccattggattctatgggtatttatagtggtaggagaattacattctatttcattttcctctattggggagtttacagtaaataata

SEQ ID NO: 385915 - DNA, 789 bp, Cannabis indica
aagacttgcgacttttgttgcattagatgaacccatgtcattctaggaatgtcatcagtgaagagaataaagtacctgttttggtcatttgatagagtacgcattgccccgcaaatgtctgtatggactagctccaatggatttttggctctcaaagctttgccagacgaaaaaggttgacgttgttgtttcctgagcatgcatcctttgcaaactatgttgatctccttaactgttgggaggtcttgcatcatattattctccttgaggatctttagcacgtggaagttgaggtgaccaaatcttttataccataaccatgactcatctgtctgcgcttgcattgccacattgcttgcatatctccattgtatagaaaggcatctattttctttcattttcacctttgcaacttaaaagaatttatcttgcttatcatagattgtgcaagaatctccttcaaaatgcaaagagtaccctttttgaatcatttgatctactctaagtaggttttgatccatgttgggtaccaagagtacatcattgatgtatctcttgccttttttagtgtcaatggaaatggtggctttgccgactgcttccatgaagtcaccattaaagattttgactctagtcttggatctatcaagactacaaaagctgctttcgttttttgtcatatggttactggaaccactattaagataccaagtatcttttccttcttctgttggagcttggcagacatagaagagagtattttcatcatttttctcttcagaaaaatta

SEQ ID NO: 385916 - DNA, 1321 bp, Cannabis indica
actatattcggcacaaaaatcactacaagaaatatcacttttaccagtacagttcaccagcgcatttcgcaaactgcgctagcaaagaggtaaaagttttaccagcgtacatttgcagtggctaaaatctaacttttaccagcgcatttacgcgctgggaaaagtcatttttgccagcgctttttattttatgctggcaaaagttctaataccaacattgatttgccaactcccttttgccaacacatcacaagtaaattctattttaccagcgcaataccaacttttgcaagcacaaaaatatactggcaaaagtgacatttcttgtagtgaaaattattttaatgtattcaaaaaaatttaaacaataccaaaatacgtataagtaataaataatttgaaccaaaaagtacaaacattcacttaaaatagcgagtattcaacattgagttaccaaaacaaaagaaaaattaaaaataataaggacagaaagaaatatagtgattcagccaaatctcagtctagctcagtctactgttgcaaatgatttttacttagtttatttgatttagattactcctttatataaaaagcaaatgcccttttagttttacttgactgattggtcttagaaccgtttagctttaaataagaataaacgtaaaaaaaataaatgaagagcagtgtaatccgttcttgtattaagtgcaacaacatatgtgacgtattgagcgcgggttgcctattcatattcttgcacaagcttgcgggtttttggtgcgttttatattcactaaacggccaggcctatcgcttggatgtctacgtttaccttgaatcacattggtggacatctcgagtgttgacaacatgggacatgcaagtcttcgttgagttgtcgaacacgatttgtcattcagaccaatctctatgtaaaaaagtgatctttactagacgttggagaagactgtttaatcatcacatatatttcgacatatgtgcgacttgtataaatcttcttacgcaagtacacgtaatcaagtagtactcacacaggtgaggtcgatcccacaaagaattaaactgaatactattaaattagacttatatttctatttagtaaacaaataattttgatgacagtcaaaataaggaatacatcaaaataaaattaagcaataaaaaatgttcaatcaaagatgagaaattagaaagacgaatcttgttgtttcaattacccaattgttaatgctaattattattcatctttcttaaagtgaatgacagattataaaaattaacctaactcttttcagatctt

SEQ ID NO: 385917 - DNA, 689 bp, Cannabis indica
gggaaataaattttattttttaaaaaatacttttgcatgcgcttttaatgcgcccataaaaaactattaacacttttgtagacacattcaaagcgcttaagaaagtatttttaagaaaataaaatatatatatatataatacaatatatttttcaaaatcatttcaaatacttgttatttttacactaatatttataaatctgatagtttcaagtatttgtaaatttaatattgcattcatttcttttaaaatgttcatacatattattgctttctaaatttgtaaagcttacaaaattgtaagaacatttcattatgctagttaaattctaaaatagtaatacaactacacaaaattagagaatcaacccaacatattaaaattttaaacataaatattcatatgatgtgataacattcatacaatattgtcataaaatttcacatattgcattttagacattggatgaaaaggcattaatagcatttgaaggctgatagttgaaacttgacaaatgtttctttaattgctccacaagcccttcaaaattatcttgagtctctattagtttttgtgtagcagcttgaactttatatagattataaacctatttattagcagctcttgttccaccaattgccttcaacctagatattagacctcttcctttcttataacgtgaacgggt

SEQ ID NO: 385918 - DNA, 830 bp, Cannabis indica
tgtatgatacatagataccctttatatattagaaatttaattttggccgaactcattaataaataaatttcaatcctcagtctctttttttagtgtttagtgttttaaaaagtgatgtatttcagaaatttttctaaaacaaaataaataaatatattagtgtaaaatggtctaatatttaattttaagttttttatttgtttttaactaattttcctttaaaaggtatagattagagagagaccatatatctataaatgaaacttttatcaaataattaaagaaaaaagaagatggtcactttaaatctcaagaaattaaagattttttaataggacgtgaagcataataataattagaggttttacattttaaaacacatttttttatatatatatttttacggaattttacatagaaatttttatagcaactaacggagcagtacataaatcgcaacgaaaatttgtatagtaccctacatagaaaccaccagaaaatttatcagaaaaactgaaaacgtaaattggaaaaataaaagttaaaaaatagtatatgtaataatttctataataattattatagagtaatgtgactcgaacccacatcattgtgtaatgtgtaatacatctcaattaatcaagttatgaatatttgttatttataatacacctaattttacttaaataaaaggctaataaaaaaatttattttttatttttggtattctcgaaaggtgtaggtcctaagtacaggacttaacctacttatatctagagtcggtcctaggtacatatattattattattattatttattattattatgtt

SEQ ID NO: 385919 - DNA, 1148 bp, Cannabis indica
tggtggaagttcttttggtctttgcaactctcccaaaaagttaagatctttgcttggcgggttatccacaatgctctaccagttgctacatctttagtgaggtgtaagatcatcacggactccacatgttcagtttgtaaaacatcttgggagtctattgggcacgcactatttggctgcaaatatgccaaagctatatggcgcaacatgaatctaaattttgactggagtaaagcatctgcaatgtacaagggagactatttggtaaatctctcaactatttacaacaaacaggagatggaacaaattatttgcacattttggtcaatttggacagaaagaaatcgagttgttcatggctttactgcaaaaccagcaccaacacttgcttccttttgctgtcaattatttatctaatttttggacagccaaaggaaagtaccataatgcagccaggaagaatgctcccattcctgcaccagcagctgctaatgccccatggaaaccaccaacaggcacggacctaaagttgaatgtagatgccgcccttgatgctaatcaaaatattattggagtaggggttgttgttcgtaattctgcaggtcatgttcttgttgcattggcaaaaccaattatcggtaattttgcatctaatgaaatggaagccaaggctatgttttatagtcttaattgggttatacagctacaattgtcgattgcaatagtagagactgatgcgcttcttgtagcaaacgccttgcaaaaaggatctactataattacttcctatcatgatctattaattgatgtttatagtcttttatcctttttctctcaagtgaatgttgtccatgctaaacgttcagccaacatggttgtacattatttagctaagttcgctttaggggtagatgggacttgctcttagttggaggatttacctatacctttttactttgttattgtaaatgacattccagtttaatttaataataacaagtatctcactactaacaaatattcgttttcgcgacggttttaaaaacgtaattttttttgggaccgtcgactaaaaaaattaagtaactgttcaaaaccgtcgggaaaaataagcattcccgacggttttgaacagtagcaacaataat

SEQ ID NO: 385920 - DNA, 683 bp, Cannabis indica
atttatgtcacaaaagataatttaaagcaagtttccaaaaagcatcaaccgacgattttatttattatttcttttatcaaaccaagtgtgttgatgatattgatgaggggataagtgagcatgtcttcttctttatcaataatagaaatattaaaaggtatctacgcctttgtgaagtgtaatatcgctattgatgcaacacagtttcacttgttttagtttaataaatattataaaaaattactaatcaatgaaaatatgtcattgtaatcatagtactagacattataggtgtctcataacaaagctctattaataaaaggaaagatacaaataatctcctgatatattgttccattaatagtccatagtacctacttctaactactatagtactactgctacacctaaccttcataatataaggtgggaacaaaaataaaaaataaaaaagaagaattttctgaacatacctttaccctttttacaagaatgaattataaacttgcaaaacttgctcatattcttgtaaaactggatctatcttttgaggatctgaaaatttggtaaccggaatttcctatttgtttttaccttagaactttattttgatgtaattctatttattttggagtgccttccttaaaaaaaagaatgaattagaaaatagtttacatagtatt

SEQ ID NO: 385921 - DNA, 1118 bp, Cannabis indica
tggggtcacaagcctattggccaagggtgtcgtcagaggttgagatcttcacctttttcctgacaaagaaagtaaagaagatagatgcacatggtttagaagtgctcgtagtactcacgcatgttagtagaagctaaaatctggccagccaactctctgaggaaatggctaaccatcgacatcatcaagcctgggtgcaccgctgttcattaaggcataactacgcataaacaacgagatgcaagggatgttttggctaggtggagaagttaagactagtcgtgttgatgatgaacaacttataaaaggctttcacataagtccagctcacaaccccgaccccttaacctcttgtctcggtgccagtgctgatgctagtgcgtgattagtcgtcgacgactacttccactgtcttttcactgagccaaaaagttgatgagaagctagcattgtaggatcccatggtggaggctactgggggtctttctataatgtcatcactgcctgctaagtttttgggttggtctagttatggtaccgtgggtggaaggtgcattgtgaaggctaatcacttttggcgaaggttgctgacaaggaattctgtcattacgatgtaactataaatccagaggttacaacgaagaaagtaagtcgagacattataaaccagtcaggaagtcttccagagtaacacttaccctaagtctgagcctttgccttaagaattactaagcgccttgcaatcccccaggggaacagattgcccaggagatcctagggcgcactaagttgcacacgtcacttgaggcttcccagagcccatgtcgcatgtgcacgttgttttttgtgcatgaaagatcactgggcatacgacacatcttcaaccatccttcccggaagagaaggactgcttgaagtctgtcacacgcccagtgatgctttcaccctttggtcttttgaagcaaagttatctcttgcatttttatgcgactttagccttccctagcggaagttgaggtttgctacataaaaattcaacatgactctcgcctgcactgttttttgtgcgtgaagatcactgcgggtatgacacgtcttcaacctccttcccataagag

SEQ ID NO: 385922 - DNA, 799 bp, Cannabis indica
tacctaaaaaattaaaaaaaaaaaaaaaaaaaaattagtaattcttcgagagaaactttcttatcaaaattatatagttgccctcaattaaagaagtattttgatacttaaaatattttgttaaactgaatgtgaaagaattgttctatattcttaaaagttccaccacacactcaatattaggagatttggttcatgatgtaaatattaaatcaagttaagcattactatcgatttgcaatgcaaacatggctgcttgtgtaattgctcattgtccctccacaaaataaatacatagaaatgttatgatataagacttaatataattagagagcaaatctaatctaagaatttttctaataataatattaaaattataatatatatacaatatacatctttttaacaataattttaaaaaatatgtacataaatatatatatcataacatattatttttatgatatatatacaatattccgataaaaagtttttttaataataatgtttaggttcactatttttttatggaaattgtttcataaattatagcaggaaaggaaaaataacaattgagatcttgatcaatacaatttgaaaacaagttttttttatatatataatgtatatatacatatataataacttttaggacctacctaatactatatgacagtagtgtttaaagagtaaagaatatgtatctaaaaaataaagaattacaccaaattgagataagaaattaattaccttaaattgattatgcagtcactcctgttattgatttttttttttttgg

SEQ ID NO: 385923 - DNA, 1355 bp, Cannabis indica
ttttcataacttattaagaactaaacatctaaatatcaagcactcactgacaaccatgatagagaatagcatatttaattgcattacaagcagatccaaatacctcaatccatgacccattatgaatacctaccaatcataaaccacagacttccaaacttgcaaactcttctcaatgtgtgacgaatatctagattgtttaaataggcattatcaattgtgattacaaaaaacctctcaacaccccactgttttaagcaagcctcaatggcttcatattgtcttcctattgtgattgggaatttgataaaaattcaaaatcctcctgcaatagttattcaatatcgagaaagcgtgtagtcaacactatatgacaagcaattaaaatgagtcattggtcaaggagactatttgtgaacttaaaaaaaaaaatcaaaaactcattttttccctcttaatggtaaagattcgtgatatctctagctagtgctatgcattgcatgatagagaggatcaaacttagggcattcaacactaaaaaataattcaaaaccctcttgttccaaaaacctaaatgacaatcacatttgcacatggcaagcaaaccaaactaaacctccaccactacatgattcatacctccagcccttttagccaattaactgccaccaacttcatttgaaaaacacaaactttagcattttatccttcaatctaaatgggtatttcgtaccttggttgtacaaatgattccataatgtactaatccaacttctccaacaagtactagcatattctcacagtaatttcacaaagccctaaggtcaatttgtttccatagggtacaagtcccaaactccggaatgttcactagtttttgttttctgcaatctttggatttggcaatcaatggggttagaacctaaatataatggtcaaatgggagggaattttcatagatgaaactaactactatgctgcatctttaaggaaacacaaatcaaaacaagaaatcctgagagcataacatcacccagcatacattataaccataaatcctattaggggtataagcatatggatgagagattacacaatcccatagatcaaagcaaagataaatgtacctcgaacagaagagaatggtgagaccaagcgccccagcgagactaccagaccgaaacttgaacaaaattctgaaagcctggaaggtcctagaccatcaaccggagccctaggcgcggcgacacggcggtcgaaggagataattactgtggtaggaactcaggcaaaggaaaagagtggtaaaaaaagccctagaaattagaaagccatttctaaaattatgtaaataa

SEQ ID NO: 385924 - DNA, 892 bp, Cannabis indica
ttttttctaaaaaaaaaaatcaactaggagcttcctctacatctttcttactatccttcaagttctccatctaaactctcccgcctccctaccaatatatagctggtagcctggtaataatgagaggttaaaatggaaaataataaaatgaaagaaaagagagagagatcaatcatgttaatactgaactgacacgtggtataatcaacgaaagaaaacaattcaattaatcgattataaaattaaaacgtgcaactgtcagccattttacaatttatgctccccatgtcttgttttttctaattgttaaattattttatataaatatctatttttattttatggcttttgactaataagaatgtccaagttcatttatcaaattttggtttagttgtaaggacagcaatatattttaattctaaaagattttcataacgaaaacggccggggtaattcgaatcataatttttgtacatatggcattttctgatgtcacataagccattttttttttcgaattattttatacattagtataatatatattttatcaaagttttatttgtttttaagcggtagttagcttgatattttatttgagaacaaaataaataaataaatatttgaagaaggcctgtaattgcggatagtcttagaaaacgacaagaataactaaatgcatagctattatgtatgtaaataaaacttccttggtattagtaatggtatacacaataataatatgtatataataagcaaatcggtggccgtcttaatcatacgtgagtcattaccaaaatttaagagagattattagtagttgttctcctaaaaaataagcaaaataaaaattaacaaggtgccgtttggtaatacttttattttttaa

SEQ ID NO: 385925 - DNA, 589 bp, Cannabis indica
atttaaaatatacatatatagaaacagtattgaggaggaggaggcgcgtacccagcttcaggagggtatggataagctccggctggtgggtatctcccaaaagctaggtacccgtgactgggtccggcagcatgacccggtgggtaagccatgagaggttcaccagccactgccttaaaagccggctgagctggagcttgagctgtgaatttttccccaaatttgtaggtgaagttgagattacctttggtttttctgtttggtaagcggacgctttaactcatgtgcttcccaccactaccgtccttgtaattatccagaagttctttgattgggatctggacctcgccgatctctttatcgccgaagttgcgatcggagaggagctttattttgagggttaccatgttctgttgtacatatatctttttttaataaaaaaacgaaggtttttgagaaaaagaatattttattaaggaaaatcagtagtagtagtttaaaattttaaataaaagatatatatacattaataaattatttaatttaaaattaatatacgatattgttggaatttattttaccaggatct

SEQ ID NO: 385926 - DNA, 1365 bp, Cannabis indica
attcttgctctactgaagagtactttttcgcttctttaagccttgtgctcttgggttattcatgttcatgagggtatttataaatgctggagatgaaaaccttaagtcagtggttctaattgaattttagttaagtttgttacgccttaacaaactcctttaacagagatctccacgtcagcacttacgaagatactctccaaatgtggaacacactttctagactaagtgaggcgtgttcctaaaaggatgaggttacatctgggaacagctagccttcaaagagtctcgttcctggaggacgactagctttcttgaagcttcctttttcgaatagctagccttccaagacttcctttttgggaggacgactagctttcttgaagcttccttccgagaatatatagctagccttccaaggactctctttcctggaggacgactagattccttgaagtttccatccatagcagaaaaaattgaccttactggaacatccttccggatagcatccagcttccacgaagcaccttttgggaaacttaagtttaagagattctaagtataatgactttgcttatggtggagttcaaaccaacaatgtacaaaaattgtgtaatttaaatgtgtatctaacatttattgtgcactttatttaccttctacaaaaagtcgggaatcataatttttttcaaattaattataaataaaaacaagtaactactaaaatataattaatattaaaattataactaaactaacttcttctctttttttcttcttctaaaatatggaacattaaaaaatataatagctttagaattttaatgaaaaaagtcataaaacaaaaaataaaaaaccatatttttgaacatcttttaaaacaaagctatacaatttgtaatttcctttatgaaagaggtaggaatgaattttttttttttatgaggatagactttgcgaggacccgatcctaatgggtgggttgcattccttacctaaacggggtatgggcgagaactgacacaactttttttccaaatgttaaacgagatatgactgaaacaacactctccaagctgactaacctcatcaatttgactttttttttgttctttatgttaagttatcatcatccatgtgttataatttcaataacatattagtaattgttgtagatttttattgtattttaaacaatattctattatcatatttttggcttttttaataaatgactctttatatgtgttattgagataaatttctcattgtcgtgaaaaggactacactaaagagaacttgcagtgttaaaagtgttgggttttgtgccctaaataaaacccattacaatctgattagtta

SEQ ID NO: 385927 - DNA, 1093 bp, Cannabis indica
acatccattcgccatctgtgtttaatttccatgcgatactagaagtgttggaacattagagacaactaaaagagtgcaagaagctgctacaatgttttaactagaattgtcctcatacggtccatgaaggaaatataacggtaagtcgaaacatcttctcaaccagcattgggggtggtccgagaagaggatgaactagatccacgggtaggcgtagaacgaataattgaacctatggaagaggtagaagaagtgtgcatcagtgataaagatgccatctaggtgggaaaaaatctgcctccagttgtttaagaaggaatagtctccacagtcaagaagaacaatgatgtattagcttggagtcattctgacatgactgtaattattcctcatgtaatttgtcacgcactgaacgtagataccaaggcatattcattccgacaaagcaaagacctttagatccaatgagagcggaagcagcaaaaacaaaagtagacaagctacctaacatccacttcctaagagaagctttatatcccatatggctagccaatccgtttttggtcctaaaacctaattattcatggagaatgtgtatagattttacagatctaagcaaagtttgtcgaaaaggctgtttttcacttccacaaattgatcagatggtcgacgtaacttcaagctacaaacttttaagcttcatggatgcatactctagctacaatcagatcaaaatgaatgtagctgactaagaacacataagctttcagactgacaaaagcatttgctgctacaagttcatgccttttgaattaaagaacattagagcaacttcttaaaaattggtcaacaaaatgttcaaaaatatattagagaataacatgaaaatttatattgatatcatgctaagtaaagttaaaaacttgggtaaataccatttggaccttgtgttttgcaaaaatttcccattagactaactgttttgttaaatgacaaaatgaaacttgtattttctaaaatattacaaataggaacctgaactgattttttgtcaaaataaaacttaataataatctgatctagagatgttatg

SEQ ID NO: 385928 - DNA, 823 bp, Cannabis indica
aggaatcttatgtatccatattgcaatagttactcatatccaatttcaacgtcatacaacccttcttaccctttatctttcttttcaaatagtgcattatttcaaatgccaccataatattatcagacattaaacgtgtagggattaagacactttgagcctcaataataacatggtgaagcaccaccttgattcgattagccaagacttttcaaggattgttcttcttaggaattaaaacaatactagtatcagttttcctctctgggaacacccatgtttcaaaaaattccctaacaaacttgaccatatcaccacccataattggccaaaatttctagtaaaatttctggctcataccatctggtctcagagatctatcttggtgcatttgaaactaagctccttgaaccttcacctataaaaccacttctaggaaaacatcattttgttttggagaaatagaagcttgaatatcctcccaaatatgcaactctctactacctgcctacacattgactcccttagccacacactcaaagaaaaaaggtggctttccaaccataggaacattagtacttggaaccaaaaacaaaggccaatgatcagaagaagaaaaatcaagataaataacttcacctttggaaaaagaaaaagccatgtatactggtaaccctaaagttatccaaccactcttcaatccagttatccgaatcatgtcccttctcccatttatacaggtacccttaaagttctaagtcgataaggccacaatcatttaatgcttcctagaaactttctatcaaccaaacaggataccttc

SEQ ID NO: 385929 - DNA, 693 bp, Cannabis indica
aatttgtaaaaataattaaataatttgtaatgttgtaaataaagtttaaatattttattaagtatgtgaatgtttttttcttctaaatgccaaaagaaatataagatgtatcataacaatccttttcgggaatgtgctgcaaacttacccaaatttatactactcattttcataaaataaaaacacctacaaaataaaatagggaaaaaaagtatggaccaccccacatgctattcttttgaatgcatgatagtgggcctcaagtaacattgaatatgacctcacaccacaaacaaaaaatatttattataacaattaataaattgatttcttattaaattactattttatgaactttaaacttcattaaaatagacaataataaatatttttgattaataatcccaagacttttgcacatttgttaccaatcacatcctcccaaatcattatctatggtctttttttttttgaactcttttatctattgtctctaaacgtgtaagatcgtgcatgtctttcatttttgtccccttttttcttcattatattacattgatttaattaattaatttccttctcatttaaattaaaattaagattctttcaaaaaaaataaattaaaattaagaaaatggtttgagcaccgacggcctatcttgtcattcattttgtacattatctttttttttt

SEQ ID NO: 385930 - DNA, 916 bp, Cannabis indica
ttcctcataataatttttcatatttaaatgagtaaatactatttttgagcttatgttttgcaaaagttaccaattagacgctctgttttgttaaatgacaaaatagatcctgtattttttaaaattttacaaataggaccctgaactgattttttgtcaaaataaaaccaaataataatctgatctagagatgttatgacaaaactggttatatttttttgtatctgttcttgttagaaaaagttagtcatattataaaataaaattgttgaaaattgaactcaaagttctatttttaccattttaaaaaatatagggtccattttatcatttaacaaaacagagagtccaatttgtaacttttacaaaacgtagagtttaaaatagtatttcccctatttaaattgttggattaattttttcattatccacttaatcaaaaaatgaccaaaaaaagtttgagttaccactccaacagctgataattgcattatggtgaagatgttggtcatgagaatgaaccattttgggaccaatggcttggccccatctaagaaattggtgaggattaggccctcagctcggttgccaaatgcccaataaccactgatagcaacactaaaaaaggtcacaatcaccactgtgtagcaaatacatagccctttgaacatttttcccttaactggtggtgctaatgttgcctgtcaaacaaattcttttataacatatattttcacttaattactataaaatgaaattaggaattgatattacaatgatgctccttaaacaattctctacattaaatgttaaatttatgtcaaacctgaatttctgggatgataccatttccatatgttgtggaaatgatagcaatggcattgaagattccaaaaattttgttctctgtatcacc

SEQ ID NO: 385931 - DNA, 1602 bp, Cannabis indica
gaggatttgaatcacaaattctactgagatttctctctctctctagaaaaaatcacaaatttgaatggagaagaagagagagagagtttggtgttcgaagctgagttgagagctttgatttgattttggatttttgagttttgattttcgaaacctgtttttagtttttttttttttgggtgtaaaattacgggggagggtttgaagtgtagtggtttaatttgaattgaataggggtattttcgtcatttaatgttgtattactattatcattcacgcccattggaacatatgagtagtatgcttattttattttttattttttttaataaataatgaaattttattaatagtaatttattaaaataatagtgtttaaggatgttttttttaaattggtaaaaacaagagctagagtgatactataagcagtattatttgcagaacgtttaacaaaatgaatctcaaaaaatttggaatcaatttacattcatgaactaataaaccaaaaagagaaagcatataacgactagacaatcagttttaagttgaaccctaacccattacttccttttaatccaacttaaagtctctaatgctaaagatctcaaccatagcagccttaatacaccccaacttactaatagagaaagcctccataaaatgaccatggtagtctcggaccaccccaccaacaccataccagtcctctgaagtaaaaatagtgccatcaacattgacctgaatcttgttaatatgttgtttagactatggctccagccccacattctatgtcaacagaactaacaaaggaccattcttctttgattgagcagatttccattgattaagatttactctagtcgacatcactaattcaaatgcagaggagctctttcctctcgaaattatagcattgcgcgcgttctaaacagcccaacaaaccatggctacttcctcatgaatctcaacaataacaactagtagcaagttgccaaaccagcttcgaaactccccaaacgaataacttactgaactaatcgaagaccggttctagcaagtttgagcaaaagaacaagaacctaaaaggtgaaaaataatttcctcctcttggttacacattggacataccaaatcaactggtacatgtttggagaccagatgggatttcatagctaaagtgtccgagagagcacgccaaagaaactgtaatcatgtcgtttaagcatgttgatttaacctcatagcacactgtaatcatgtagacatattgtttaaaaaatatttaaaataaattatgtaagaatgttgattttttcttttctaaatgaaagtataatttcgttaggacgaattgtctaaaagaatatatatatatataatatatatataaatttagtaggaacagatttctcattgaaaattcgatctacaagaagttgtagcaaaagtatgagtaactttattagcagaacgataagcaaactaaaaaaaaaacttacactcaaacaactaaacaagtgttattaacaactaatccaaacggagagttatcatcaactgtctgcaaatagcctcagctagggctgaacattttgaacg

SEQ ID NO: 385932 - DNA, 798 bp, Cannabis indica
agagagagagagctagggtttcagacttagcacttcagacttaaagagttctgagctaagagcttgagacttagaacttagtggaattaggtttattctagtgctctttatataggagagcttacaagagaataataggttaatatcccttaaaaagaggacatattacctatttattacataataaaataataagcaaataatatattaattactccccaagaataggtaaataactgaactttatccctattttcgtgggttgttaaagcctacctaatttgtggcttgtagtgttgtccaggatacaagctgcgtaacaagtgccttccagggtcaaggctacacaacaagtgcctaccagaatataggctggtcggcccttcctttgttggaggtcgggcgacctatgctagccatagggtcgggcagggctttcggccaaaccccttaagttggccagttcgttgtctctttatcccacttaagtattcaaactccacgtcaactgatatgttatgtatgttgacttggccttcgtgctgacaagttgcactccatgtggcattagtcttgcccacgtggacatgccacgtcatgtgggcaaaagttgagataacagttatataacaaatttgtaagttttttaaatgggtatgcctgatggttttaaaatgtcaggtatacccctcctataaaatacccaaaattcatcgctatttctctcacactctcgtctctctcgatctctcttacaccaaatccccttgaagacgaaagtgttgggttttgtgccct

SEQ ID NO: 385933 - DNA, 649 bp, Cannabis indica
aaaaaaatatttctgagttgatcatcaccattgaggatgatctaatagtgaaaatgacttcgaatgatgatcgttaattttcggaggttgagttgtgtcagttggattgtttttgagtaatcttaaaaagtacaattgtcttggagatgaaatttaggcttaaaatatttagaattacaatataggtgtgagacttgacttgaaagagctttaaaatgcaagttgaatcgcatcaatcaagttattattgagggagatatacctattttacaaaaggctattcaacaaccaacgcctaagttaagacccaaggtccaggttgacatccaccatctaggttgatattacctggatgttgtatgagtgcaaaaacgtgttggacttatatttttttaagcctacatgatatgtaggaatgttcataaaatagccaatttaattcaatctgcacgatccaatccaatccaatttgcagagtgcggatatccgtacttgtgcggattgggttggattgaaaaattcaaaatttgaacttgtgcggattgaatgttgattgacatgtaaaaataaccgatccaatctaattcacacatctttataaaaaaaattaaaaaattatatatacaaataatattttaatgtaaagaaa

SEQ ID NO: 385934 - DNA, 1377 bp, Cannabis indica
atttaatggataccatcgcaccagtatcggtacacggtcagatactattttacctgatatttttacacaaataacagtagtgaaaaaagtaaaagaaaacctactaattcaatacatagcaataaaattaataacatactaacacataacaatacaattactaacatacaacctgctaatttaacctcggtatttctaggacttcctgttgtaccctttaccaccacacttgctccagtttcattgcaacacatttttttttccattagaaggagtttaattcgtcttaattcttccaaccatttgcttcttcagccaccctaccagtttcttcttaacaggcactccaaatttgacgttcttgatgtcatcctcatcacaaacttgcataattgttccttcatatgtactcctctaatattctattgtgtactattgagagcttagtgtgtatatgctaatacttccttgttgagctacaacgcatgcatgaggacatgaaatcttcatgatttggaataggccagaagtgtatgtttattcctggaagtccactacaacacctctctcaactaatgctctagggttaatatggaatgtataagatccacttgtgtcaacatttaagtacaaatatttctcaaactgcaatgccaagtcctgctccatttatggtgatagagtcgtcatacacttgggcaattatttctttccgcgtactaaactactctttaactttcaaccttaggaattcaagagaagcaatgattgagaaggctcttgagtccttagttatgctatttaagcttttggcctagttgctcgacataacgttgtaatagtctcctaaaaattatgactgagcccatcactctaatccaatgcccgaagaaataatgaaacgacaacatccgttgcttttttcttctcaaattctctatgaactctgttttataatatgaatacgcacaagtgtaaatatgattcatgaatttgtcagtctagaacttgctagctacgttcatagtaatgtggtggtagcatgcaccatggtgtgcatcagagaacatgagctccaaagtatgaaaaatactttggtgccaatctaatacgatggctaagttctcaacatcaccaatcgcttctttcaattttctcatgaaataggtctaagagtcatgattgtcactgtcaactatcccaaaagaaatcgggagaatcggctatctaaatccaatgccatcgtgcttaacatgtgcccaccgtacctagtctttaggaatgatccatcaacacatacaacaggttgaaaaaacctaaatccacgtcaacaagaatccagtgagaaaaaataatacttgaagcgaccatactcta

SEQ ID NO: 385935 - DNA, 1613 bp, Cannabis indica
aggtaccaagtttgccttggtttttaaggcacaacatggtagtcgagcgagtgtgttggctgttctgtcatctttaggggcttcccttatagtacagactttgagctgactgaacagctcaggtaggccatcatcttcttttattgagctgtatattcacctaggacataacctatgactagttgggagtcatggtgaatgtctaggtggttagctcgtgctttgtgtgctagcctgaggccagcatttggagcttcagcctcgctattagaagctttgaaacttaccttgttaccttgtgcctcagttggccccaggtgccctgggtccatgcctgcattaggcagggggtcaatgcacctcttgggttcttgctctcgcttcttctctggctcctgcttttctcctgaacattgagacatttagggagatatgcctatatgattagccatgaaattggtgagagcttgtcatttgtttgcttgattggtcggcctgatgcttcagttttctgtagaacccatcacaactattgatcggtgtatctagaagtatgccttcgcttttttgaatccaagagcaagttgtgggtcagcttctccatgagtgggtaccgacttttagcgtcgattagtgtcttgctgatgaagtatacaaggtgttgtacaccatcttcgtctcttgtgaggataacactcataacatgttctgtgactgctaggtgcacgcgtagctcttctttgtctagcgatttggtcaacacaggtggctgagccaattcgtttcttcagctcttggaatgcgatttaatattactttatccattcgattttttttgcctctgagaatgttgaagaagggtacacatttgtctatagacttgtgttaggctatttttagcctaagttccgggtcgatttcataagtgttttctaagttaatgttgccttttcgaatggttttacacttgattttccttgtttaggtccccgaggcattagacttcaaattgcataaattgttgaaaagacgaggcattctggagaaaaatctgctgaagctgtcaaagtagcttcagtagtcacgactggacttacccatggtctcgacttgggtcacgactaggagactaggcagagagcatagattttccagttttcctaatggtcgcgactaggctttatgtagtcgcgaccaggggcaaaacacgagatttttggcaagttttgaaatttcgtcattcagatgtagcaaccctaatttctatttaagggactcgcgttttatgattaagatcatcagagattagctccgaaagtgaaagaaggagcagagaaagctattgtgacgatctggagcaaaatcaccatctagttctttcttaactcttattttttatgttaatttctgttctagatttgattatgggtgtaaatatgggttttatgaactaaactcctgattggggaagaagatgaatgttgattgatgttttgctttgttaatgataattgctattccttttgtctcgtttgtgaaattatccatatttgtgtgtatttccatgtttaagattgatcaccttctacatgttctatgatctcaattcaaaa

SEQ ID NO: 385936 - DNA, 2089 bp, Cannabis indica
gagtctaaatatttctctagtagccttggagaaacttcctattttagtctctagtagagtcagagattctggataggcttttacacttctccaaaatcacttctccaactctagagtaatcaccattccttgatgtagactttctagcaatgacaatagtctataaattttgagtccggtgtagtccgtaaaagggttttaaagtaccacccttatagattcacagctgccactcaacaatagatgtctagtctagtgcacaccagagcgtacataagacctctactttgatgcttaaagaattctttcttggcctctatctttctagaatagttggtgactattcctaattaagataaatgaactcttatctctggaatcaaagagacctccttgtgagagagaaagtaatttattatttcacgtcggataatttcttaacattattttcgatgactaaggtatcatctacgtaaatactagatataccaaaagttataggctttgataatctcatcaaacccatgatactaggaacaggtttgcttaagtccattgaatagaccaatttaactagcagagtttcccttcttttgtccccttatattttgaaaagttctggtttatccatatgaatagttgaatcgtagttatcacgactttgagtcatagttccttattaggactattcattgcttgtttaaacgaacaatagatcgtcatcactagtgtcatctaaatcataatgaggtgggatcctagaaactttcccaatacgaagaggtgttgtggctttttatccaggaacatcagtggtattaacatctacagttgtcataacttgcatcgattcaactgagacagtggaatcatcttttacagttcatagaatatgatggaacacttttagatttaaaataaatagtatctccactactatgctaaaagattttgagattacgtatatagtcatattattagaaaagtagtatttacggaaataaatactttcttgtcttgatgaatacaaaatagtctaccctagtcactttagaatagccaataaaaaatatgcaaacctcagttacatgttctagcttttcttaaggacatgatcagggcatccatatatagtaatggtgtacatcaagtatatgaccattgcatcattccaagattgtcttaggaccagacttagatgggatgacatctagaatatcgttgttgcctctaagaatattcctagaaggactcttcaaattgctagtaactaatcatagatcttaccatttccatcaatatgtgagttttgattttccggggaggtaagttgggatacaatttgaagttcaactaaataatttttgaactgcatatctaaatattttctcgacccttatcagttagcaagatctttaataacttacctaactagtttttagccgttgctagaaactcatgaaatttctcaaacatttaaaatttctaacttaagttatatatctagagtaatcatctttgaaaatgacaaagtactcaccatcaactcggaaaacgtttcttggatctctgatcggtgcattaagccacactcagtggtcctcagtgagagaattttgccctcctctcgctttgtcttttcagaaaattctatgcatcaattcttaagatttctgccatgaatttggtttcttaacttaattataggaactcggttcgcacttcttattcgttgtggttttaatagggctgttttgagtttttagtcggcccgtaatatcgcccaaccattttgttgaagagagacgcatgccccaatccccacctccttttttttcactgacatatatttttagatggattgtcaatctcttggatatatacacacttacaacagttgagaagataataaatgatcttaatcattataattcttaagattaaattaaaatgggtttaagtatttatacgtatgagatgatgatacaataaggcacattaataagaaattgatgatcaggcacagaccgaaaataagagcatgtttggtattgtttttgtttttattttcaaaaaattgtttttagaa

SEQ ID NO: 385937 - DNA, 2777 bp, Cannabis indica
gctaagaccctcagatactcagaacaacaacaacaactaagattacagtgcacagttcataagggagtttaggtggaaattgttgaaataaactcccttcattccttgtacactgtaaaaccagtttattacaaagagagttacaagacagtaaaaataatttcctaggtggccttcggcctctaatatacctaggcagaacacttaagttagttacaaagtatttaaccactttgtaactaactctcatgttttttactgcattccactattacaacatatatagatcaacatgctcagatcagaaaaaaaaaagagagagaaaatcagagcagtacaatatcacaactccagattagaataatacagaggaaatacaagaccaggttatgagggaagagacttacaggggagtaagtcttggagcactttgaagtggtgctcggagatccatcaaaaccgatcagaaggcaacacaaacaagaagaacaaggaggagttagtgtgtattttacagagagaaaaagagtgaaaagaaacactgtaaacaccaaaaatgattaccaatcgtacctgtgatttggaatcgtttcattgtaacttttgatctttgaagatttatagtggaatcgagctatctgaggcgagctcaagaggacgtacccgcacaattttggggaacctctataaaatcggtgtcttcttctccttttatttttctgcacttttctatattgtgtttgtatttttctgggttgaaaaaggggtttttttattgttgctgtttgctgggtttgaattttctgggttggtgttcttcatgttcttcatagaagaacattgacgaaggaggattcggcttggggtatatgtgttgctgggttttaattttctgggtatttagttgtggctgttgcttttgtgttcttcagagaagaacgttgaaggtggctgctaggttctagtttgagtgtgagagataaagaaaagatatatatatgattgatattagggtttcttgacatatgtattaaacgacctgtattacaattgaaaaagggatgtcgttgggtttaatgagcagaggtcaaaaaggagggctttgactgggtaaaggtcagttttgaccttggctttttgattaatcttgtgttgtgtgtagggacaagttgggaacaaaaatcctacattagggtttatggagctctaattagtttgctatataaagaacataagagtggtcctcaaggctaatctcgactactcttctactctaagaacccatagagagaagattagttaagagatcatatacgtacccactatctcatctcatatccaatatcatagaatcatgtatgtcttccatcttattgattcatatagagtaactttgatattctaacatgagtttaagatccatacatattttatatctaattaaggcactaacaaaatccaccattgaaaatatagaaaataaagttaatgtatcagcactatgctcatataatttagtcattgtcatattatatagatatataataatttgctcataattatatatttggccgattggctttaaaatatatattaactgcggcatttgataatgttaatataaactttggtttaccaataaattttactaatttttctataatgagttcattaaaaagacaaaaatatatagtactgtacatatatagataaatatatatagctttatagaccattaattcaaaaactatggataatattcacggtatattatgaatgagtcgactggcacagtaaatacatatataattcaatattttaaaattaacttcttaaaaaaaaatcagatccaattgtcgtagctagaagatttatagttagctccaagaaaagaatataataaaataattaactttgtagttttaggcggacaccattgtaaactcataaccattattgattggcttaatcaattctctctataaaatgggagcaaaactttcgagttagagaaaaacatataagaattaaaaacacatacatatatattatattaaattatagtgctttaattttcttattatatatttaataaaatatgggaataatgatcagagtaataatgatttttgtaggcatgctcttattccagttcttagtcgcttttgcagacaagggaaccgcaactttctacacacctccatatacccgtaagttaaaagagatgtattgatacatctttatctgttttttaccacccgaaatacaaattttttctgatgctcatgtaaattataagtatttaagatattccttaaaaaaatttctcgtgtaaacagtgtgttacacgcgtgactattctatttcgaatgaatatatatatataggactttagttcacacccaattaagtacaatatttgtatatattacagcgtctgcatgcaatggattcgaagaggaaggagttatgatagcagcagcaagcgaagccatatgggacgataagggcgcatgtggaagaatgtataaggtgagatgcatcggcggcaccaaccaaggtgtttcgaacccatgcaggggtggaggctctatcgtcgtcaaaatcgtcgacctttgtccctctcctggttgtcgcggaaccattgatctctctcaagaagcttttgctatgattgctgatcctaatgaaggaaaaataaacatcaagttcactcagtaagtaataactttgctaataattaattaatttataataataactttgaagtttaatat

SEQ ID NO: 385938 - DNA, 1610 bp, Cannabis indica
aaaaaaaaaaaaaaaagttctattggtcattacctgatcacttaaagagatgcacaaatctcacaaatgacatgcccaaattacagcaaaaaagacccaagctaattacctaaaatcaacagtccacaaagctaacccccaaagtgcagacacaaccgcgccaaatggtaatagatgtaaaactgattgacccccaaacttaactaatgtatactatgaataagtggttaaaaagttttacaattaggcaatggtgccccatactgaataagcacaaccacttaaatgtgaactattcaaaagaaatattagtcaaacaatcataaagtaaaaactataacaccgccatcttcccctctcgattagaattgagtattaaaatttgggaataaaataaataaagtattattttaaaattaattggtaatagaaagagtaactcattcattttatatatcgcaatttattttaagaactaactcttaatagtagagcacccattggaaagcagcgccagccatgattagtcatcttcatatttcaataattatcactgtcatcaatacgtgccattattgaagatttggtagttggatatcaatcaatcaaaaatagttggagtaggtgcgcacattcaataaattttaatagttagatgtagtccaaatattatgttataaacttttgtgtcgtatttttcatgagcttgaatctttttttatatgataaaataattattaatgttattagaaagctactacactacgtatatatttaaatatgtattgtggaaaattagagcactagttttataattttgtctttgtttttggcttttcccattaagttatatttggtttatttatgggaaatttgaattttcttgcttaataaactcataaattggtcccctaaactaatactatccataatttgtaaagtgggataactttttcctaaatcccaaaatacccctcccatttttcccaactgtccctctctcttcctcttttttccaaaaaattgactgaccatcggactagccatcgggctcgatatcggactggccattgggctggccccatcggactggccatcggacgggcatcgggcccacatcggacccgattttcaaaacctagaaataagtcaaactagtgtacaatcgggcacactatcggacgggcatcgggcacaccatcagacgggcatcgggcacaccatcggacccgaccttcaaaagccagaaatgagctaaattccacgccagacccgatttgagaggagtattttcgaggttttgcaaaagtagtcatacattttcaatgtaaaatagtattagtttagagaaaaaactatcccctaatgcatgcatagaaattcaaatttcccatatttatttatttaggatgatgaacattgcaagtaaggtaggtattctattagtatttcatcttttttttttttttaataattcacagtgccaaaacaattatttataaggaatagttagataagacaatattttttttaagaaaatttacatttttacgtttaaagaatttttttttttcatttttacagttatccataaaaacaacacgaaaaca

SEQ ID NO: 385939 - DNA, 2718 bp, Cannabis indica
tcgtatctcacttgtagtcatcaattaattttccttttactagatttactctttacataaaataaatcaaacaatgatcaataaatattattttttagaaataagcaaatcattttattataaattaatttagtgaatcatttgttatcaaataaagtagaataaaaaatttaataaactaatgatctttagttaaataaaatagaataaaaaaaatgggaaaatgagagaatttaaagtagaataaaataattagaaaaatgagagaatggatagagtttttttttcaattaattaatgatctttaataaaataaagttgaataaaaaaatgcattcatagctaccaagccataactccatgatagggttttggtaattggatcaaccctatgagttaatgaaatttaattaaaagaaaaagttgaatgaaaaacagagaaacgagagaatttaaagcagaatacaaaaattacaaaaatgagagaatagataatttttttttcaatttttaattaattagtgatctataattaaataaaatagaataaaaattttaataaaaattaaaaaaatgagagaattaaagagaaaatagatagatatatttgaattaattttaaataatatttatttacaaataatttaaatatttattgttaattaatatctcttaattctagttaattcaaataatattttatttttttatgttaatttacaaaaataaatacatcaaacaacctaaaacaaaaaatttatttaattaattaatcagataataataaataaaaatctaatttcaaaacctattaaaattatccattaataatctttctaactaattgatatccggattgccaaatgaagtgtatgtagcaatcacggaagggtgctatgtcaaattatgtatggttagtatataccttctgcccctcagcatgacggaaggtgttatataccataggctacccggaagctcttcctgttagtaaaggcagaaaaactctgggattctcattaataatcctgttataaagaaagatcaagagtcataagtgctccaggatggttgcaggttagcctggttcgggaaagccttagccatatgttcttggaactcacttgggtgtatcctatctagagctaaatgcgatagttgtataccttctaataccaaatcagatcttgtcccctgattagaccatggtagtgcgcgtacgtgctctgtagctcttttttatccaacggcttgtctagacaccaactttacaaggtgaaacttttgggcaacatgtgtccttagtcccataaattggattacagcagttgaaaaacacacgatgaggaggctccttacctaccaacggttagacaaccttgttataaatatcagccattaaaacgtgcagtaacgacgtaatgattaggcaccctacaattatcttttgattattgtgcactcctttgctaatcaaagagtttcctcaaaaatcgtgataaattaaaatttttgattaacgttattctttaataactttgaatatataattatacaaatgttcgagataccgcttttaaacttgtttacatgttcaaaataaactttatgactttatcgtacaacaactacaaaataggcccaagtcgtctcgagactaaactctctagtttgtaccatcttgacatgtgcaatcatcctcgagctccaaactttttattgcttagccttagcctttcccttacctacacatgcaagcagtaactttgaatcgtcagactcagtaggaaaatcatataacatacaatatactatcgacttgtatttcggtgcccatacacccatccacaaggcttaacggatgattttgaacattcttaataaaggtaagacctctgtaccacatgcgcactacgtaccgctactgtactagtgttggtagggtttgaaccataccccgagtaccacttagtgttgtaccacatgcactacgtaccaaaccgtaccagtgttggtagtaccagcttatgctcttaaacatcatatgtcgtaccacatgcactcagtaccgctaccgtactagtattggtagcatatgaattatataaacaatatgcatgtaatacacatacacatgtacatatatatattatatgctaatcttacctcgtttttgaatttaagtatgccggttgacctgaatagaaaattatgcgctgaatggaaaccctatgtcacaatcatacagaacatgtaaataactttctaaaacctttctagtgatctaaaacaaaacctaaaagttttcctatcaataaatagcatggaaaaactctaaatatcgaggaaaaaagagaaaattgactaaacagggaaactgcctgaaaaatggcaaaccgtttttgtcaaagcagtgaggcgtttttttgagtctgcactagtaaaattggtagactatttctgctgaaacgatctgccgtttttaactgtagaaaaacaaagagtcttaattcaactcaaaaccaccccaaatattccaaaactctctagaatacctataaacatcaaaataaatcatttccaagcaatagaattccaaaatacatagtaattcgaaaatcactattgtggagcaagtttgagttgaactcaaacttgctcaactccacaactaaacctcaaaacacaataaatgtaacaccctaactatcttaggcg

SEQ ID NO: 385940 - DNA, 2741 bp, Cannabis indica
ttttttttttttttaagatatctgcatctagacttgccaattgctaagctatgcctatgtattacaaagtaagcaagtaaccttagctttctaattatactctctgcttctcttacataattaaagttggccaaatgctcagaggttatacaattattttataagggaaaatgcaataggattgaaaggggccacctcacagaaagattgactttggaagtaaacagaactctcacaaattctaagaactgacatgttctttggtataaaaaacagcatttcacaacagtaacagaatgatcgacgatgctgatacatacaaaaactgctcatgatttgtgcaatgtgaaattttgagtccactcgagtggaagctcattgccctacgataattcattaaagtaaaacccccatataataataataataataaaaagagtatgagacactcaaacaaagccttcaaagtgtaaacatgaaaatgttaatcactaacagagttaaagcaacccacattaccaaagtgacaaaatatacatcaagtcatacaaaaacttcaaaccaaacaagaagcaagtgaagaaccaagaatttggcaatttacactgtacttttaattattgattgcaatgttttcgaatggtgctttgaaatccccttccatttatctaggaaaaatctgaaatcaggacttcacagatcataaaagcaacacaaactttaagttcaaacttacaaacacacacattcacatcaagaaaatactgttcttacaattctcgcaaagcactgatctttcggtttaaaaataggatatttgtgcattatcttatcaaagttcgatactagaatcgatagtaaaattttcaaactgaaaagcatttatatcaaattacgaaaaaccctaaactcaaggacataaaaaaggtagtaagagaagttgaagggagaattttaccagaaaagggcttgcgcttaacagccgggtcgagctgattgcaccatcgaaggcggcaagacttgccggatcggccagagattcctcgggcgatgaggctccaattcctggccccaaacttgctgactagtctactcaaaatggcgtcttcttcaggagaccaaggcccttttactctgtctcttccagctttcccactgccaccatcatcgtctccggccttcgcagcgtcgtcaccgctctcgccaagtccgtccaatttatcggtgtcgatctcggcggcggtggtggtagagtcctcgacagtgtccatttctgcctccgtctttctctttctgaatgtgtctcagtacctaccagacttaactgctgcaagagtcaagacttaagagtgttccaatgttaactcggctgtagggcaattgtttcgggattgattgtcccacaaatttctttttttttacatttaccaatgtgtccttcttaaaaacataataaacaaaacactcccctaactaataagaatgaaaatgctaaatgtatgagcgatatgcctaacaccttttatgtgttattattgttattagtctaattaagtgtcggattacatatagtttaatataataattttaggtagtatcgctaacttattgcaagaagacatgtttaggggtgatagacaccattggtgcttaataaagagaaatgctaaagggcacccgtagtggctagcaccctcctatgtgtcaatatgttatcggtccaactaagtatcgggtgtcatatagtttaatataataatttttagggagtatcactagccaatcacaacgcgacatgtcgagaatgtgttatgcaccaccagtacctaatagcaatgctctaaagaaaacaatatttcaaaaattaaggtgacacacgttttttttttttaattagaacagttaaaatgcttttcagtttttttttattaaggtgacacactttttaataagtttttttttaattaaaagtaatggattaactcatatatcaagaagaaaatattagtaacaaaatcaggactactcattaatataaaagaacaataatatcccaacagttatgtaatcaccaaataaatagatttaataagtcaataaaatacccaaaataatacctagcatccatcattccttattctaactagtacaccatagtccacacactaactgggataatattattttttagtctcaattaattggctttaattaatcaattagaattctaaatacgactatgtcttgtttgtaaattttcactaagcaagggcttatttgagaagaaaagaagatttagggtttatttattaattaagagactttgtaaggtctaattaataaataaattaaatgaaaattttatttaataattaagtataattattaaatagatagaattgataattatagagttagaattaaaatatgacgtttgtaaaaagaaagatgagtttaaataaaatggtaaaattaaaactcaataggcccagtaatatttaatgctaatgcttgccacatgctacacaataagaaaaataaagtaaataagacatatgattttattgaggtacaattcactttgttagcgggtataatgaccaactacccttttagttgtattgacaccagagataatactactcagatcacaagtgttgtggaatctataatagccatcttaagattactgtaatgaccgctctagtaatgtggattagaaaaggcaattagcactaatt

SEQ ID NO: 385941 - DNA, 1320 bp, Cannabis indica
ttttagagaggttaaatgaaagaactcggaggtgcaaaacaatttgggttgaatatgcacatccctttctttatctatcaagttttgatttgtcttatatatagttactagttcactttggatctaaacctcttggtcttagtctctcttcctatttccatatgttcagatgacaaggtaaccgttttggagtcggagaagcgggcatgggagacttctccggaggctcaagctctcagggaagcattgaatccttggagaaaccatgatacagaagcagagaagaaatcatagttttttccccaagttgaatacttctgatgccaattcttgcattgaaatggcttatgtttccaatcccatcctatctcttgttgactagttttatgtagtcaaattgtattttattgcaatttccactataaatgtaatcataaaaattcattgtagtagtgacatcaattattgaataaagatcagagtacattaatcattttattattattttttcttctgtaagaatgtgagttcagtaagttggtgttaggttttttggggcccattctaactacaaatgtttaactaactataaatattaaatcatcaaaacgacctcaagatggccaataaaacaataataaacgttagttttttttttttttttttttttttttttttttttttaattaaggcttgtatctaattacactaaaactttagacctgcaaaaattgtgctatatttactatttagcacaaaaaaatatttatacatttgcattaattttttagtattgtatataaaaaattatagttatgtcattattatttatgggcttttttatttatttatttatttatttatgtatatactaaaatgacaaaaatattacacaaatacattgggtagaccctatacacacttatatagtccagtaacaaaaatttacaaaaataattcttactctatccattcagcctcactaaccaccttcttcaagaacgacaacttccagcaactaacccagcaacccaacacaatcgaaacgaaactcaaccagaaagagaaccaccattaattttggcgacttcacttgagaagatgaccgtaatcaatcacaaaaggggctgtttcgaattcatgaaaaaaaagtgtagaaaaactattacaaaactaaaattcaaccagaaatttagtttaattcgcataaaaattttgtcctgacttcaatttttaaatccatgaaatgcgaatttcaaaaagttgaactggagttcacaaacaatccaactcaggtattgtttcccctgattttgtcca

SEQ ID NO: 385942 - DNA, 2412 bp, Cannabis indica
cttgtacccaacttaaatagagtaagtgttttactattcctgtcatatatatctataatttacataattatccacgtataaatgatcgatgttattagaagtacgtagcagatagaaaactattacaataactacacactataaatatgattttaaatattttaatttaataactgcatgccatcgagaattattgataatcactcgtgaagtagcatcttgtagtattgtaattgcaatactctattccatagaaaaaatgttaaaaagaatattagtactggtgttaagtggtatattacaattggtatacacatatttgtttggaaaaaaatgtttttcagtattagtttcctctgtgtcatttttttcatcgattcaatttgacattgtgaaggaattggtcccacattcatatataattttacgttggtgacaatcaaagcatgcaaaacatatagtgtatgtaaagattcctgcattaatttcttccgtcactataattacacattattatacatatagttaatttcgaacaactccgtgattatattatttattcatttttattacaatatattaataatatgtaatactaaaaaaatattatataatttaatttaattaataattaaatatatatatatatatattttttgataaatcaccttagcttgtaatgcattacttcaatggaaaatacaactatttaacacaaatacaacttttttttttgataaatcagcttaaatacaactatttaacacgcaaaatctatttacaacttttcaaaccaatctatatcctcttgccttatcttcttaggcattgtagctatgactctatctttaacattagcgttaatttcttttacaattgtatctatagtttgtactctttggttccaaaaaaaatcatttctatttcactaaatactgtatatagttcctgccattgttggctatccatgacattcaaagaataagtgggtgacagtttctgtgttatttcctttacatattttgaatctaaaaagtctcaatttcacctgcaatctttccagaatgaccaaccacatgataaatttatgtttcgacttacttagtcgactccaaaccatatcattccagtgaattcgttctcttgagacagaaaacaagctctatccatgtcgtatgttatactttatagttataaaagattggaggttagtcatacctttgattttattctttatctctacaatatgcctccaataccggctgctatttgtgggtgcattatactcccaccaattagcctctctcaagtaaacattatggatccattcgacccacaaattatcttactttctagcagcaacccaaacgtatttttcaagtgcagctttgttccaagttaccacattcctgaagcctacgccaccagttaattttttttaaaaaaattaataggtattaaacatatttttgtcatttttactggcttagttattatattttgtcattttcttaataatagacatttactaacttaatttctaaatttaggatcattttacatctcagccctttatttattcattaatttatacaaggtttaagtgaaaatataatataacgtccccgcttcaaacttttattgggctggtatgtagtcatatacctatacagtctgagaatcatcacacatgaccttctccaggcggtgtgggattgcatagtttacccgatatttttcttactgtcatatataattaaaaaaattgattggaagagaaaatatattatattctattattgataaataaaagatttaatttatttttctaaataaaaaataatattatttaaataaaagtctaaattttgtaattgtctataaatagaaagagaagagagcttgaaggctaaacaattgagacaaccaaatttaaacaaagcattataatggatgtctgaattcatcccataaaaaaattatgtatgcatataatttgatgtgtgatagtacgaaagagctttttcttttaaatttttgacaaaattgcagaactgaaaaattgtggatacagaatcaacttttatatgaatgtggttttttattaagaaaatagtaaacaggccgcacttcgtgtgtggctatttataaaaattttaaattatacatatatgtgcagaaggaatttcaacacttatccgacatgcagaggaagagagagatatattggctcttaaaattgctaggcatgccccaccaattagtcacttattttttgcagatgacagtttgctcatgtttaaagctttagagagaactttagcatcagtacaaaaaatcttcagtttgtatgctgattgttctggacaggtataaattatttacaaaaatttattgagattacattttaag

SEQ ID NO: 385943 - DNA, 885 bp, Cannabis indica
tggctttttaaaatcaattcaaatttgttttcttttaactccttaattctatctttttatatatataagtcatcatttctatttatctgtttgttttttttttaatatttttaccaaaaaatattatttaaattatatttttattaaaaaaaaaaaaccatcaccacaacaaaaataatttttgtcatcacccggcgaattttagttttgccggctaaaataagggaatttccctttaatcacctttgttagcgagttgtttaaacaagaataatttgccaacataagttaggaaactaagcgccaaaaggtacgattttttggcgagtaaaaagacttgttggcgtagaggtgtatcgacaaaagtccaaagaaaaagacggttaatttttcgcacagtaaaaatgtgagaataaaaattaagtgaaacagttttgccggagcaattaagctcgttgagaaaactttttacgttaattaaacacttattttaatattttatttgttttaaaacatgcgagcctaacttttctagtgaaaattgaagctaaataaaactcaaaccaaatcctttcttcccattttcttttcttcttcctcttttccacttcgtcgtcaccaccataactacccaaatccgccataaccacccacctccaccacctccaccattcccaatcatcttcaccaccatcctctctatctccaccactaccattttctctctttcttttaaatttttttcttaaaaaaaaaataaaataaatcccgaatcatctccaccactactgtagccgccgaaatcggagtcaccatcctcatctctaatttaaggtaactttaaattgaattttaatattatatatatttatttttaattatttt

SEQ ID NO: 385944 - DNA, 1302 bp, Cannabis indica
ttattttattttttttaatgtaattagtttatttaatgcaatatattttgttttttagtaaacatctagaatttgtatttagtaaataactaattatttgttgaaaataaaaagtcattataaaattatcaattagttatttttcaaatctttctttttttttaaaaaaaaatagttatttttaattattatttaaatcttttattattttattactttttggagatcattttatttatttattactgtgtaacttttgtaacattttttttttcaatttattttgcttccttatctttttagtcgatgtaaattcttacttttttttagtagttgttttctaactcgcctatccctcagagtcggccctaactttaaataatataaagatgatgtattataaggggaagagtgtttaattaaataataataatagcactctattttttactataacaagttatttatgaattttaacctttggggactctaaactaagtaagtttttgaaaaagtataacacatttttatattagcgatttaaaattcatttttctaacaattatcaattataaaaaaaaatattatatcaataaatagtaaataatagaatagggaacaaaattttatcaacctcataaatattaagaaaaatataataattataattaatattaataatatgcatggtcaatatttttaaagatattcttaggagatttttttaatataacaaaattaataataataatatgaaaataaataatgcaactttaatattattaaatattgaaacgtttttaaattattatttattgtattaatatgttttttaatattatactaaaaaaattaaaagagccgcgcgaagagcggctatattaacacatataaaaataaaaattgaaccataactgagtcaaagtcaaactcaaatctgtcttcttcttattctttggattggtctccgttcaagaccattaaattgggtaccaataaaatgataaattaaattgttaagtttaaaaatttgagaatttatgctactattttttgaattccaatttttattagcaatcaatttaatattttaagtatttatgtcacaatttttttaatagtaaaattaaaattttaagataattttactaagtaattattattaattaaattacataatttatttttacatataatttaaaatattttacacatccgccacgaagcgcgggatgtttactagtatatatataaaggagaagtataaggcagtgacatagcactctaaaatcactcaattta

SEQ ID NO: 385945 - DNA, 1851 bp, Cannabis indica
gacttacataataattggttaggatcatatagagattattcttattatttatggcatggttgttgtggaaatggtagtattgaaattattttttgatacctttaattaatttacaaaatataatattagtaatataatactgatattgatcatattgagctaataaagtattttttttaattagggttatataataatacacacagatgaaacaaataaataatactaatataataaataattccccatgctaaaaattaattcatcataatcttcaaaatgactgcaaaaatatgtttttgtagtagtattatatatttaagtactgacacaagtcaaataggtccacacaagtggaaatggaaatattgatattagtttaattaatcaaactaaattaaagacagtattttgagagtttatttataaatgtatattgatcttcttgatgtacttaattaggtcttttataattaattaagtatatatatgatcatatctcctaatggaacaaactactataaatcgtcatacagtacatttcactcactataaaaataaggctaattagtatttttttctcccgaactttgacatgtactaaattgtgctccctgaacttttttggctgttaaaaattctccctgaactattgagattgttagatttaagaacttttgtctaattttagtaaaaaaattcttacatgaatgaaagttcagggagcatgatttagtacatatcaaaatttgagggacatgatttggtagatatcaaagtctggggagcatagtttagtatataaacaatcacatacaataaaattgaatgaaactagacaaaaatccttatttctaataatctcaatagttcaggggaaatttttaacgactaaaaaagttcagggggcacaatttggtacatgtcaaagttcagagaaaaatttgctaattaacctaaaaataaataaataaagaagttaaataatgtccacctacgaatagaataaagatgatgaattggaaaccctaaacatttatcctaatttcgactttatgtaaaaataaacatcgagatagtgaaaaattgaagttgttaggatttatactctaattttcagagttattactctaatgaaattatcacctgagcagtaggggagtaaggccgtctctttcgtctcaccttaagatcgatcctgattacagtaatgattatctcgctgcatatatagattttttcataaatttttaaacaatttataataatttaaaatgtcaaaattatgatttaaataacttattgtacaaatattaaagtagactgtttaaattttaattttgacatttcaaattatttaacaatttttaaaaatttatgaattataccactgcgtgtcatattatttctctacaatttatctatgtacgtataccccaaatacttatagatatatatagtaatagaaaatactatttaatgagtttttaagataattagaagattatacttaacatgctttgtaaaaatggtcaaaattattaagtgttggaaggaaatgaataggcacatattcctattaatgttactattggtataattaagtctcaaattttacttaataatttcaaagaatatcgttaaagcgagacgtttggatagtgctagacattactgatctgatgcacaataacaatacttattattgtagttatatatttgagttgtttcaaattattagccgacaaaatttaaagaaattaatatgtggcctcaaaaccaaccaaaggacgaatacccctctaacttgcttacctaccaaccttataaccaggcccggccctgggcata

SEQ ID NO: 385946 - DNA, 829 bp, Cannabis indica
aagcataataatattatcataatgacttaattaacttgattattaattattagtactatatgggtcatactaatatataacaaaattaatgatcttaaattaattgattaatattgtgaattaatatataggcctagcttttgctggggttgcaattcttatcggaatcatgacaacaatgattatggtttacaagcgacgagagcacaatattcaaagggaatccaaagcaaatatatcaatgagagaagacatgaagctaaacgcaaactacatcagcaacaatggaatggcagtagccaagatattcaacacccgagaaataacaaaagcaacaaacaacttctccaaacaaaacctccttggctcgggcggcttcggggaggtcttcaaggccgtcctggacgacggcagagtcaccgcagtcaagcgagccaagccaggcagcaccaagggcgccgcgcaaataatcaatgaggttcgcattctttgccaagtgaaccaccgaagcctagtccagctcctaggctgctgcgtcgaacttgacttgcagcccattttagtctacgaattcgtaccaaatggaacccttttcgatcacattcacaaccgtcacgctaagacagacccgctcagctggaggagacggctcgccattgcataccaaactgctgaaggtcttgcatacctgcacacctcggccataccacgaatctaccaccgtgatgtgaaatcgagcaacattcttttaaatgaaaagtttgatgcgaaaagtggctgattttgggctctctaggcttgtggtaaccgaaacgagtcatatcactac

SEQ ID NO: 385947 - DNA, 1813 bp, Cannabis indica
gtcttggaaggcaagtcttttgggctctagatgggcttgggcccatccttcaatatgggtcaaacctatcctcacggagagactattagttagaccatattgggctaccctgtaaagtcaggatcgacacgtatcacccttcgggaaacacatataatatttacccacaagctttcgggacttgagagtggcggaagcttgcagtcttccttccggattgtcatggacacgtgggtaatttggagaaaagaagagaccttctccatttttacgtttcttggatgtggaaggttgggaactcttggagtacggttaatgtcatacacgtggcattagcctcttggttcgaggaatccatgcacattgaaaaagcacatgatgcttaggatagtgtgttgacggctaatttatgtcagtgtacgtatcgagacaaatgttatgatgaaaaacacctcggttctaatgacaagcattaaatactgacttttccactccccaactgtctaattgctattgtattttctgagatgtcatctaaactgttgattggggaagcactcagatcgacgtcttccacttataaataggggaagaaacacacttcaccatttttttcattttgcatcttgagttgaaaccaagagaaagagagcaaaaaaaccccattctcgcccctagtttgacgacgtccttaaccttctttttcgaatttcaacgagaaaatcaaggagaatttccaccaaatttattgatcagtcattcaagttcgtcaaagcctttgaacattcaagcaggaatcggtgaaatacttgcttgggtgtacaatttttaggccacacttcgttgtcgtaccagagattctactcctgaggttacggtgccaccaatcttaccacctcaccatctccttctccttcaagtaagtattctcccctcctttgcactgttgattattgctctagtattgaaatgcatgttcagatcttgtgtaggagtgatttcttctttgcaagaacagtcttaattaaatgataaaaaacaatagacaaataaggaactatctaattgagtgggggtattaagtatgttgggattatatttaaaagatcattcaagaggtgaatccatttaaaagatttattagaatttaagattaaagagagataattaatttaagaatatacacattatattatcgtttcagaaatgagaaataaatatttttattaattatgtaatcttaaataaaagaatcacttaaatgtgacaagacaaggatgtgaaataaaatagttcattctaaacatccaacttgattagccaagggatctattgagttcattaactttggagtctggaactacattatgtgaaaggtcttgttcatatgacttagcttgaacaatcaaatgagatacaacgtctataagagttatagaataagtagcacttacttttagtgcaactgggagatttttgggatttgtgccctaaaagcaagtagttaatggattatatattagagaatatatgaaatacaattataagataaatgatacattaattataatagtatataattattaaatatctaaaaattccttatttatatgaagaaggtataatcttgtaaggatgtacaatagaattaagattatacgatatgaataaaataagtcggtaacgtattaaagtaatgggaatctttaatatggatatgctaagtacggtatagtatacactatacttctagtgtgtgtgattttgaattcggatcacatatgtggatagacatgtagtaaaggtgttgtgt

SEQ ID NO: 385948 - DNA, 1639 bp, Cannabis indica
tcatccgcaaaaagcaagtgagatacaataggcgcgccattagccactttacacccatgtataaactttctttcctcatagtgttgaattagagccgacaacccctccgcacaaatcaggaaaagataaggagaaattgggtccccttgacgaagccctcggctgggaataatcggacccatggtatagccactactaacaatatgatatttgaccgaacaaagacttccatatatgagccgaacccacttgtcacaaaaacccattctagatagcattgcagtcaagaagtgccaatctactctatcatatgccttactaagatccagctttagcgccatacacccatctttcccaatctgttttctcttgagataatgaagaacctcaaaagacaccataatattatccgtaatcaaccttccaggaataaatgcactctgattaagagagataatacgattgagaataccttttagcctattagccaacactttagtgataactttcgcaaccacattgcataatgaaataggacgcaactcactcatttgatctggttttttctttttaggaattagcacaatattagtgtcattcaaaccttcaggcatcccttcattcaagaaaaattctctgacgcaagcaatgacatccggaccgacaatgtgccaatacttttgaaagaactttgggttcattccatctggacccggagatttatccgggtgcatctgaaacaaggcatcctttacttcttgatcttcaatggggcgggttaagattgcattatcatcttcagtaactctggggctgacacaactaagaacttcattacaatttccaggctcagcagtaaatatttttgaaaaatagtcaagcattagatcccccaaaccggtatcccaaaacttagaagtccccgtttcatctttaagacaatattattattacgtctacgagatgaagcttttgaatggaagaacttactgttttgatcaccattttttagccacaattgcttcgaacgttgtcgccaaaatatttcccgctggttcagagtttcgaatagcacttgcttagcctccgaatacatctttctgccttcactatcacgcctgcctttgaacactttcagctccttgttacagtttttgattcttgctgaaaaattatcagcaacaacagagccccacacctgcaaaatctgaccgcagaaatgaattttctgctgcaaaaaaatcatgcccgaattacaccagcttgcccgaataacttcctcacattcttgaaaccgagtccaatgattttcgaaacgaaaaagcttcttcccagctgcttgaatatgagacttcaagtccaaaaataatggcgtatggtcagaaggagacacttctaaattaaataattttgcatcagaaaaaatggaaagccatgaaaaattaaccatagccctgtcaagtcttgcttccatccaagccgaggtatctcttccaatttgtaaaagtttagttattaggcattgtgtattttttattatgttattgatgaaactaattttttttttttgcctcttttaatgaaataattcgtttattttaatattgatgaaactggtttttaaagttagtatcgtctt

SEQ ID NO: 385949 - DNA, 2538 bp, Cannabis indica
gcatgttccttgggacactggagactcctcaacagttttctagagatacgccactagttagatgtgcgcgatgtagttgcatgttgtgattggtcaggtttctcgaaatggtgggtctttcccagtaactccatggtcctgctcaagaacgcatgcccattaggtcactgggaaacccctagccattttttgaggcacactattcgtcacacatatgcgatttacactctgagaagattgcctaagttctcgaaatggtgggtgtgcccttgtaccttaatttttatgtaacgacatgatcattaggctactaagatacacccagccatttcttgagatgttaggtcatcctttacgcttttagtagtgtttttttatgcaggtgaggtcactttacttgttttcatactctcaccgcactgaaaagatcttctatctttcagattagcaacctgtcggatagccaaatgctcgactcaggcggtggtgcttttgctaacgagcaggataaagaagatagctttataccagcttcgctctctgaagaagaaactcttgtcaccaaaactgcgaccttaggcacgctatcttctgaagacatagaaagaatggttcaggattttgttgaaccagggacgatcaaaattcacgatagcaaatccacggtgtctgcccgggcacacctcgttcactccaggcacgcccctaacatcaaagtcgaggaaatgggggaagattgggaggttcgtgaccgcaagtcagaaggagaggaagatgtcgagggaagcgggacagattcggtggacaatacccaactgaacgaacccttctcatgcgagggcctagtctcgcaagttaccaaatccgacctcaatacgtttacgaggttgaatttgctgcgactcacaaccatgtgtcctcgctctactcaaaggcctcatctccccttcactaatcccgcgataatccccatagaggatgtggttgtctctatacccattcttcgatatggagtatcgatacctttccatccatttattgttgttatcctcaagcgatatgatgtttcttctttttagctaaccccaaacaattatcgcatagcccttgggttttatgcgatgcacatggagtatgcgcgaagggagccttcgatggaggatttcagctatttttatgataaaaaaaatgtgggccacgacaatggcttctattacttcagaaagtgggccacttctgagaataacggggtagaaggctccaacatgggagattggaaatctaagtggttctatacattttgagtaccagggattaggacagattttaatcatcgacctagtacatcgcattttccaacacttagtttatattcatgtcaccttatgaagtcattgacctttgttttttcgttgatcgcagatagaccagcttgacctgttctggatccggtccgcaaagaagtcgttgaggtcctcggtagccttcttgttcaagatcgcgactggcgattgttgtgcacaactttgaagttgcgagaacataagctaatccctaaggacgctagccttcattgggaaccagtgtacaaagagtcgtctgaaaagcaaaaggagagaatagacaagcgtctatccaaacaaacctctctaccaacatcaggtaaatcattgcatatatttgtaatataacataatagatttatacttatcttaatgttttgtcttcgcagaaatgactttcttgaagcaagctccaatgcttaaccgtaagcccaaaatcggaactgcgacgacttctcccatcatccctcagaagaggaagagtgacgttgtcgtggcctggtcaggacaagagaaagaaagtcatgatagacttggctatcagagctcgcaattttgtgactctttaggacaaatttgtgaacgcgagttcgtgtcaagggtggaggcaatccgtactgaggagatcatgtcgttgggggtagaactggccacgcagttcatgactgtattctcgagggcattcgtcgcaggtttcaaagaagttgatctcctgaaaaagaagatcactcatcttcaagagagaaacaagaagctgaagcaggacgtgagctccaaaataaaaacctcgaggacctctaaaagtccaaagagtaggtggaacttcaggccaagctctctcagtcgaaggtcgaggaattggctcgcgacttggagaccgagaaggagaatgggaagaagcagtatgattaagttgtttctaactatatatacacgactatatccaaggtgtcagacttcgatttctgcatccttggagcggaagtggctgagatggctgaagcttttcgtgctatgtcgccaactcagactcaggggtgcggaggaaatctttttcccaaggaggcagagactgcggatactgaggaagtcgctgatggagctgccaataaggtcgcggatggctttactgctccaactacttaatttatctcagtttttatttccttagttatcaaactcttttagcggtaca

SEQ ID NO: 385950 - DNA, 2020 bp, Cannabis indica
aggttgcctctccttagagttctaggaatatatttgggttgtctcctaccccttggtttgcgagttgaaaggtttgcctcgtgaatctctttctccaaggttaggttgatttttggaactattctcctgtgccgccttgactacggctatttcacgttctagttcggcgttacgctagttttcttccaccaattgcatctaagatggaagttttctaactcaacgataggtatgtacctggttgggtcgtaggcgccatcttcatcaacctgattaggacaagaccgaccgttgtttatcctacgccctttgagcctgagcccctaaaactgggtattcccggagccagtggccggttctagtgatgaatcaaaagatccctgaagactcagaggctctttccaggacgatgattgatttcttcatgaggactatcttattcgttgtcaaccattacttttatgttaggaggctttttttgagcttttttcacaaaggctcccaatgaaagcaccaaactgttaacgtagattatcgttaaccaaatttgagcctaatagtgatgagctcacacagataagctaaaaataaaaagtatgaacacacaggtttttttacgtggttttgcagttaaaattctacatagtccacgagttaatcttattcagatttctgatagttttctcagggcctttcttttgtatcattttgtacgtcccctttttcatcgtacgcgcctttcttttgtatcattttttccatcccctttttcatcttacctgccactatttataatcacatagtaggcagttaattacagactgtaatctttttacaacaattatcctttggaatcatgggatctgattacacatcacgttgagtaaacgtagtttttatttaaatttcacacagctatgaatatcccatttttactgggccagaatgaatgagtattaaagatatatggtaagccttatcgtattttaatgcctcactcggaagggagttaagttaaccttaatgacgagcaggagctcatcatatgtcttcctgaggttgacaatgcttttactttaattctgagaactgaaatttctggtgatgatctgatcttttgtcacgtgcagaccctcttatagcgaggtggatgcctcgctatctctcacctttattcacccatttatttataattagtttgtataccatgcattatacactaagtatctctgttgtcattatatctcctccacgtaacgaggttagtgcctcgtcttgtacacttgaagttacatagtttctcatcggggcacaaggcaacagttagtacatttttatctcgcataagactgttcagtcaaccgagttgtaaacatgctctgttaattgtgcttttaacaagttattcaatttcaagtgtaattatgattacatgtttgagttctttattctttctagctcgacacgtgtcttcttttgatgtgcttgccgaatttcgggtataacagtgattaattaaaattttgcttaattattataaacgtaaaataacatacatatgaaattctaggatcccgtttacaaaacatatttacaaaagttttactgtgcataaacaaaagtttgtcgcttagcgaaaaatcaacataagccctgatgtcccaaagatcgtacactccaggcttaactgccctgacatgtacaatcttcatctgcttgctctcacggctgctcagccttagccttgcccttacctacacatggaaatagccattgtgagtcaacaaactcagtaagaaaagcataaacaataacatagcaatcacccgaattatgatcagacgcccatacccccaatgataacccctatccccaatgtcccacacgttgctgagtctagaacattcatacgacagtactattgaccataatatcagcctatactcggtacactagtcataaactagccgtacagatgtgatactgtcaagtactacggtactatcgaccataatatcag

SEQ ID NO: 385951 - DNA, 552 bp, Cannabis indica
atattattagttggttaaggtgagtatttgtttttttttttttttccaacatttactaggctatgcctatgacaatggttgagaatagatagagtgaatttttaaaataatttttatgaaaacttttattagtaaaataaatttttaaatatttttactagtaaaataatattttatggtcataaaaataattataaattacactgtatgacaataaacaacaagagctaattctatctattgcgttaagtgagttccataaagatgattcctggtattggtatttggaacctaatggtgactacattgttaggagtgcttacaagttgttgtagcagttccatggttgttggattggtttgaacatctcaaggctttggagaaagctttggaacttaaaggctcaagctaaagttactaacacagtttggagggcatgtacaaaaagccttccaacccgatctcaattagctattaagagagttcgggtccttatggtgtgtcctttttgttggattgatcaagaatctacatcctgttgggttttatgcc

SEQ ID NO: 385952 - DNA, 1845 bp, Cannabis indica
atttattaaaattaagaaatgaagaatcttattaaataagggataaaagaaagaaaatatttcccccaccaatttttcaaggaatgacattaggtaatgtcttttaattatttatatatatttttttaaatataaaatgtataattactataaaaaaatattaaataaataatgataattttatcttttaaaatatgtcttacaaaatagctactatatatactatagtttaactcaaaagagcaatttagtcattttaagcattttgattacgtaacctgataaagtaaacaagataaattattatcattcctaacagggtgtttggtatgtgagtttgagttagagaaaattgacttggagggaatatgaaattgaagtgttaccactatttttagtttaaaaagtgagactcgcttggaaatacaaagcccttggtaatcaaaatttaatttaaatttgacattctcatttacattaaatctaaacctcataccaaacactcaagaagaatattttttaaaagaaaataaaagataatctatatatactatatatatacacaatatatataatgatatttttggtgtgatttaaattttatttgtaaaatagtttaactataaaaataaagtaaatttgtaatgaccgcaagatttagatatggattagtggggttataaatattaattttattatttttatcattattactgatgattatatgtgaatgtttatgttaaatgcaaaatatgttattcttgtgattttgctcggtggcatgaaaaatgcaacagaggttattttagtcacatggataaatatagaacctattgttattggaaatatattatgcagatttaaatggtgagtttaggcggggttgtgatattagactattttacccctaagtcgttcattgagttagggttaagtgtaagggtagtttggtttttttagtgttatgtataggtgtcattttgttagagtggcagctggcttttctttttgtaggtaaaaattataattttaagtataataatgatatggtttatttggtgtaaaaatattaggaaggatgagacaaaattgaaataaacctagggttacctaccccttctcttattccttgttcgaaccagccttgaagctaaggggaaatcagtgtttgcaccataatattgtggaattccagctagagtttgaagagaatcaagtgaaggtaagaaccttgaattctatctatgttattattgaagttttgttgaaattaggattgtaatttgaggatttcggttctgtttggatgaatttggtttgggttagcttctgtaggtttcaattgttgatttatgactgcttgtgatgttgttgttagctaatattgaagttgagcaagtttgagttcttagaactcaaacttgactcaacaatggcatgatgagttttggtgtgtttctcctgttgtttttgtgtggaaattgttctagaatatgtgtacaggtgttttggaaagtatggttagattctgggaagttttggccgagctggggaatttttggggtttcctggtgcaaaccagtcgaccaattttacaggacctgtaaaaccggttaaccggtttacaggcaggattcccaaaaatgttaattttccagttgtgctattttcagggcttggtttggtgttctccctggtatttagggcattagtatgttatgtatctttgaggttactcttggttgtaagtttagggtttcgaaaagggtttattcaagttatttacccaattgtgtaatgtgacttaggaccttcatttagctcgtgaattttccattcaagtcg

SEQ ID NO: 385953 - DNA, 1681 bp, Cannabis indica
cgtcagtgtcttcagatagtctgctgtaacccaatcttttcctgaatcaaccatccagacattccggtggatttgttcttatgcggatacaaccatcttcatagcatgagatctcatttgctatggtcttattgccagtgtcttggttgggacgaactgtagataatgaggtacttttgttgaatctaccacactcagatatttgttatccttccctggtagcttaaatgccaaaggggttttgggaaatatgacaagtgattcccaatccacaactctgaagcgatcgctagaatcatcagtggtgcctaacactgcctccaatccatccttggtgttaagttgccccaaatcttcattcgagtgagaagcataaaaccctgttgcatggtgcaaaaatttaaagtactctctaactccatctccatcatatgccttgagtggcatgaacatggtagttggtgtgaggtcagcagcatcttcaataggctctacagcagtggcttcaatgaaataacgcttaatggcccccccatggtagggatcgttgtattcttgtatgctcaagtatttgttgttgtggcaacactttatgtgcacaaactgaccatctttctgggctgtctcgatttcgaattttatgtaacgacttgaaatgtcgtctgctagaaaagtcaagaacgtatcatgtacaccctttttactgctctcttctttacttattcttttcaagtatttgttattaacaacagatttgataaccacaaaccttggaagtataaccgacattattgttattactccaatttagtagtaagtaattgccaattggatgaatcaattagtaataataataagttgatgtatataagtagtaagaaagtatgtaatttatagagagacacaaaattatgtgtcattggtcatgtattgatcatcatcatcgatagtatatttaattaaagtttaacaacttattatatatatgtgttatcattattatttgtgttattattaagatctataaattatacacagattcccaaaaggcatagaagacttttactattaatacttatttaagtagacttttaaaggttgtagtgatttagtgtaattaagtctttatttaatccaaatttagtctccttgatttcatatataaataaataacaattaattgcgttcgtacttgttgatctattgacttttgtgtacaatagaataacccaaattgccttttttttgtggtgtttatagtgtttggtgatgtttatagtgtttggtgtttatattatttgtttttcttttttaacttttgtaattcattataatgtaatgcttattacattgagtattataatgatgattacatagtaaaactgatgattacatagtaaaactaatgtaattgccaattggatgaattagtaataataataagtatgtatattgttagggtttataaaacacttaagaaatatataaatcacagatctaaacatattcctaaaagtgctttaatatagaaaaccctaaatcataaatctataaagcctttgctaaattaaagaagaagaagatgataaaatatgagcggaagcactaacctgaagccattgttggagattgcagagaaggttttgatcttccaagaatacactattttctaaagtatttt

SEQ ID NO: 385954 - DNA, 1068 bp, Cannabis indica
ggtatttttcaacttacccctagaataaatgtctatgagcactcctaagagcatggaattattaagaaagagcgtatgccgttttttgctctgaggcagttttttgttcttttatgatttttctttcaattttttgcaatttaaaattccattctctccgattttactgttttgatcatgtaactggcctgctatgttaagcatctgttttgaattttcgttcactaatttcatctatggatccattaacaaacaagatgaaaggcatagtctcccttaatgatgaagagaagtctgtgatttccttcattgatgacgatacacaagaagccatccctcaaatgaacacaccttactagctatcgtccttaccaagaaacccgtttactatcaacactgtaaatacaaatgaaagctcattgagatggacaatttccagtttcaatatctcaaaacagctcgaaaaaaaattatcgtttcagttctaaatacttatagaagctatagattttatatctatgatcagcgctcccactcaattgaactaccgtgttcaggcccaagatgtaaatatccaccagaattatttgttagcttccacgaaaacctctaataacataaataatacaactaagctgaacctaaccatatcaggattaagattcatagacctaagatcaactagtattattgacttagaatgatataacggtaagtttaagatatcttatccaagttaatatcggtccaatccaatgtatactccatacactcgatactggtaaactttccaatgctcttgaaaggacataacacttatccaaggtgtaataccttatcgctgattatcatgtcaatctaaatccagtgaactgacaaatcatgggaattaaacttttgaacatataatcatgattatattcaactgtgctgacgatactataatcatgaacaaatatatatatatgttttggacttaatagaattatacattaaatatataattatgaaataaatcatgtgaaccatgcaaaataaaatgatttctgatattttattaattagtaa

SEQ ID NO: 385955 - DNA, 2555 bp, Cannabis indica
cttacaagttaggtccgagcacgacagctacactttcttttatgtttaagaacactcttcggaggaccatatctccaataaaagatttccttgctctcacatgtttattgcaatattgagctaccttttgctgatgggccattagctttaggtttgttgaagctcttttttctttgatgtcatcaagtgattttgccaggacggcatgattagtcttttagtcgtaagttaatcttttgtgagatatgggttctaactccacaggcagcattgcctcataaccataggccatggcaaaaactgtctgcccaattactgttcttttagctgttctataagaccacaatacctctggtaattcctctggccattttcctttagcttactcgagccattttttcatggtgtcttttagtgtcttgttgaccgctttgacttgcctactttttctggggtgtgccactattgagaaactcttgatgattccatgtgttgtatagaaatttgtgaatatctggctattgaattattttccattgtctgagacaattttttatggaagttcgtaccagtatgatgttttgtctacaaaatccaatactttcatggatgttatggttgccagaggtttgacttttgttcaattggtaaagtaatctgctgctaccactgcgttttcacttttacctttgggcaactttccgatcaagtctattctccatagcaaagggccatggactttgcatctgtattggctcatttggtgatgcttgggggatcttgaaaaatctttggcatttatcgcactttttcacatgggcctttgaatcttcaatcattgtaggccagaaatacccttgccataatatttttttaaattgactttgctcctggcatgattactacaaaaacctttgtgcaccttaaataggactcgtgcagcatcttcattcgttacacaccttaaccatggcatggagaaacctcttctatacattacaccttccacaatgatgtactgtgagttctccaatgttgagataggctggtatggggtcatctagtttggtaaagtatccatcattttgatttccttcgtgcaggtgatactaggttctttcaaaagcttaatcggaactaggttggccttatttgtcactgtgctactcgcaagtcgtgctagggcatcaatagtagcattttcttctcttggaatttcttgagagcaaacccttgaattgtgcaacaaggtcatggatcttacagatataaagccaccatttttcctcacgagccatgtattcccatgagacatgattcaccaccaattgtgagtcactgtaaaattcaatgtattcggcacgtaccttcgagagagctttagcccaacaatgagtgtttcatattctacttcattattagaggctttgaacccaaatttaactgctctgtgcaaaggtttccctaaggtgcaatgagagcgattcctgcgccaaaaagttgatccgtccacatgcagcttctagttaagtttgtcttttaattttcttctagtggggacacctattttggtcctttgtgaagctcgcagttatcttttgaactatctggttctttgctcgtgcattcagccacaaaatctgccaaagcttatccttttaatgttgtataggattaaaaagttatttcgtattgccctaactctatggcccatttgagtagccgtctagaagcgtcaggcttttgcaaaacctggcgtaaaggttggttggtgtacacccgaacaggataagcctggaaatagggccttatctttctcgtggctaagatcagacagtaagttagtttttcagttagggggtcccgaccctctgcctcaactattattttgctgatgtaataaactggatgttggacattattatcttctcttatcaacatgtcacttacagcgtattcaatgactactaggtatatctataattcttctccatccaaagattttgagagtatgggaggctttacgagttgcttttttagttcttgaaaagtgttttcacattcctctctctattcaaacttcttgttacctcagaggatgttgaagaagggaacacacttgtgtgttgaattttaaaatgaatcaactgagtgcggctatccgacctgttaggctttgtacttccttcaatttttttggcgacttcatatccaagatggcttgaattttctctggattagcttttattcctcgatcactaataataaattcaaaaaaaaaaaaaattgactaaaaaattatttcgagtgctaaaacagacaagggtgcataaatgtatccatttaagggggtgcattgtagaatttcccttaatttttttattattattaagattgaaaaaataaaatttcaataaattagttacttatattattaaaatatctataaaaaaaaaactataactgcacccaaagctaaattatttatgagtttttatatatatatactaggtgattgttacgtgacaagccacgtagtgttaattttatttaat

SEQ ID NO: 385956 - DNA, 838 bp, Cannabis indica
acaagttagatattataattataatgaatatcaccatacaaaaaaaaaaaaaaaaatattttgggttgtaattttagatgtaaatattagaaaaaaaaaaaaaagattgaggtagcactactcaaaagatatatattatttatagatacattgtgtccatgatgagtaagaacattatgtgtcttttattaaaaatattacctatgaattgtattatgtttgagtttatatacgtaattgtgttatttagttacttaaaaaaattattatttttacattatggctattatatgggtttcggtgttccatcggagaaaattaattaagtttgagttagatatttttgacaaagtgtaaaaggaaagatttttttaattaaatacaaagctgaattaagtataaaaattaaaatttctactttattatttgtcattagatataacatttttaaatttaatatttataattattttttttagtaaatatcaatagatacataatttcataaaactgttccatatatatatagtagaatctttatttaaaagtacacttagaactaaacaaatcatattcttcattcaaaaataaaaaaacaaatcatattctaattaagaggttatatttaaataaagttaactaaaaaaaaaactccaaaaaaatatcaatataatgacaacaacaataaaaattattaatactaaattataaaataactattttttaagtaaatataatttttataaaatgtattacgatttgaataaattttttaattctacataaataaatttttaaattatgggtgcgtttggtaataattttttaatcaattttt

SEQ ID NO: 385957 - DNA, 4226 bp, Cannabis indica
gcgactatgccataaccaaatgctgctcgatcatggaaatgacgacatcaacagttgtcttgattgtattctcctgcagcttaacccgaaattcagctccatcaccagctttaaacactggaaaagaagcctttgaaactctatttgggctgacttccattgcacaagacaactcatagatgagataagaacaccatccaccgttgcatacttttggttctaaaccaacttatttcgagccttccataactcccagcacaacataacagcctccccacacttgtccttactgcgcctttgcaaaatttgatcaaaccagctgcaaaaatcaatagcaacaatcgaccttaccccaaccaaaagcctctgccaacattgagcaaggattgaataggaaataagcacatgaaaaatagctttctcacctttttgacaaaccagacacatgatttgaactgagactctcttaccaaattgagagctttcggtggtactttcaaatgccaaagcttgcgccaaaactcagaagaatcaactacaatccaatttcctttctgagcttgtatccacttgtatgcactacacactgagtagaaaccatgatgctccttagaccagaaaaaatgatcattagctacatcagactcaatagaattgccaaagtatgttgttgatcttgctcattaaaaagatctttagtgatatctaaatcatattccctcttatccgtacacgtcaatgagatcaccttatggcccaccaaacattgggcatctgaagtaacaaaaggacacacatcacccagaagccatggctgatgcaaaatatcaaccttaacaatagaacctattgcctgaagaaccctagacttgagaagctcatgcgattcaaagacactcttccacacaaaacttggattattccttagggatgctgaaagaaaatcacccctgggaaaataaagcccattccacctatagttttatgtctactcattctttctcaactcatcaatgaatattgctaccatgagaagaagttgaataccaccaaaacttactcataattctctccaaatctttagacacatcgaatgggagcaaaaaaacactcatgacatatgtaggcaatgattgagcaaccattttaatcaaaacctctttcccagcataagaaagaagcttcccatcccaattttgaacccttttccaaaccctatccttcaagaagctcagaatcatagacttagaatgacccaaaatattaggcaaacccagataaaaattgtgtttagaagcttctgccatttgtagaacattacaaagatccaattgacttggccctgccacattggcactaaaaaagacatttgattttgccaaattaacttgctgagatgcctcctcaaacttatgaagcaactctaaaaatcttgtagcatcttcatgggaagctttgcaatagatataactatgatcagcaaaaaatatatgagagataacaagagttggcctgcaaactttgattcctctaatccacttccaagattcatagaatcgaatcaatgaaaaaagaccctcgacagatattataaataaatatggagacaatagatctccttgtctgataccacgagttggaaagatatgccccatctctctaccaccgtgtacaatagtataagacactgaagtgacacaactaagaatcaaatccatccatctctttgtgaatcccatttgaagcaaaatttcacgaagataaccctattccaccctgtcatatgccttactcatatccaacttaagagtcatactaccctctcgacctcttttttttcttttcaagtagtgcatgactttaaaagagaccatgttattattagaaatttgatgacccggaataaacgcactttgagtatcagacacaataatatccaacaaccctttcattctattagcaatcaccttagtaattactttgaccaacacattacacaaagagataggttgtaaatccccaatcacataaaggttcttcttcttgggaatgagaaccacactagtttcattaagacccttcgagagaacaccacaatcaaaaaaatcttgaaccattctcaccatatcatgaccaactatctcctgatgtttttggaaaaaagtaggattcataccatccggtcctaggctcttgtctgggtgcatttggaacagagcatgcttcactttttcttccaacataagcttgaacaactccaaatactgagcagccgaaacagtattcgacacacactgatccacctcctgccagttagcattagaagacgaaaataagctagaaaaataatttaccaccaatttctacatgctattgtcccactccacccaatcaccttgatcatttttcagcttatgagtatgattggtacgatgctgtgaacttgcttttgcatgaaaaactttgctattttgatcaccggattgcagccacaactgctttgatcgctgacgccgataaatctccttctaatcaagaatagtaaatagtttcttctgaattaattggaattgctagctcaaaatcaaatcattcttattgcgaagctttttatgttcaattttacatacttttatcattttcccaaactttgttgtaatatccttcccccaaactcgtagcttataactacacaccaatagcttctgctgaatattcatcaaagaacttccttcccaactctccttgactagctgaaaatacattgggtctaccaaccaagcattctcaaatttaaatcacctctcatttactgccaatgaagatcttttcggctctaacaaaacgggactatgatctgaagatgagtcttccaaattataaagtcttgccatatctaataaagaaagccaagctaacgtaactaaagcccaatcaatacgaatttccataaacttcgaagaacccctactacgctcccaagtaaactgatggccaaccggttccatgttctcaaccccaatcttcaagagctttattaaacccatccactagccacccaggatacggtaccccgcctcacttatctacctgatctaccacattattcaagtcaccaatcacacaccaaggcaagctataattatgcaccaaagtccgaagtaaatcccaagttttctcacgttgtgctttccaagcctccatacaatcgacctttgtaataacatcaatttggtttggagaaaaaccaattaaatttttctaatcttcctcacaccagaatattgctacacccccactcctacctctcggctccaccataaacattccatcaaactctagctatctacaaattcattccatcttatctttcttgcatgaagtttcacaaagaaaaataaatacatgcctcttatgacgaatgatgtctttaaggaaatgaacaatccatcacttgccattcatggtaaaaaaatattaaaatatagtgggttgaattcaagttattaaagtctgaacttccatctcggagcttccaaactcaacctgggcgtagggctagggtcccctcccaggttgactactataacttgggtctactaaactccgtgacattattcttcttgccaaatgtcaacattgatttccgtgtcactagaaaaagttcttgggctaacatttgccccctaagtagactttacacttgtgtggagttgacttgatgacgtgaactaagcccgtttcccttgaaactactagatttgcatcaattttgacaatcttaggtaattgtttcttcttttcaagcattcccaattgaattaggactttgaattctcttgcttagtccttgggaactctcttgaaacttatattattttttacttatctcttacctttttctttggcaattttaaattttcttatttttttcgtggcattaggattaattggatttgaatcctaatcctattataaatttcattcgaaattagagagagaaataagaagaggaaagacttttgatcttttgcttatattttatctttttcttttaaatctttaatttttccttaatcttaatagcattaggaattgaagttacattttaaatttaaaaaattctactcctattgtttagaaattttgaatttaactttaaaatagaagggaaatgatataattgtatcttttacttgtcatttacctcttcctttaaagcttta

SEQ ID NO: 385958 - DNA, 574 bp, Cannabis indica
atggatttaggttttcatcttcttgtaagttttaacaacggtgcaaccttgctcccattaatgagacttttgctgtccttattcctaagaaaaaaaagccaaccagggttcgtgattttaagcccatcagtctttgttctactatttataaagtagttgttaagtccttagccaatatactaaaggtggtccgcactgatcttatttctcataattaaggatattttcttaataatagaatcatttttgataatattattatttccaataaaattattaatgcaattaataccaggaaaaatagaaaccttggttgggctaccctctaacttgacatggggaaagcttttgataaagttgagtagagttttgttaaacgcattctttcctacttaggtttctcaactaactttatctctcttatctctagttgtatttccactatctctttcaaactctgcattaataaaagtttatcctcctctatctttccttctaggggaatctgttgggttttatgcgctaaataaaactccatttcaatgtaatccattttattcaatatcaataaaga

SEQ ID NO: 385959 - DNA, 896 bp, Cannabis indica
gttgtttcatgtagactgtctcttggagagtaccatttaggaaagcattagaaacatctaactgcttaatggaccaattctgagatactgcaagtgaaagaacagtacgcacagtgacaggttttacaactggggagaaggtctcttcataatcaatacctggggtttgtaatacccttttgccactagtcttgatttaaaccgattgagagagccatatgcattcagtttgatcttatgcacccatttattttcaataacatgcattcctggtgtgcatggtacaagaacccaagtgtcagcctttttaagagaagcaaactcatcagtcatagaggcaagccatttaggatttttcagtgcttcagtgatattcttgggttcagtaggtaggagagattcgggtagggggtgttttgtggccaagtaggcttttggtttaactatcccattgagtgatcgagttgtcatacggtgaattctagaggctgggggagggttactagcctgtgtgtctacaacttgaggagtaggaaatggatctggtgtaggttcagttgaggatgtggttgatttggttgtgatatcgggtcagggatacatgagataggtggtgaggatgaatgctgtgttgttgctgggacaatgggaggagggatatggtcacatgttggcccagtggaatgttgaagcaccacaccaggaacaataggattattagcagtggtattaaaagtagcagtaggaaaagcatgagatgagaatgatacctgacttggtgcagatgcagacaaagtgccaggatattgagtctcattaaaattgacattccttgcaatgtatattcgaccttgtgcactttcacaaaggtagcttttgtgatatggtgagtaacc

SEQ ID NO: 385960 - DNA, 1417 bp, Cannabis indica
gttagcttggttagtaatttcattcaagataaccaatgggatactgatatggtcaacaggtggttccatcgagaggatgcaaggagaattctcaacatctctctccctaacacgccagcagctgactcttggctttggctaccagaggcaaactgtcaattcacagtaaaatcggcttataggactctaaagaactatgattctaacccagaagcagagaggaaatggagaatgatttgggggtcaaacattcattctaggcttaagatgatgtggtggaaagttctatccaatttccttctaaccaaggagaaacttagtttgttcattacattagcagatcctagctgccctttctgtgacattcaatatgagaatagcctccatatattttgggattgcaattttgcaagagctatatggttcggatgcatttggggagttagaattatgccaccaacctccagagctgggaggagtggctgttctggtttgcaaacgtgaagaacagaccacccgggatcaattccacccaattcttggaagtagcagccatagtttttgaacacatatggagggagagaaaccgtaaggtgcatgaggggcgcttcacccctgctgaacatctgactaggctgatcaacaatagattttctgaaatggactccttatgcacatcagctgagggtaggcattcagagtggaagccgccgccgcagggatggatctcctgcaccacggatgttgctattggccgatcacattcagtaggggctacgatctccaagatcataacggaaccattctcaaaattctcacatttcagaccaaccatattgaggcgctccctggggagacgtttgcagtgtgtaaaggggctgagttaatggcccaattgggatacaatgttgtcttccagtgcgactcctcaaacgtggttgcagctctgaaggccaaaccagcagctgtccataccctgcatttcaacatacaggagttggttaaaaaaattccttgctttgactggtaacctcaacctgtgggagatccattggattcctagagggtgtaacggtgtagcccatgtggtggctagatgggcaaatcgaaataacagcttcggtctaatcgatttgcccaattttgacgatttcctgcagcaggtcgatgcagatggtcgtgcagactcttctattagcctcggataattttcgtatacttgtagtttttctttttttctggaggattagcctctttcgattgttagttttctagtccagtttgttcctgctttcaacagttgtttgttttcttctttggcatgttagtgttctgttttgttttccctgctttcagcaggttggtgtttgttgtttggtgttgcggttcttggaaccattatcaaaaaaaaaaaaat

SEQ ID NO: 385961 - DNA, 905 bp, Cannabis indica
ctccatcaactatgagtggaagccaattctatgtgaacatttcaagggggtgaggcatgagactactgaatgtagaaggaaagaaggaaataagcctgaatggatagttaaaaaaagacaataggaaggtcaggtacacacgaaacaagttgaagtaaaggaaggagagttccaaccaattgtgaaagggagcaaaattaaagaaaaggaacgaataagcaacacagaagtggagaatcaatttcaggttctgtcagtgcatgacctgaataacggataacaagagatagtgccagaaaaacagagcaacacaggaagggggaggttctcctactccaaatggataggatcttaagttggaatgtttgagagatcaacaaccaacaaaaacaaaaagaggtgaagcaattcattactcatcatcaggttggtttggtttgtctcctcgagacaagggttaaggcttctaaattgggagctttataccagcaaatgtttcaaggatggtttgtaacaacaaatatagcatggcataaagtaggaaggataacagttgcatggaatcatcttcaattttatgtaagtattctaagatgttcaagtagaataatacatttaggtgtgtgtactgttacaaacaatctgaatttttagttaaccaatgtttatggcttcaatgatgaaatgggaaggaaatagctgtggctggaatgacaagaactaaatacaaaggaaccttgggttgtacttggagattttgatgttacacttcagattgatgagcgaataggggacaaagtaaggagcaaggtttccaaggattttctagattgcattcaatgttgcaatctagaagatataatgtatagtggcagcctgtatacatggagtaacaagaaacaagg

SEQ ID NO: 385962 - DNA, 3416 bp, Cannabis indica
tttctgttacatcttacagtttctattgcgttaggtaaagttaaacacacttacactttgatataaatatcaagacaaaagattaattgaaatgcacttctaagtttttgtagtgcaaggtggagtttgttatagatttatgccctaaatataatctattttaataaaatattatttgctatcaatagaagattgaaagtcatttaagtttacatgtagttttcatgtttatggttttaatatacaatttatgttaaatccaaaatatatagttattcacaattacagtgatgtctttacagtggaaagtaattgtgattatatgcttcaaagactttagtcccataatttatcagtgcactggttttatactgacgtgataatcagcgataaaggttacttacacattgatatgtggaatgtcctttctagggcattagcaaagtatactagtatcagttgtatggagtatacatcggactggaccgatattgacaatgaataagatatcataattaaacataccattatatttttctaagtcaatatcacttagttgatctaagatcaatagatcttaatcttgagatggttgggttctaacttaattgtattatttgtgttttttgacttgtttgttaaaattaaccaaatggatcttcccaatacttacatcttgggaacgtggtagtacatttgagtgggatccctaatcatagatacagaatctatagcttctataactatatagaagtgaaatgatgatttactttgaacttgacttaatagagataaatagaagagctcttatttcagtaattatcttagtttaccgaaatatcatttataggaagctaagttttttaaggataaaatacattgaggggtagaacggtaaatttgtcattactcgatgtaaatcatctatagaggatcttttattatttagattgaaataatggataattcataccgtatctatatttggaacatatagagcgttctatgtaatcatgaatgcaattctgaatctatattagagtcaggttaaattgataagatgggaaattcttttggtatattttgaatctacttattgggagcttggttatataggtccatgctccccacattttttgagataatattcttttgtagactcaattaattagttttaattaatcaattaaaattctaaataaaaagaagtcttatttatgaatttttactaaataagagcttaattgagaggaaagacatgatttaggatttatttattaattaagagattttgtaaggtataattaataaataagttaaatggaaactgtaaggcccactatagggttcggccacttaaggtttaaattgagcatttttttttatcttttttaattccatataattcaaacgctaaccctagatgaaatcctataaatagaaaatgatgctcttattttctcacctaataacttaacctagttttcacaatgtgagacaagttagaaaaaaaaaaaagcctctcagattttgaaatcctcttcttcctctactgaaatttttgaaatctctaagtgaattgaggaatttcccacacaatttaaggcaatactcaggcctttttggaagattgtgaataattccaaaaacaaaagaagatccaggtttagatcttgatcatactctacgactgaaaggatcaagggttagagatctaaacgaaaggagacattatattcactgccaccaatgtaaggtaaactataactttatatgtatttattttattgttttaggaaattcatatttaggatgttagactatagttctataatcaacataaatgttagtaaatttagatcatggtaaaatatgttccaacaagaagaacctcaaatggctattaagcttaaagggcacttgggattatgatttggcctatgagaaagtaaaaggagaactggagttgaaagggttcatggatgctaattatgttttgaatagagatactgaaaaatcaaccacttcctatattttcatgacaaaccagaactgtatgtgctagaaggcccaattactgttcgtggttgctctatccaccatcgagtagaatttatggctactacataagcatttaaggaagctttatggcttcgaagaattttgttcgaattgaaacaatagagaggaggagtgactgtgtatttagatagccaatcatccatccacctttgcaagaacccaacttatcatgaaaagagcaaacatatagacataagactctactggattagagaaaagatagaggaaggattgattgatttggagaaggttagaacagaagataatcctactaatgtcgggactaaggtcttaacagcaaaaaagttcaagcattgcttgaacttgatcaatctcaaaagttagtatattgagagatacctgaacaccagccatgatgattgcattctttattcatcattgtcaatattttatttcgaagaaactaaggggaatttatggtatagttcctccaaataaaaagatctccaaagttattctagctatggaaagttagatgtcttctggaagggaattcttggaagtctctcttccatctggaagaagtcttgtagaatgataggtgtcttccaaaagggcattctcggatgcctatcatgtcaacctggaaggaatcttcaggagagctagtcttactccggaaaggagttctagatggctagctattccctcctagaagggaatccagatagttgactccaactatgcttttcctatcaagggcggtccttcaacgtgtgcttcaattcatagtcccagaagtgttcgtttcatctgggcccactataacttaagttgacgtggaaagtttgttatatttgttaagttgtaacaaacttaacaacttagcactgcaaccacaacctttaggatctatatcgtgaacatataaatatcaccaaagattagcattttagagaagaataagttcaaatgagttttgagaggtgatcttaagagagaaaaatcgagaggtagattgggtttggaatttgtatgaagaatcttcaatagatgaaaaagattcttgggtaagagtgtgagagataaatattttgagagaattcaacagagaattgatctcgactgtattgcaccttgttcttgctcaatcaataaagatggttacttgcaataataggtgtagccatggctagtgaataatcctaccgttgtatctttctaagtcaataggtgtagactgtattgcacctaatggtggcgactgtatttgacttacaaaatatgaaacaatggtagaagctcatcagatagaatagccttgactctgtttaacattttagatgagctaacaactctattcaatggatggt

SEQ ID NO: 385963 - DNA, 1598 bp, Cannabis indica
attgaaacaacatgattcgttttttttttttaatttctcatccttgattaaacaattttatagctaaattttaatttcttgttattctttacttttactttcatcaaaattattattccaaatagaaatacaagtttaatttagtggtattcaattcaatttcctgtgggatcgacctcacatgtatgagtactacttgattacgtgcacttacgtagctgtttataatttttgtgaaaattttttggtgccgttgccagagaattgtaaaattgatattataaaaattagaccaaattctactttggtgtcttccttacttctatttcgtctcaatttttcttatcttatctcaggtacttttggttaatgcgacgtcaaggaccaagttcaagagtgcttgttgatcatgaaattgaaaaggcctgtagataaaatagaaggaataagaggttagaaggagttacactaagggttgaccaagaagaggtgatggccaataacgacaataatgggggtgacgtggaagactagacaaatggtcgtaatccacatgatcatagtctgagggactatgttcttccaacattaatgggggctcagtcttgtataagaccacccgctgcagaagcttgcaattttgaaataaagctagccatactttaaatggtacaatctttagtctagttttgtggacttccctcagaagatccaaacctacatccatttaacttcgtggagttatgtcaaacatttaaggtaaatggagttagtgataatgccattcacctgagactgttcccattcttgctgagagagtgagctaagagttggttggtgtctttgccacctaactctattgcaacatcgaataacttagcaatgaagttcttatcaaagttcattcatccagctaaagctgccaagctacgaggggagattaataatttttgttagttcgacaaagaatctctctatgagacttaggagaggttcaaggatctcattagaaaatgtccacatcatgggatcaagaagttgatgttggttcataattttaacaacgggttggtttgtaatactcaaacaatcatagacactgtagttggtggggtttatgaggaaaagtgcaaatgaggcatatgacttgcttgaaagatgatcatgaataaccaataatggccaactgagagaagctaatcgaaataagttgcgggtatgcatgagattaacgccataacaaagttgatagcccaagtggaggccctattaagttgatgtctgctcatgtaaaataggctcaagttacttgtgagctatgtgaggggcctcacagatatgacacttgcccggtggatgtaaatagtttgccaatggattaagctaaagccattgggaactatcctcggaacaacaactatggttactgtggcagtcagtagtcccgtgatccgtaaggggaaataccgggtaagctgtacaatcccacatcgcctggggaaggtcaagtgggatgattctgaggctgtttaggtatgggactgcacagttgaagagagcttaaatggattgactgctactacctatatcaacaaggt

SEQ ID NO: 385964 - DNA, 1920 bp, Cannabis indica
atgataatcaaaatcaaaaggatattcagcacaaagtgtaacatgaatgaatttcaacaatttgttaacaaaatggtctctctctctaatataatctatgatgatgatgatgacgacgatcatatatagtcatagtgggcactggtggttggtggcttggttgccattcatatcatgaaatttcattataatactataataatattatcatcatcattaatgaaatcaacagagttagagttaatccaaactagcttccttccttgaacccagaaaagccctataattcttctctgctccacttaagtaaaaccaaacaccaaaagcaatgtcgtcatcatcatcatgattatatgtataagcagtgttagttaatattgttaaaaatggatcacagacataaatatgaaagagcgaaagagagggcagatagaaaattgatagtgttattcgggttatttcgggttaagtcggtttaattgggtgggttactttattttcaacccgcccaatatacagattgggcgtttttttcgtcagttttttcgatttttttttttttgcagtattttcggtttagtttaggcaggttatccggtttaggcggtttacgaaaatatatgtacaagtgggagataatgatggccatggcaatgatgatattgatcagctgatttttgtagtagtatttattttattttagttgagaaaattatgtttatgttggtattttaaacatatgtttatttactaattttttcgacaattataattatatcatgaatgtataattaaaaaaaataaaaattatattttattgtataattatttataattaagctttcatgtttttttattttttttattttaatttaaaaataattgataacaattaaaattaaataataataaataaaaagattaaattacaaaattttactggctcattattgcgctagcaaaagtcaaatatccatctatcgaaagtgacttttcccagcgcatgtaatatctcaaaaaatattataatatttaattgggtgtattttattaaatatgtgagtatattgatattagagtaagataatgatcttacttaagctaattgtgtgataattagtgcaaatctagtaaatgattaaataaagcgtaatttattaattacggagattttatcagattatatgggtattgtaaataccattttagaaataaaatatttttgggttcggcggccttgaaaactcgaaggagtggtcaaaagtgtcacggcaattaagttgtgttgcattgaaattataccgaacaagattaaaatgttgagaagtaggttaaatcaggggaatctagaaatgaccctaggttattccatagcttaagtttagagggaggggtaaaatggccagtttaccggccctaatttgtcttttatgattttttctagagggtgtgggctgattaatagcttagtttttaattacttattttagatatatattatttaggaaattaagagataattaaagcttagaaaaatagcaaagttccttctccctctaccctttgaagccctaggagcagcaggaatcaagcacttttctccttcaatttcaaccagtttctaggaggtttgatcaaggatagaagttccctaagctgtgtgtggtaagttctatccttccccacttgatttttgaagtttacattgagttttgggttagggttttcagatttcagggctgagatgttaaggtgagtttagaatgtgtttttaggcttgatttaaagtttgtttaagcttgaattggctagagatagtggttgtttgatttaaattggtttacataaagtttattgagttttatttcaattgattatgctatttgttcaattggatgaattgttgtgaattggtgctct

SEQ ID NO: 385965 - DNA, 1754 bp, Cannabis indica
aaaaacaaaatagcgagagattatgtataatttcttttgggaaaaaaagagaaagaaatatgacacatgatctttgagacattaaaaaaagtgataatgcatttgcgagagagatagagataccgagtttatgtatataaagacattttttttttttttgatataatgaatttgctgaataaatataaaagttttggtatataaaaattaatttgagcatcgtcattcttgaaattattacaatatttgcgtatataaataaaaattcccctatataaattgtattcatgctatgctatatattattgttgcccatatttttctcaatatgacatgcaatacaatttgggtagttcaccgtggaagtatacactttagtagattgtggtgtgtttgttatggaatttgtgttagagtttatgttcttaaaagtttgtaaagacattatcgattataaatagtatttcaacattttgatatatgcttaaatgttaaactattaatattttatcttgaataatctttatataaatatcgaaaaattatttattcatatatgaggttgtgacttgtattgtacgtagaattaaaattattaaccttgtataaaatagttagcaacatattaaagttataaaaattttaatcaacaagtgctagtgcagttcactaatgttctgtaacacccaaacttgaaaaccacttaattaataatttttttatatattttatatcacatgatgacaataaaagctatccctcccaaatacaataaaattgaaactctccaggttgtactattgcaatatgcacaatcattgccatgcctcacactcacaattcctctgctttggcttttcttttacctacacaaggtaacaaactgatgagtcaacagactctgtaagatatgcataaaatatatatacaatgcaataccaacttgtacttaggtcctcaggtgcctaattataagactcaccaaatagtcaagaacgttcttaacggaagtacgacctatgtacctcaggcactgaagtattacctctgtactagtgttggtagggtcaaattgtactttcggatgctactgagtgttgtaccacatgcactccgtacccacttgtactcgtgttggtaacattataacatacccttaatatcatatattgtaccaacacactcagtattacaactatttcagtgttggtagtgtaaacaatataattaacatgcattcatacacatgcatacacatactttatgctaatcttaccttgttttcgaattcaagtgtgccagtcaacctgagtggaacagtagctcgacgctttacatgcccctaaatcacaatattcgttaatctgatgagtgacatgctaaatcacttttcggggacttaaaatcaaaactagaagtttccctatcgatggatagcatgacaataccttaaatattgcaaaaaagggaaaaactagggttcccaaaattgccccaaccggaagaccggttctgtggggtttcctagggaccaaccaaaattttagttcctataagtcccactgaactggtcgatcggttcagtgcaggaaacatcaaaaacaccaaaaacacctcaattcaaccccaaactacacaagaacttctagaaaaacttatttacaccacaataaacccaatttaagcaataaaactcaacaatcaacttagaaactaaaaacactattagagagcaaagcttgagttcttaaact

SEQ ID NO: 385966 - DNA, 2262 bp, Cannabis indica
caaaaaaaaaaaaaaaaaactgaaaaacagacaatttgcgcgtgcggttatttatcaaaattttgaattatatatgaaaatattattaatatttatgtgataattaattaatactaatcatttattttataattaattacctaacatttaattatagtaatatgatttaagaggaaatattgttctattgcttcataaaaaagactactatagtaaagatcatcaatttacttcaactaaataataagcaagtcaaaaaaattagatgatccatacaatatggccacttgatgatgcaattaatacatatattttggagagaaaatatatagaagtgagtattgctaacgtgcgcatagagagcactacacatgaatatcataataataatgtataacttaggagaaatatatatatatatatatatatatttatggataagtggtagaagaagaatagagtagtgcatgatggatgtttggtttgcaatggtggaaactatcttattgggtccatttgagaggtcattttggttcttcatatcacaacataaaattatggtaaccagaaaatgtcacaatcttactttcttttcataatcccattctttctaatccacatgtgctattctcccttcccaactcatatcactattatcaatatttatatatttttaattaatatttatcatgcattctttgtaatttaaatatgtgttggattattttttttttaagtagtaaatgttaaaatgtactaatgcctagcacacctttcaacatgtcatgtctaggtacatcaaatttacatctaaaaattcaccccacccgacgcaaaattcaaaaaaaaaaagtttaataaattataggtcgagttcaagttatacccagttacattaatttaatacccgaaaaaattgggttacactcgaatatctacttgaaatttggatgtatattgttttttttttatacattttctcttcaatcctaaaaacgtaaacttaaaaaaaaaactaacaaaatatatatcatttttattttatttttcttcttttattttctcttttcattttttctgttcttttttatgaaaaaatatataaaaaaaataggccacacaacccaaaatctggtcaaaacacaaccggattcggcccaacctgcacttgaaacctaaaaacccagtcacacaaacgtcagggttggtactaattttatacacactataaaaaaattattactattagtgacaattttttagtcacaatataattttttttgtgactaaatgtgacttttagtcacaacaaaatcttacttgtgactaaaacataatatttagttacaagttctcacagatttagttttagtcacaacaagtattgtgacttaaaatatatttagtcacaacaaattgtaatttttgtgactatctttagccacagatcttttagtcacaacataagaataataatttataattagtcacaattttctcacttttagtcacaagttttgttgtgactagaagtaagattttttgtagtgacacctgaactcgaaacccgtcaaaacttacgcgatgtgcattcctagttatatcgttattgatacaattaagtgtatcaagtcttatataatttaaagtaataccttttataaaatatcgctacgctaatcaatcgcaagatagtatctttaaatagtgctaaacactaataatattttatagtaatggttttttttttaaagcatgtaaaaaagaagttgtgggttttgtcactcatttattgcttgttttgttttgttcgtgcaaaactttttcattggtcaaaaagctaagaaaaaactaacgacatattttctacattatgattttgtgtggaggaaatatacaggcatatagtttgggaaattaatagtcaaattaaggactcattcaagtattaaagggtactaagagcaaactctccaatggggagtttttcaaaagagtgtttgcttatgttgacatatttttagcaactttaaatagttacctaccataaacgtggaaagaaaattgctaaaagatattattagtgattatactcttctcgatgtcatatcgctattggtataattattaagtatttgatcttatataacttaaaaaaataattttaaagaatatcgttaatcaatcgtaggacgttacttattctatagaaggtactaagtaccactgatgcctaataactctgaaaaatattgccaaaaa

SEQ ID NO: 385967 - DNA, 1955 bp, Cannabis indica
gttactcatatttaaaaattagcatatgatattattttagataagttaattttattgaatcattttgatatacatatataagaaacaaaatggtatcttaaatatcataaaatgagttacattacataaaaaaatgtctatactaattttattaataaattatttaaatatacatatttaaaaaacaaagtggtatcttaattaaatatcataaaatgagttatattaccaaaaataatgtatatactaattttataaataatttattttttaatttcttaaatcgttaaataaataaataaaaaagtaacagaaatgtatcctaaacaataaaatatatactataaaattaaattaaaattataatcaaaataaaatacataaccgaataagtaactaaaatctggtcaatatataaattttatttaatttaaagtttagttgcttatttcttaataaaatataaaagaaactaaaatgtaacttttgattatagtaatcttccttcgtgatgatgatgttgcttttgattcatagatagattttgaaggtaatttaaacgttattaagaaagaaaataatataaaagtatcttaaataatttgtcaacataatgtaacctaaattaaaaaaattatataatatagttaattttatgatgtttaactttaaattattattattttgatataaaacaactctataataacatagatatattgaattttatttaaattgatagtttggtaacttatttattaacaaattataaaataaactaagaggttgtttttgtttttgttatattttctttttaataacaataaatgaaatatatgttctctatatattaaaataatgaatttgaaaaatagattataataatataattttttaaattgaaatgatcaaattgtgataggaaattttttttgaaataatagacaagagagaaaaagagagaagaaaataattaaaaaaaaaattaaaataaaaaacgctcatgaatagtttacacaagaaaaaaaaaactcacaaattttgagatgaaagacttaagaaaataattatttatgttttcggtgtaacatcatttcatatttgtatctatttaaattatttcaattattttcataattaatttaaatattatgtatataattaaaaaatttctttttaagaataaataaataaaaaaaaaagaattacaaatagtgaagaccataaaagagaaaataatttttcaaaaaattaacaaatactaaaagtagagacaaaatgagagattttctaaaaaaataataattgaaaatggcttacttaggagagagaatgaaaaaagttgaaattaaatagcttaccattaggcataagctgcccccatttttaggactatttaggtcagcatcatttttgtgattatttacaaatttatgtatataattaaaaatcttccaagataaagcccaaacaagtaaaggtaaaaaaaataaaatccaatgaaatggttgagagtaggtgtgaaacaaattacattttactaaaataaagcccaaaatgtgcaaagcccaaaaaaataaagcccgtacgcgtgtaaacaagatgagagcttgagagtagagatagaaatttatactgcggggatggataatcgcggggacccgcccctaatggggtggggatttcccgtcttagtagttaatggggcggtggtgggggacaatttcaaaacccgaagcggggatggggataatactatccgcaccatatccgaccccgatatagatatatataatttcctttttattcttaacatgtatatagtatatatatcattgataatcaaaattatcatccataatcaaaattatatatcatatgcttaaattatgaagatttaatgacgatagtgaactgatgatcattgtggattacatgtgtaaagatattttctt

SEQ ID NO: 385968 - DNA, 503 bp, Cannabis indica
acagcccaaatccccaaaaaagtcagttaccaaccaaaacattgatattaaccaaatttaaaaagtccatttgtttgatttccctaaaatacaatgaataaactattggtttgattttgaacagaaaaatttcttctttaacatccaaacaattctaaaggagcaaaaaatcgatcattttcaacatatcgatcgtcaacaattaccaaaaaaaaaaaaattaccttccattagagatagagtgaaattgaaaagcagtaatgggtgtgttgagattgagaatatgaaaagcttcaaaggttagagactgagagaaaggaagcgatttatgagtcaaatgggagtagaaacgttctaatagaggaggtgactgtatgaagctactagttccttaaaataggaatagagcactttttttggagtaatttgcggtgaaaatactcaagtttaactcgcagttgcagataaatacctaacaaaaatttttggcggtaaaaatacct

SEQ ID NO: 385969 - DNA, 949 bp, Cannabis indica
ttattattattattattaggatgtatgtaacaattatttgaatatactttttttaataaaatatgcaaattttattaaatatcaaagtatatcaatcaacttaaccgggtagtgactccgtgtaagtaaaatcaactattaaaatagtaattctaattaagtagtgagtaatacgattcacaaatcgtttacaaaatataaaaaaaacatcatgtaaacttgaaagtaatgtttgacaatcagtaacacaaaatcaaaagcaaaattaagaaaaatagagcttctaatagcttgaatagtaaccaaattaactccgctaccacattagaaaagctacgatcctttatctaacttaaaacttccttaattatcataactttagcaaactcagagctaattttgcccattttgctactagatttttaccttcacagtttctaactacttaaccaaaactgtatttattttgctcctcgaaaataacaacatcgcaatgatcttaatcgtatttccaatcaattttatccagtgctcacccctcatttggtttcaaaaaaatttgagaaggaacaagtctgatagtgagtaccattccaaagatgaccaacagagcataaccgctaattttaactcttcctcattctacctgctaacaacatcttggaaccagctgccaaaagactaatccacctcataaccaaaagaaaaatcaaccaaaaacagcattttcaatgcaaaaggacaagaaacaaaatagtgaaaaatggattaagcggaaagagaacattgtggacatgccaaaataacattaacatgctttgaaactagttgtagctgtgttggtaaacaactaatcaatgatctccaaaccattaagaaccttcagtgatatttcaatactctattttttttcaaaaataagtgttaacatccagcaccggctcatctt

SEQ ID NO: 385970 - DNA, 1160 bp, Cannabis indica
agaggtatttttcaacttatccccctagcctgcctatgtttagggccgactctagatacctgctcgtaatggggtagggatttctcgcctaaacatagacagaggttgagatggaaataactttccatctccaattgataaacgtggcagagacggagatgaaaagttattattttatgttattatacatatttgatatgtatatttatggtatattagtagttttaattatttttaattttattttggacaatattttgtactttaaattattaaacatagtataatattttaattttaggtttggcatgattaatcttcaggattgaattttttagggtaagactctctaaattttaattttgttttggtttctactttttcgtccagtttggtctcttaactataccaatgtgaattttcaatgagtacacaaatatacatatggcaaattttcattgatctacccaatattaataatttaaatattaaaaaaataattaaaaatgtattaaaattttaaaaatatatattttttaaaatttttccatttccatttccttttctttcattttctttatttctaaaaaataatttaaaaatttcttcttcttcttcttcttcttcttcttcttctcacgattcttctaaatccctaacagtatacgcctctctcaatctcctatctctgatctattatttagggttcatatcagagtcacgacagaagtgtaattgattaagctttttttaataaaaaatattatgttgaatctgatatgaaccataaactctagatctcaacaaaatattgcataaactaaatctaactagttagattaggaaattaccacttgttgcctatcagggttgtcttgaatcttttcgtacaatattttgatcatccaatctagtgatgggcttgatgaagaatcacaccgcgtcttccagatcagcctcaacactcgggataagagtgagcttatagatttaacaagatgaacaaattttttgatcacaattcaactcatgagatactatgatggagattgagaaaaattacacaccaccactcaaggttgagtggcgtgtaacaaaggggagagagagagagagagagagagagagagagagagagagagtagagagagagagagaga

SEQ ID NO: 385971 - DNA, 1542 bp, Cannabis indica
agtactaccacaatcaagaacaacatagaatttagaggaaccttgagaccaataagaagagataaaaagtacaaagagataaagaataaaagctaagagaagaagacaaaggaataggaagagaacacgaagacatttctttcgagcggagtaaggggatccaggtggtaaaggcgaaaccttttcctttgagaaactttgttgatgagaagtgtataaagagttatgaaactggtttagcttttggtaagtagagagatcctgaagagaggaagagagacgcaaattgttgttcttgttggggaaaccaaggccgagatcgtaatctcgcggcggcaataatccagagtctcgagtaggtaacaattcggaagttgaagaagaagaagaagatgatgatgatggtgatgaagaagaagaagaccagatcaaatccctaatgcgagtgagaaccatttttgtttttgttttggggggtttaacccattccagagtttgaatgtgattaattgaataaattggagattgaagaaagtaatggtagtgatagtgatggagttagggtttgttacgttacctgaaagataaccagatcggaaagccgaagacgatgacgatgaggagcaccaccaccaacaaccaccaacaactcacacaactcacaccttttttttagtttttatttttgttttttttaaaataaaaaattgttcctaaaaactaaactaaaatttgttataattaatttgggctttttctttttggactttgttaagcttgcggaggcttacttatgtagataccaaccattgttttgttttgaggaaattatggtatatccactttactttatttattttcatttttacctctattttcatattctttaagatatacctacttttgaagatgatatcttcattaaaccccttaagttaatggaaattatatggtacgcttaagtagagagtgagggtatattggccaacccactcaaaaaagtgagtatattttaaaaaaaatataatatgaaagtatttttgattaatggaaacaaaaaagaggtatttttcaactcatcccttttgttttgggaaatttacatcatttactaactttttcaataatcttacaactatactgtgacacgctaaatataacatttttaccttttttttttttaatttggcagtatactgccttgattcaaaaatatggacattagttataggtttttatatattatgtggcttataggtgtctttatgaggtttaacctcttcattttttaaaaaaatagtgctttaaaaagggatgatttgacaactttattattacttaaatttgaaattgaagacaactcacccatcacccacgtgatttccattcccaagcttataaatgtattttgtttctctctctatctctttttgtgggttgatgtttatagaaaaattcttgagattggtgtcaagataaagaccatcaaccaagaactttacataaaacccttctctccattcttcactatttcaaaaactt

SEQ ID NO: 385972 - DNA, 1440 bp, Cannabis indica
ttaccaagttcagctgaaagaaaattggtatgtgggaaatacttagctttataaactctggcagcaagagagttagggttgcataaaagccgccaaccttgttttgcaagcatagcaaggttgaaatcatgtaagtgtctaaaccccatacctccttcatccttagaaatggcaagtcgctcccaagacatccaaataataccacgacccttgctagagttcgatttccaccaaaaactagccattaacttctctatctctttacatgtgccaagtggtaaaagaaacacactcattgtataagtgggtagtgattgaataacaggtttgaggagaatttctttcccggcgcgagacaagaactttccatcccaactattgatacgggcaatcactttatttttaataaaaccaagcatagctttttttatttcggccaatgatattggggagcccaagatagagactagcttcaagagcttcattcatattaagagtagaacaaacttgagtgcgagtagagccatctgtgttggggctgaaaaaaatggatgacttggagaagttcactttttgacccgatgactcttcaaaaagctggaataagtttgagatgctagcagccgcacctactgttgcttggcaaaacaagaagctattgtccgcaaagaacatatgcgtaagtgagggagcacgatgagcaatgcgacatccttggaggagtctattctcttcaaacttgtaaattaaagcagataacccctcaaccaaataatgaaaaggtaagttgaaagcggatcaccttggcggatgccacgagacggacatataggatccaagatgtgaccaccatgaacaaccttgtaatgaactgtcgatacacaagccataactaggtccacccatttgctagcaaatcccatacgaagcattaccactcttagaaagccctattcaacccgatcataagctttgctcatgtcaagcttcagtgccatgaaccctttctttcctttcctcttccgttttaagtaatgcatgacctcaaaagctaccatcacattatctgagattagacgccccgggatgaaagcactttaagtatccaaaataatttggccaataaggtccctcatacgatttgcaagcactttagaaataatcttgtaaagaacattacagagagaaatcggtctaaggtcagtcatcgccgcaaagttttgctttttggggattaacacaaggtgagtatcatttagaccatcaggcaaagctgcagagtcaaaaaaaagtcttcactagatgagtgacatcagtcccaacaacatcccagtgatgctgaaaaaatcctggacccataccatcaggcccaggggctttatccgggtgcatagaaaacatagcagatttgacttcttcatcaaggatcggcttcagcaa

SEQ ID NO: 385973 - DNA, 955 bp, Cannabis indica
gattagatattttcacctaggggtgtttattggactacgtcaaatatttttaggtctatccagattcgattcaattatatattagatgttagattttaccatatgatctgatctaattaatttcagtcatctaatcgatccaacatttattggatgttgaattagatcagttctatccgttggatgtatttcatatatattaattgatttaatttgagtttatctaatattttagacctagtattttttggatcagatcagatcattaaatattttaggtccagtataatctaaaaaaaaaaaaaagagtaaaattctaaaatgaatgttaactaagattaaaatatatatatataacagtaattaatcattatattagtaactaaatggtttcttttttaaaaatagcgaaaaaatatatgttttctacattttgatatgttcacattgaaaaatagattacaatgatattttttaggctcattcaaatcttgatatgattataaattatttttaaagtttgagagaggagatataaataagaaagagagaaagaagaatgagagaaagagaccttaagagaaaaagatgaggatatagtgatcaacctatacaataaaatggattaaataaaattgcacaatagtttataaaattataattaggaatataaaattgatgattaatttaggtattaatacaagtcaagataagcaataattattaataatatataatatcacatccatcgtgtgagaaatgccaattcaaagttatataatatacaatacacatcatatcatatatcttatatattaataattaatttatatctaattataagtagaataattagtattttttgttgttgaactttttatattatcaagctatgctttttataatatacacttggttaataatattttttgaaatataatttttacataatgta

SEQ ID NO: 385974 - DNA, 2369 bp, Cannabis indica
ttaggttgtgacttatattgtacttagaactaagatcatttgtcatggatcaagctctagttacaccagaccttctaggaatgtaccttggcttcgtgaccagatgggctttcgcaagtgacaacccatatccaaaaatagatattgtatcgtgatgctagaaggtcagacagagcattcctgaaacatcaatccagtttccttttttatccaagcgcacaaaataagggaataaatgctccttagatctcgacaaaagatcgtatcaagctaaaagggaaaactacctaaaatagaaatcaagcaattaattcatgattaattgcccataattataggatatggttttgaccaattcaattgtatcgaatctgcctagtgaacagattgactcctttgtgggctggacttcagagaacatcctaaattatgtaatgttatgtaaactccccagtagaggataaaaaggaaactaagtataattctcttaacactataaatactcaatgaatcctttggattaaaagttgagttctcttgcaatatttgcacgttaacatagagaacttatactcattgtattcccacaaggcttttctaacttaatatacataataatattgactcgtggactaaggctcgttaatgcccaaccatgtaagaactattcgtgttcttatttctttttatgaattatctatttcttcaattctaattatttaaaattcattttctgaaaatctcgctaaacattttgccactttcttcgagagttgaaggaagaagtgataccatttaaagattatgttcgacaattattgtactcacgtgtaacaaatctggtcttcacttgattgatcctaatgccaaggctggggatgcaaaagaccagaatatgcgactagctattacaaggatcaagttggcaaagataccgatgtagacgctcctatattcagagatggtgattcagaagaaaacaattctgatgacacaccaaaggacgatcatcaaaatatacttgctgaaggtggtgctagggaaaaggacactcccgatatgtcaaatcacgtggtcgccatggccaaaatgttccaattaactgaaagcaggctatcttctcaagaataattcaatgagatacttctcaagaagatgacaagaatggaggccgtgataatagccctgaccaaaaggatccctaataatgtgcaaccatctcaaacaactaacactcccgaaagagttgatcctaaagatcctaggacttcaaatccttgcaaggataaagggaaaaggatagtaggtgaaacttcgaagaagaatccttcgacttaacaacaaaagaagtctaaaaatattgaccaacctcaggagaaaaagaaagaaaaccatgcttcagggcaatgtaactagactaattctagaggtagagtcgcacagaaagataaggctgacggcaaagttaagaagtctggttctcgaaaggacaaccatcgtcacaataattctaatagtcaaagtgatgatgttgatgaggcatatttggtctcagacaacaatagtggaagtctctccacaaatgatgttcgaagaagattaatagaaaagaatgagaaagcaagaacaaaaaaaagtcagactctgtgagaacgaactgagaaatcatatcaatgattgcattcgtggaagggagtcttcaagtgataaaactcaatgcttggaacataaaatcaaagagttgatgaagctcatggagaagatatctagaaagcgaaatggaactatgtccgattcagaagaagaagacacagagccttgtgtaaaaagaatcatagatgcaccactgttagagcactttagaatgcaacaaatggaactgtatgaaggtaaaacagaccctaagggcgacctgtccaagtaaaaccacatgatgcaagtcgccaatgtcagtaatgacgcaaatgtctttacttttcactaactttgagcaagtccgtggaagactggtggaaaggttatctctgggatcgattcacaactaaagggacctacaagcagatcgactccttcgtgcgctggacttcatgagaatagcccaaattatgtaattttatgtgagtataattatcttaacactataaatacccaatgaatcctttgaattaagggttgaattctcatggatacttgctcaggcaaacatagacaacttatactcattgtattccaacaagacttttccagcttaatatacataataatatcgactcatggagtaaggctcgttaacgccccaaccatgtaaaaattgctcttgttgttcttttttttttttttgttactatttattgttggaaatattttac

SEQ ID NO: 385975 - DNA, 1260 bp, Cannabis indica
gctccagctgagctaaaacatcgtcccacgacaattctggaggacgtggtcttttcttaatttttccatcatattttttacttctctgccttggattgtccatttcatgaaactgtctatgcccaacataaccaatcttgttgcgcaatctaatggaaaaatgtgtgttcattataggtggggcacgccttgtacccattggtgctccaaccagacatcattgcatacgctgggaagtcattaatggtccacaaaatagcagcatgcattgtaaacacagtcccattgtaattatctcgaacttggacacctgaatcccacaactctttcaactcttcaatcaacggtctcacgtaaacatccatgtctttttcaggggcagtgcacccttgaatcaatagagataacatcaacgactcagctttaatgcagttccaagggggtaagttatacgagactaagataacatgccacatactgtaagagttactcatgttaccaaatggctctaccccgtcagtggcaaaaccaaacctcacatttttgggttcaagtgcgaaggatggatggcgtttgtcaaactacttccactcttctgcatatgcagggtgcctaagcatgccatcctctttgggtctcttagagtagttccatcgcatgtcctcagccgagtgtcttgaactgtataacctcttcagtcttagagttaagggaaagtaccgcaaaaattttcgagcaacattttcccgtctccctttttctttttctaacgactctcgcgaaaaatcttttttctcattctctttccaaaataaggtatagtgatacttgtatacatcaatggattcttaacctaaactaatgttaaacaatttcatatttgactcataatgggacttggggtaattttgtaccctctggaaataactcaatcaattttgagagtatcatatcaaaagaatggttactccacttattgagaactttccagtgcattagcttcaccaaagcattaagcgctaatttttttgcaactcgggtacaattcagtttccatatcattgaacaaatcgtcgtacttaccagcaccattcagaggggactcgctgaaggaagtagtggtagaacttgtattgtaaaaactaggatcttctcttaaaatatcaaccatcacattcgcaatttcttcttcatcgttgtctactatttctatagctggttatgtgaacggctcccattcaggtttgtaatatacatata

SEQ ID NO: 385976 - DNA, 1248 bp, Cannabis indica
attaaaacaatgaaaaggaaaaagaaaagaacatgtaatattgtataaatagtaaatatatgaagagtttgcatatcttagttgaggaggtaaaaagtagtaaatctatctaggaattgttattttctaattttgtagtggattataggattcattcattcattgtgtgttaatgaattttattagtggattttaaggttcattgtttgtatattactgagttttagtagtagattatcaggttctttgtttgtgtgttactgaattttagttgatactcgattattgtttttatttgttgctgaattttagttgattacaggcttctttgtatgtgttactcaatcaattttatttgataatagatatgtttgaatgtatgtcactcaattttagttgattataggcttttgtgctgctcagttgtagttgattataggtttgctgctcgattgttttacattgtatgtttgctttacccgatgtttggaagttggattttggtagggaaaaaatgggtaagaaaaataaaatcaaaaaaattcttatgtttggtttggaaagaaaaattgtattgaaaaaaaaaaaacttagattcaataaaattttccatattaaacatgaaagttttattttatttcttaatatccacacttttttcctacatttttcctattttttctttcctcgccaaaatccaacttccaaacattgccttagtttctttgtgatacttctaagttcttagataaataatgttcttgaatttattggtggtattttagctacaaaattataaagttcttcatttgatggaaacttctattcattttatatttgctgttagtatcaagtcatcttagcttatatataatctggacataaatgatcagtttagatgaatgtcaaaatatgacatcggtaaaaaaataaaaaaacaagggcgggatggatcgcctgctgccctgttggatttgcctcacacttttcccaatttattaaacgaggtgagttgctttgcggggaggggcgaccctctccattgacaagcctagttcaaagagctgaacttttgctttattttggatttgagcttactttgctgtgtcttttttgagatctcgagtctgaatttgagctattaattgtttagcagcttaaccctttaatgtaataattgtcttttagaaatatctcagtcaaatacatattttgttttcactatgtttccaaatttacaactaacca

SEQ ID NO: 385977 - DNA, 3755 bp, Cannabis indica
tttagaaaaataaacttagtttattgaaataaattctagataggtaatttcaagaaaaactaatgtatatttttctaatatttaattaaatagaaaaatatttttaagttgaaaattaatttataattaattttagaccaagctcaattagaatatttttcttatatattaaactagaattaatatttaagttgattttattcaagatatttaattattttttctattttaatacacttaatttataaaaaattatatttgagttgaaaatttttcaaattaacttgaataattagagtaattttcaaaatatattttattttactctaacttttgaaatgtatttattttaaatgtttaaattccaaaatttattttaaaaatgtgattaaagtttaaaattaattttagatcaatttatatcaagtaattttcattaatttatatcaagtaatcacaaaagcagttaagcatttactctcaatacttactgcaccacgagtcgagcttgtctttgaagataattgtacatgttcagccggtttataagaagtttaaaaaccttggcgttctgataccaaattgtaacatcctaactaaaaaaatgccacaaactgctgctaaacatatctaattccgctaaaccagaatctactagagccaatagtggaaattaaacttttaaaatacaatataaaaaaataacaacttgtaattaatcaactttacaaaccatccaaaagttcacattttattttgggatcccgtaaaaacatttttaaaatattacaagtcattagtacacgccaacctaagcggtaaaagtagagattacaatattttcccctggtagacccaacccccatggtttaggttggcctaaacatgtacaatgcatcgcaaaagcccttgacctcatggctgatcaacaattgacttaccctttcctacacaatagagcacctgtgagccaaagcccaacaagacaatatgaacattaatatgaatatcaattaaaatcacttaagtattgatgccactgtacctattgtttatttgacatagacctacgtgttacacttacacgtctatttacgataaggccttagaatggtttgtctcggttctgattaccgagtctaacctaattatgccttaactgcatatttctttatatcaacatatatagtataatattgcattcatactcacttaaattctagagtaacaactctagatcacataactgctaaatttagagtaataaccctaatctcagtttctcacataacatacacttaaatacatatatgagcgccactgcactaatctctttgtgcttgtttactgtcttacctggtaatccaagtatgtggagatttcaaatcctcgagtgttctgagcaagcgtcagtaatcctagtcacacattcctgggatttcacaaataggattaatcccaaattcactttcacacctataaataagtgaactccaattacagattaacacacagagcacaaaatgagcttccaacggtaccaagaatgtccaaaacacagttctgagtcaaaagttatggcaaaaacaagaaaccaaaaattggaaaaacagagcccttactgcggctaccaaagccctcgccgtggcggccacaacctggttgagctcgccgcggcgacagccccagaaaacccaaaatctccaatttttcatgccttcaaaaaacagtcaaactcataccaaaactcatcttaaacaatacataaactcaaactctaatcaacactaaatcaatctgacattggagatcaattgagctccataaaagctcaaaacaacaaatttacaaataccaaaaagcatgttataaaatgatcaacatagcacaataatcatcaaactttggtagtccaaatataaatccagaaattcaagctatttttctagaaattcaacctcaatattttattcaaaaaccttcaataataatctagatgcattaagtataaacaactactaacacaataaaaccaaaaccaccacttttctcttaattcacaacaacatgcactcacaatcatcaaaaacaccaagaacaccatgaacaccattgatgacctcttaaatctagaaattcaaacaagaaaaagagaataaagatcattgcctcaagttcctcaagctccaagcaagatcaagcacagaaccacacccgaaatctaaacttttcttccaaaattaatttgaaaacacaaaaatggagagggtgatagagagaggcgttttgtggtgtcaaaacccaaaaaatgatttctattttggctaaaatctgatttttgttgaaaatgaattatttggtcaattgaccaaattgcccctaaagcacacatataggcataaacacgtaaaaggggtaaatttatcatttctactcacatacaaatatcagataaattgcattttctcatttaattcatataagccataactaaattcagaaaatatattttgggcctcgagcacagttcgacccaaaaaactcgattgtgactacaccgtgccgacttttcaaattcacctacaaaaagatagaataaacatactatataataatatagtccataaactcaatatattataaaattatgattttacccttctcgggttaaaattacgaataggcccctgatacaccaataggatcttaaaatgcaataaatcatactaattccacatattaaattatataataatataattcctcattaacattttaacttagttagggttgctaatccgattattaaactttagggtattacattaagacaccacggtttgaagtcccttcaaattacttgatgaatgcttgtttcttcccgatgcaagacttataaaaattttctctcaaagatagcggtacttgcttcctccctataaaagacttgtagaaattttctcccaaagatagttgtgattgcttcctccaaatgcaagacttaaatgaacattctcccaaaggttgttcttcatgttcttcactttagaatttacttcacacaaaaataatcacaaagatacccaaactcaccaaaaaatagcataacaactatcctttacaaaagaaacactctttgttaaaattatacgaaagtaataagtggaagaggtcaatcttctgttgtaggtttaggtgatatttatagggataaatgacacccaaaaccaagctcaaaaggtcttaatacaaagagatgttattaaataatttccatacaaaaactcattaagtaatgaaattgtgtctaaacacatatggaaaatgtacaaatgatgtcccgatttatctaatcaacattgtgaatctagattccatcaaagtcaaattcatcctacgaatttttcttggacattacaaatcttagctggcgagaataacgcagatcacatcagaattaaaataaatcaattacaaaaaaaaaaaacaccatctacaaatatagtattcatttcgtaataaattattttaacttttcatataaaactacaatccgaataagcacatatatatatactaggtgaatgtacgtgccgagccacgtattgctagtttcatttaagattttggtctttttaagattttgaatgtattttatttttaaagatttgtcaaatttttttatttgaaaaaaattaatatttatattttgaaaatattatttaataaatgtattaaaaataatattagtgtaa

SEQ ID NO: 385978 - DNA, 1222 bp, Cannabis indica
attgttaaattttagagggtaagttggagagagaacaaaaatcttatctttctcaattcttcttcttcttcttctttctccttcacatactccttttatttatacctactacaaaaggagaggagcattgagagagaagagaagcttttatttgggtaaaataagaaataagaaatgggaaaaatgtggcatgtgagagaagagggaagcctacacatgagcctcgggttttatcacaaacctgtcacagacgtgactttttattttttaaaaaaaacctcacaaatttgacattaccatcaattcaatcactaacactttcctatataatataagatgcttttataatacacgtcaatcctaaaacaatatattaatgcatcccttatttgttttggaattcaaaagaatttttttaatttatttatttatagtcgtatatgttatagttatttaagaaattttgtaaaattttaaaaaactcgaaataatttacaatatagaaagtaatatttaaatagtatatttcaaatgcgtataaaataaaaaagttacgcatgcaacagactgtttgaatcttatttttggcatgttaaatattttaaataactaatatatatatatatgactataaaaaaaattagattaatttttctttctcaaatgctaaaataaataaaaatgtattgatacatctcttttacaaggatatattatagaattttccaataaaatacattagacttaattcactaaaacaaaattgtcatttactcacatattgagatatgtgtctttgtacccaacaaagacatcgttattagtttttgtaattacgtatatttatatcgatgtccttttttagcttttttttatattttattattaaggtaagtacagaaaatattattatttaggaagctaataactcatgatgagcatcatatattaatcaaaaaaattaattaatttaaccccaagtattaattatatatatatagggaccggattttgtcccgttactgtacggacacggattgcaatccgtgatgtactgtaacagtcggatgggcagttactttgatccaaaggttggggttcatgtaggggttgatgtaggggtatgtagggttaaataaatggataccggctacttttttgtaaattaaatttattaaaaaataggaaagtgaacagttacatccatcaatcaagtcctatc

SEQ ID NO: 385979 - DNA, 1082 bp, Cannabis indica
atagtatatgtgcatctaatcataacaatcgaaagataggataattctcctgcaaatatctctctccattataaggttttattatgttagtttaattgtgagttttcctcttaatcagttttttttaatggaattacctttagtttcattcaacttttaagttaaaaaattaatatttattccattaaaacacaataagactaatggtattctatcatgaatgatgctcaatggcttacagttaatggtaggaattaagaggcccaacaagaaaagtattgtttttgaaaagaaaatgaaaattcaggttcaaattttccttcagcataagactttttggtacaaaaacaaagttatttttgtaaataattttcaaatttaggtgcctgatgaaagtttctcaattttcttttactaaaagtttccaaggtgagatgctggtattaaaaaaaaagatttataccacatactgaattttcagcctttttactttttctactgtgagacaaaatttttttaaacatactgtgtaagttttgtactgtgtattgtgttaaattttcactgttattttacaattattttttagatgtttcactgttgttttttagttgttttgttttgtattctactgtcgttttataaaaatacagtatttttgaaaaaatttccgtgtggcagtatttttgtaaaaattaactcaaattttagtatttttgtaagtttctaaaaaaaaaaaaagttgatgagatgcttggattgggcctgaaattatgtgtaatgggcctgttaatgaccttgtaggacatcatcttccaaaaaaactttaaaaaatcctattaatgttgttccattgtgcagcactagtaaaatatagtgtgactaagtaaaatattaagtagtgtattaataagtaaaaaaagttatacctaagtaaaaatattaaccccttaacttaacttagatgccatttggtaacacttttgttttctaattttttaattacaaaatgaaagtaaaatttttgtttttaaaaattttgcttttgaaaaataaaaatgcgttctgtaaccacttttatt

SEQ ID NO: 385980 - DNA, 3087 bp, Cannabis indica
ccattgatggagaccacaacacagctcttccccacctcttgtcctgcgcctgaaaccagagtgttgaaggattatgatgagttcgtaaccaaactaaaatctccataactgtagatgatacagaagttatcggtggaactttccttaccaaggatgagacagtcgatcgccatgtccaaatttttttggcggcaaatttggttttatcaatttgtttttttaagttacctctcctaaattttttttttttttttttttaaaaattcagcatttatagataaaagaaccaaaaattaggctattacaaagaataaagtctggtatagaagaaagatcaatcatatcagtaacattattagcataagcccacttagctacattatgggtcgcgaaattataaacttaaggaatagaaaaaaattacagtctaacataaaattagagaaatgtttacaatgatgcacgtacttatcgattctctaattggaacaggtttcctttagagtcttgataactgtttcagagtcactatcaactatcacaaaagggtgttgaaacgaaacggtcgtctccatggctaatagacaggctgcagcatctccaataagagaatcatagaagttaagcatgtttgtagccacccaaaaaattgactcagtgtggtccctagccaaagccacaacgcacatggattcacacccaactctcacattacaattgatcttgacccaatcatcaagcagaggggaccaaacaggagactcaacagtttttgatgaagcaaataaacaggacacatagtatgtgtaacacatatagatagagatagagtcaatgcaatgtctaatgttacttaaaaaattatagtgaaccttgttgttgcgagccctccaaatcgtatccaccacaatcgaggcatagagaaataatttgtcaacatcaaccccttttgattttagattccataaaaatttaacccaatcccaaactcgagcgccagaatcaaaaactggcatcactccccaaggagaagatcgccaaaggtgaaaagttgtagtagaggaaaagatgctctattgttttctcaccctccccacaaagaggacaataaccacctcaatatgcattctcctaacgaggagggcagagataggaagagcattagaaataatattcaaccaaagaaccttgtaacgttccaagactttagaccttcataacttgttccacaactctgtggcgacatcacacacaggggcgcggtcaaaggcttgaataaggtaggcaaagttggtagaaaacaaaccgctcgattctttagtccagacccatttatcccttccttaaccacaaggcttaccatccttgatgatattaaagatcgtttcttaatcaaagagagtgtgtggtttagagatgtcccactccccgttgttaaggagtaaatttacaactttcttcgaaccatcagggggatgattaataggctttggatagaagttatggccatgaataacctacagatcatcccaggtatttatttccttgccatctgatataaacttgcaatcacctttttttagaatatattaagttctcacaacattcttctaaaaccaagaatccaagttcttaaaggaaccctccaagaacggcctacccttcaggtatttggcacttaacactttacagcacaacgattgttcctcaataagaagggaccaaccccacttagccagcaatgcctgattcatttccaaagacttttgaaagcctaggccaccccaaaatttggaaagacataggtgatcccaagcctttaagtaaagaccatggttcccttgctcacaaccccactaaaagtctttggccataccatcaatcttagaagcaagtttattagaaagcttcgttgtttgcatagtgtaaattggtaaggtgagcccaaccgatttaatcaaagtagtacgtccagctttagatcgagtttttcagtttccacccatggagttttgaaacaagattgtctaaaataaagttgaaattagcatccttctgacgagacctaaataacgagagtctcaagtagttaatgttactcatcgcattattgaacccaagttcctgcatgatggctcttctcatactctcactagtgttactactgaagaaaatgaaggtttttagtttattaatctgttgtccagaccagttgcgaaacttctcaagacattgccaaaagcccctagcttcaattaaattcgctctacccacaaggatcagatcatctgcaaagaaaaggtgagagagtgtaggaccattcctactgaacttgattcccctaatagctccagtatccagggcattttcaaagatgcacgagagaatatcatcagtcgatatgaagaggtaaggagacagaggatccccctgcctaatgccgtactcagggatgatgctactaaccttgcagccattgaggcatacattaaaggaagttgttgaaacacattgccggacccaattacaaaacttataaagggccttaaagctccggagcacatgatcaataaattgccaacttaatttatcataacctttgatcaagtcaattttgatagcaaacaactcttcattccattttttgagtttatacgagtggatagtctcttgaactaaaacattattatattgaatattctatccggggacaaaagctgcttaagtaggacatatccgtcgaggaagaattggtctaattctattagcaatgatttttgaaattaccttgtagaccgccttgcaaaatgaaatggtctgaactgggatacttttttcgagttaggcaccttaggaatgagagtcacattcgtagtattaagacccctatgtatagcccccgattgaaaaaaaatccaccactgcctaaatagtgaaattttttatattcacttgttcaattaatagatagttaggaacttgatttacaatattcatatcctctctaatgttcaataagaattaatggaatatctctttcttcatttaataaaaacaacaacaaaaaattacaaaaatataatttta

SEQ ID NO: 385981 - DNA, 1143 bp, Cannabis indica
acgtgttacccatccaaatgcaaagacaactcggatgtagtctacacgcaacttcagaagtcccgtaaagacttgggggcaaatgttatcccaatttttgcactctaacgtggcatcacacgatggtgacacatggaatcaactctatgtatctgctcacaagaaatatgccgaataggacgccacatacattcgctcagacgaagtcctcttagctgggcagtgagaaatccgcatagtatgctaacacttaacaaattcaactttcgcatcatgagtcaccgaagaaatccctttaactttgggattagatcacagagatatggcaagctgtccgaatcccacgattagtgtattctgtatttactatgcaatgtttctacttatatcaattgtaaccagaaggaaaatacttccctcccaagcttatagccctataaatagtgattcatattcactgggcaaagggtcaaaaaatctatctaagagtttatattcatagatactattgtaagagctctaagaaaaggaatcattttcctcattcttaagtcaatacaacctacgaggattaggctattaccgaactgttcggggctgaatctctataaaattcttgtgtctttatttgttttgttatattacactcgtattaaactacttgtcgcttgcaaattagactcattgtcgttggctaaaagcgaggtcaaaagattttataagttggagaagcactcccacaagttgacttgccccaccagcttcaacaaatatgtcccagacttctgggacaattggttcttcacaaccatgaagggggttctgaccccctatctctttatttccactccgggtaagcatttcaatctttttctttcttttcattttcttccatgtgttgtatccatttttgtaatggaacaagttttgtctttacaacgaacatcacactgactgtaatatctcgataagcctaatggtaaataattatggtttatatttatattgtgagttaatcaggtaataagttggatgatgatgctacttatctatttcagcataaaatttaaattttgctataagtgagtaaataagcgtaatttataaactgtagagatttatatagcatgtgtgaatgtaata

SEQ ID NO: 385982 - DNA, 823 bp, Cannabis indica
aagatgttgagaataacaaagagtgtggataagatatgacaatgtgtatcattattgatatacaatttcttaatactttctttccagttgtctaattctttcacaattcataatgacaatttattcttctttggtggctagtggttaatggacattattttcttcacagggcttatgctgtacgtgtaggtgtgtacgagcctacaaagcagacactattaacttcattgcctgagaagtttagtgctttagcacatctggtatgttttcatgaaagtttagacactatttggtgcatctttgttttccccttaatacacatgcatcaattaaaaaaattggtcaatgttgcatctcagtatgcaccgatcactagaacataaatttcattttaatatctccagctccatgcagactgcaggtattattgggggtgctgcttcttctctcatccgtgtgcctacagaggtaatttattatgtttcttttatcaccacagtacttgttttcacttcttgggtttatatatttttatattgcattctttggtcttatgggctgtttagtttctttctttataggttgttaagcaaaggatgcaaactgggcagtttgcttcagcaccaaatgctgttcgtctaattatagcgaaagagggatttaaaggtctttatgctgtaagtatccatctttattttcaagtatatattattcttttgagcttaacttattgtgtcacgtgcaattcttgtaatgagcttttaggagtttatgcttgtaacacataaatatatgaagaattctgtgcatttgacttgattgt

SEQ ID NO: 385983 - DNA, 6347 bp, Cannabis indica
aatatctcgccaatccaagaaaacttcaaaccttaataattatctttggccttgaccaattcttaattgattcaaataattttctcggatcaaccataattatatcctgtctaactatgtccttggaaggacacatgtgataaccgaaaatcacatttcttaaactttgcatacaacttgtgatctcgaagtcgtagaaaaaccattgaaagatgttgctcgtgatttgcttttgactgagagtatacaaggatatcattcataagtactataacacagttattgagaaaatccttgaagaccctattcataaggtccataaaggtttctagataatttttcaacccaaatgacatcaccaagaactcataataaccataccttgtgcagaatacagttttcgaaatgtctttctcccgaattctcaactgatgataccttgagcgcaaatcaatcttgaagaaaacttttttttccttaaagctgatcgaacaagtcatcaattctcggcaaagcatacttattcttaaccgttagctttttcaattcctagtaatcaatgctcatccaaaaggatccattcttctttttcacaaataaaaccgaagctccctagggcgacaatgtgttgggtaaaccctagatagagcatcccctgaagttgtatttttatctccttaagtttgcgagatccattcaatatggcgccattgaaacaggctctactctaggtgccaagtcaatgatgaaatcagtttctcgttacggtggtaattcttgtaactactcaagaaacacataaaagaactcttttaccaccctgacatcctcaggtccaaatatttcaggtctcctggagttaatcacaatcacttaaaatcctacacatcattgtgtagtacatccttagcctgtaatattaaaatgataaatatctgagaaccatgaacagaccgaacaaataaaaatggttcctcgccctccggctatcaccatagaaataatagcgataccattttctttagtgatggtaaacatcagagttggagtgggtttcacctcttatttcagttcatctttcttaaaaaaagggaaatccttcttaaactaccccatcaatccacactggaaacatttttttttctggttacatttcccaggatgatgcttcttacaacaaggacgctcaggataagaataggcctgacatccgcctctatcttggttcccacaaaacctcttactctgagctgtgccacctagttttgggaaaacttctttttctaatccgtattagaataaccaccattcctaccaaagccacgtgtgggaaaaatggtagtcccaccaacacttggagtccctcgtggctcctacaaaaattcaactgcaccttcagctcgaagagccttctcaacaatctcagcaaaggttgttctgtcatttgtagtattgatcaaatcatgtctaatcttggcattcaaaaccaccaaatatttctccttcttactgaaattcataggtactatacctgaacccaacttagccagtcgatcaaacttttttagtatactctttcactaacatagtctctccatgaactaacccagtgaactcctttcttttagtactacgaaccaccttattgtagtacttagcattaaacagatcttaaaactcttccgaagtcattgtagtgatgtcccgagtgagggacaccatttcccataacatgagcgtgtcctcttggaactaaaatgtggcacaggtcacccagtcattactggtgacacccataaaattcaggattctctcaatcactgtcagccacactctgccttcatcacatctggacctcccataaaagctagaggcatttatttgtagaaccgttcatagaaagtctccataaagttacaagcaacaaattgttccagtggcaccactagaaccagagtggctggcacttgctgaggaggcatagatggaggacctgttgtctcagcctttggatctcttcatcacgttgatcaatttgggcttgcatttctgtaaacctttgcccccaatttggaggagcctgttttggattttcataaccaccttcttgatatctgccacggcctctaccgcatccatagggatttggaggattttgacctttcctaccgccttcgaactaaaccatattgccctgactccttgtgtttcatcaggagtccatattataggacttagcctcgaatcgataggtgaggtaggtaagacatcgatcatatataaaccaaataccgcatactaggaattttaggcaagtcattatacaactaacatattactaacatgcttcctttcatacttttctaatcaaaaaaataaacaagtaaaggcttactgaacagtgagtcgagcttatcttggatgatgattgtagatgtctcgacaatcttcaatagacaacctgacggctctgacaccaaaattgtaatgccctaatgattaggcgcgctccagtgactttttaattatcttgcacacctttcctaatcaaagagttttctcaaaaatcgtgatgaatttaaacttttataactatacaaaatggtcgggatctcgctttttaaaactttcttacatgtttaaaataaactttacaactttatcatacaacaactacaaaataaaatccccagtattgccaaggctgaagtctccaggtcgcaccatcttgacatgtacaatcatcctcaagctctagactcattgttgctatgccttagcctttcttttatatacaaatacaagcaataactatgaatcgacatactcagtaagaaaagcatataacatacaatatattaccgacttgtatttaggcgcatatacacttatctgcaaggcttaacagatgattaagaacattcttaacaaaggtacgacctctgtaccacatgcactacgtaccgctactgtactagtgttagtagggtttgaatcataccccgagtaccactgagtgttgtaccacccgcactacgtacctaattgtactagtattagtaacaccgaattgtaccattaaacatcatatgctgtaccacatgcacttagtattgctactatactagtgttggtagcatatgaatcatataaatagcatgcatataatacacatacacatatacatatacattctatgctactctacctcattttcaaatttaagtgtctcggtcgacctacgtagaaaattacatgctgaacggaggcccttaattttcaatttgaacctcctagctaagttcctagaaggggtgttcataaagtagccgatccaatctaatctgcatgatccaatccacaaagtatgaatatccacacttgtgcggattggactggattgaaaaattcaaaatctgcagttgtgcatgttggatattgattaacatgtaaaagtaaccgatccaattcgatcaacacttatttataaaaaatattaaaaaattatatatataaataacattttaatgtgaagaaaattataatttaaaagtttaatacatataatacaattatatttaaatacttaatagatcaaatatatatatttcattcttatatataattttttttctacatacaattataaacaatattaaacatttctttttacatacaattttttttcttcctttgaaattttttatttactttattttagtttgttcttggagacataaaataacaataatttattttcttttgttgctagctatgtgaaaaaaaatattttttttacaaaaatattaaataatttaatattaaaaagtaaccaatcctaaataactgatccaattcgcacttttgcggattggatttgaattattatacggattggatccgaaaaatgaaatccgtacttagtgcggatcatatgtactatgagcaaaatagcccagattggatttgatgaacacccctagttcctagctaatctgaagatgatgctctaaaatctccttgattcctcttgttttacttagggctgaagggtatggtgatagaggattatgggtgtatgtgttttgtttttaagtctatcttaaacttaatgaaataaagatagagctaattagttttattccactaaagaattcagaataaaatagattgttctacaaatatccactaaaatctaataaaatctctttaggcaaaataccatttttgtcccttactttacccttacgcaaccttaaggcttggaggtaaaatagtctgataccataaccccgcctaatcccgatattccaaatagcacttgtgatttgccccacttgataaaaggttctaaacaaatcttctgtgactctactggccaaatggtcacattttccatcgttactgaacaaaaatcgtaaaaagataaatttcacatattgcatatataatatgcttagaatttgataaaatctccaaaaaaaattgagaaattataactctaatgtctatttcttgaaaataggatccacaatatatataatcacaaaatgcaaataattaatgttaattgcttctctaatccatattctaagtatacggtcatgacattattattttaaaataataaatgtttatttaactatttattttaatctatatattttaataatgaaaattactttttttaagttggtcttaaattaattaaaaattaatttttaactttaatttagttttcaagattaatttttaaaatctatatataaaaaaaaataatgtttataatttcaaaattaaataaaaaataatatagtaaatacctaaaaatatcttatttaaagtagttctaaaataattaaatttttaacataaataatttttaaaaagttaattaaataataaattaagtatcctgaactaatcatcttaatttgaaagatatcccaatttaagttgatctaaaattaactaattttcaaattaaatatattttcaaagaatattcgaataactatttttcttgaaaaatctactcagttattaattcgttagttgattcaaaattaattttcaacttaaatatattttctacgaaaaattcaaataattaagtatgtagaaaaatctaattagttataacttctttatttaattacatatcataaaaatacatatagtttatcatcaattaatttcattatactaaatgtatttttttaaattaatttcaaaataatctgatgaaaaataaatttcatatatcttgaaaattaattatgttaatcaattttaaataggttaaactaatataataagcctaatacttaaggcaaatggatcttcatagttggggttactcatgtaagtaagtgcttcgttctgtatgttgtacctactgctaataaccctctaactctcacacaaggcccaaaaaagaggaatctaaccttaattaaacaattgttattaattgaataagtccaatactaattgggcctaaataaaaactagcaaagtgacctttttattttaacaacctagtccattttaattatcaaaattaaattggctccctatatgcatccatacccaaaagcaaacatataggctcaagtatacacaatgatttggatggatcgtatcatgttactaggtctatacacagatgaaagaagattacaaaattatctgttacatattatttatttgatctattaacaattagaatatggctaaaatcagatcattggatttgtcaacaagttaactagagcaatttagatcaaacaataatagattttcgaaaacaagtttgaataaacaaacatacatgtaacaacattggatagttggttataaaatttatttaatttaaaattaaataattaattaattaatttcaaaaatcttaaataaataaatatttattttgaaaatattaaataattttttcaaaattaaacctataaatttaaaattaggtttataacaaacctaaaaatattttcaaaattattaactaacttaaaatttattgttacttttaaaattttaaaattacatatctaataaaataaaataataattaattatcatttatctaattttataatttaatttttaaaaaaaaaataacaaaattttgaaaaattgataaaatttggttagttttcaaaattatatagattattttattaaaatatatcatatttttcaaaaatttaaataaggttatttgataaaaagtatttacataattaaaaatgtaaaatatctgaccttaaatttaaaaataagataaaataatcaatcaagcaaaaaaatatagaaattatcctttttca

SEQ ID NO: 385984 - DNA, 746 bp, Cannabis indica
aaacctgtaatcgcctcagctattcaactaatactaataaatgatcccactgtaggttgcctttgtttattggtaatatattaagtaatatgaggccaaagtcctctcatatgaaacgtgcaaaacctgtgtcatattaatttacaaaaaattaactttaatatttgacactatttatcattgtaattcaatgcatatttatataactatatacaaaatttaaaatattccttaaatattaaaatatataaaaaataattcaattattattgaaaaaatatataaaatgtctataactttattttttattttttaaggaaaatcgataaatattaaaatgacaaaagtaactatgtcacgcaaaatatggagaattttcttccttctaaaaaggttcattgtttattttaaaagcatgcacaaatactcccaaagaaaattaaacaataaaattttactataaaaaaaaaaaaagaaaacctttaacttgtgactttctatcccaccaataaaatacctactagaaaaaaattgtttagtatatgtgtaacgtccccgcttcaagcctccattgggtccttatacccacggaataatggctcttatacacgagtatgccactctggctgctggtagtatcaatcaatcaatttaagccatcttcaaatgtgtagtcccatacctacacaacctcagaatcatctcacttgaccttccccaggctgtgtgggattgcacagcttacc

SEQ ID NO: 385985 - DNA, 906 bp, Cannabis indica
ggatcatttaagacagtgtaaatatgtcacaatgatttcgaagatatttttggcaacaatgaaaatttataaataattgtaaatatgtgtaaccagtgtgagaatcataccagattttgcatgagtgaaaatcgttatagtgtaaggtagactctaaactagagagaaatttcttctcgtaatctctgagaagtttgtaaagattcttgtaaccttataaataccgatatcaataaagatatggttgttgctgttccaactgagatgtagagcattgcacatggcttgaagtactcgttaaacttagtgttgtttcttttaatgttttactacataattcattatcttgaatttttgcgatctcttgttatattgtttcttgattatcttgcgcgtttgttggtactataaactgcatcataagtcattaatttggtttcgcacaacaggaaccctcaaggtgttgcggatgacccaatcaaggcatgcagaggtataagaaccctataactagcacgtggccccaaattgtcaaaaaagatcgaaaaagtggagaaggaaactgcattgatccctttttccttaataaaaaaaagaataattagtttagttgtcttattggaagcacaaaatgattttcttttggcatgtcaaaaaactagacaaaattatttagaattaattaaatgacaagttcttttttaatgaaatacttcttattacatgtaaagaattggtcatggagacaaagcactaaaaagtagaaacatgttgtgagtgaaccttattattatgccattcggcagggagaggagacgaggcatatagtgccgtccaaagggccacacacacaataattagtcgatcgagattataatctcatcaacacaattttttttttttttt

SEQ ID NO: 385986 - DNA, 2397 bp, Cannabis indica
tatatataaaagaaaaatgctaaaggctgtctagcaccatcttatttgtcaatatcgttattagttaaattaagtattgagtctcatacaatttaatataatagtttttaaggagtatcgctagtcaatcgtaacgggacatgtcaagaaaatattaagcaccactggtgcctaatagcaatgctctatataaaattaccatagcatttttaatgatctttccaccattttaaaatgaaaagaaatatctttcttttttttttttttttgtataaaagcaaacttcatcaagaccacaaggtaacaaagaaacaactaaaaaaacaagtaaacaagactagtttgaatccataaatggcaaaacatcaacaaaaaagaaagaaaacaacaacaatcctaggacacagtccaacaaacaataccatgcgcagcatgattcgaacggcaagggatctacatgaaattacagaaacacaccaactcttaaccaagtcaaataaatgtagaaaacatgaagtaagtttccaacaagagatctgcaaggtttgaatcgcattcactgccactctgcaatcagagaagatacaagcatccctctagccacattggatgcatcttgaaaccagctggcacaaggctaacgtttcagccataaggggagactccacctgaaccttaatgataaaggcgtcaacaaaattgccctgataatccaagacaagaactccaaggaaggccaccctcccacaaacagttgtgtccataaagagattcttctcccaaccgaacatccacatcaagatcaggaacgcaaataggaggctgaacatgagaggaacacaccaactcttggcactcctgcacacacctactaatcaaatggctcaaaaaaaacctgagtctctagtaccccgtcatggaaggctttattacaggcattccaaagtgcatagcaaagggaattaagcagcaaaaaaagtaaacgggtttccatcaaaatttagaggggaaactactcccataaggattcaagatccaatttacaatgtctctagaggacgaaaaggacaagaggtcactatgaataccccacaagctactaaaccaacaaactctagccaaaggacattgaaagaagagatgatccagagagtcttccccatccttacagagcacacattgtaactcattgttaaagatcacattaagcctcttaccacaatggaggatatctttccctaaatgttgtagaaaatgtttaatatgctcaaggagaggagtcctccaaagttgtttaaaaatcgcattgatctcaccaattctacatttagagagcgttttatatgcatctttaacagaaaataccccattggcagagtttttccagatcataacatctttcaaatcactaagaaagagtgagatcttgtggagatcattacttaaaactggtctaaaccagcttgcgaggttgttaatgtccagactccaatgtaatatctcggaaatttaattatgaataattagaatttattatatggatatgagttaatcaaatagtaataagtaggattatgatcttactaatttaactcagcgtgaattacaaaatttttctataagtagataaataagtgtaatttattaattacggagatttatttagaatatatggatataatgtgagttatttatggaataaaaatatttttaggtttagcaatcttggagacctgatcgaaggctaaaaatgttacaaacgagtttagttataaattttaataggattattgagacaagttagttttagaattaccgaaatatttcgaggtactcggggttgaccaaatgttctaaagttagagatttcttaatggctaaaaaataataaaaaaataatcattttcttaattaaattaattatattattgttatttattttctttttttcttcttatcttatttttaaaaaaacttaaggtatatatatatatatatattgaaacataaaacaaagaagtcaaaaccctctcctcttctccttctctctctcgcaagaaacaccaccatcgccacatcattttctttgacttcttctgctcaaaactagctctttaaacctttagtagcaaatagttgtaaggtaaccttgaagtggaagctaacgtaaggtttggttcttttctttttggaaaagctttaggtgtgaaggctgactttttgttctgtaattgctaagagtttggtgagattttggttttgtttttggagtgtttttgaactagttttgatgctcatttgatagttgtgttgttgttttgggatgagagctaagtttgaaattttaagctcaaagcttgagctctcatggcatttttcatgttagggcatgatttt

SEQ ID NO: 385987 - DNA, 1145 bp, Cannabis indica
aaatattaatcatttatattttaaactgagactatatcaattttaattgtataatataagaatatataatttaagtgtgagccaatcatttccaatttttaaataaggtgaagattttaagcaaccttaaagaacactatcattaaaaatgctctaataatgttgtttaataaattgagttaacccaaaataaaggataataattaatttttattttaatttttttgaatgaatggagatttcattagacatctgccaaacaaagtcaaaagctaatttgacaagatttaagcaatatataagacaaggataaaaattaactaatgagacaaacgtgtgtttaattaatattatattattaatttttttttttggtccatgcatgcatatatatgtgattatatatatttgtacatttcatgcataataattaaatttaaagtagaagctagagacattttagaaatggaagaaattaaaacaatgtatgtatacatatgctgtatcatcattttcttgtgttttttcttcaaaattagcaataataataagaaaaagaataagaaaaatgaaccgccatcaccaccttcatacccaatcataggccacctccatctcctaaccaaacaaccactagtccaccgagcattacacaatctctcaaccaaatacggcgacgttttctctctacggttcggatcacgccacgtggtgatcgtatcatctccatcggccgtacaagaatgtttcaccaaaaacgacatcgttttagccaaccgtccacctcttatcctgaacaagcacataggctacaactacacagccattctcacatccccttacggcgaccactggcggaacctccgccgaatagcggtggtcgagatcttatcctccgcccgtctcaacctctcagtcaacatccgcgacgatgaaattaagcggctccttcgcaaactcaaccgagttgatgagtttggaagaagagtcgagctgaggtcaaagttaagtgagctcagtttcaacatcatgatgagaatgatggctggaaagaggtattacggcgatgatgttaccgacgaagacgaagctccccggtttagggagatttttaaagagattaatcaggtggccgaagctgacaa

SEQ ID NO: 385988 - DNA, 611 bp, Cannabis indica
gcccgatcaaaaagtgagatcgatttgggtgcgactgcacgacgtgcaatcgattacaatcgcaacaatggttgcggctgaacgagaggtgatctctgaacgacgagtaggtgcaatggtggggacaaacggtgctgagcgtctttgtttagcttctatcgaaaatggtagttttctttacttctataaatattctgtaaatttttccagtggtgagctttagcttcctcagaaaacggtcgttctttttactttataagtatttttgagatcagatttcttatgaaaatttgcttttgatatgggtatgatgatgtagttgctagtaacgatggatcgtatttgagaatggagttagaaggattgcacaagagttatgtgtagaaaatacaatccttattaagatttagttaatttctcttttatattgataattttctaatttagtttatcaaaaattgttttttatgtttttcttgatagtttctctttttattgtcacctatttcattattgatttttaaagagcaatttgcggcgaaacccccttatgttttgatttttatacacttaacccccttatctttatttttggtggcaaaaccccctta

SEQ ID NO: 385989 - DNA, 3877 bp, Cannabis indica
ctcggccgtatcactggtagcttagcctactatatttatattccaatcaagtacaattatagctcaacacgtaaagtgtaatagaccttgacaaacccactaacataattactttaactaactcttctagttcagttagtctaacatcccctcaagtgacactggtctagaccaagtgtaactgtcatatagagatgaaagttatgcttggaagtggctttgtgaaaaggtctacaagttttcagaagcaacatatcgaacatcaggttgttgagcaatgactatatctcacacaaaatgaatatcaacttgaatgtactttgtgcaggcatgaaaaacttgattggaggctaaagaccctgcgccaagattatcacaccacaagattggacattaggagattgttatgcttaattcactgagaatagaattgatcctgatgagtttagaggttcccagagcaaatgcttgatactttgattttgtacttgatcgagcaataattgtttgcttttagagcaccaactaattaattttcctcctagaaagattcaatatccaaaaattgatctcctatcatcatgacatccagcccagtctgcaccagtaaaaccttagagatcaaatattttggttggtttgaagaagagaccagcatccgaagtgccagcaagatacctcagcactctcttgcaagcagaccaatgctcagaagtaggagattgcatgaattggttcaacttattgacaacaaaggctatatcaggcatttaggtattatagagcacctataacacttttgtaccttgttggattttgcataggggttcctgagtttgtagtgggtttgattgtggagcacattggagttggttaaggtttcgaataaaggagttgagttctggaaagaagatctctgatgtatttttgttttgttgagtgaattgaagaagttgttcttttaacctcaaagccaagaaaatatttaacaagtccaagaactttaagagcaaagacattgtgtagatcattaattagttgttgaatgtgagatggaccagctcctatgatgagtatatcaggaacatagactaaaatgagtatcaactttccatttatgtttttaaagaacaagcttgtatctgattttttgttcttgtatccccactgaactaatgtgcctttgagggtgtcaaaccaagctcttggaacttattttaaatcatagatttctttgtgcaatttgcaaacataatttgggtattcagtgctaacaaaaccttgtggttgggccatgtaaacatcctcttgaagtttccaattgagaaaggcattattgatgtatatttgttagatttcccaaccattattgatgtataagtctggatgttggaacttggaaagcattcaattcaacaatctgaggagcataagtgatagtggaagttggagcagaaagtaagtgtttgtatggaaattcttcctcattgaatgtgacacttctggacacataagagccacatgaatgctctgtagcctttggaggagatgatgtaccatataaataggcatttggagaacctaaaggcaactttgtggtgttcataaggtctacataggggaaagcaagatcatccaaacactttgagcatgttacagtcaggtgtttagtgaaaagcttttcatagggagagatgtagttgagagaagaggtaggaagcctattaatcaagtaagtggcgggagcaaaagcttcccaacaaatatgtaaaggcatatcagcctgtgcaagaagtgttagacctacctcaacaacatgtctatgctttctctttactcttcgatgttgttcatgagtatgagggtaagagttcctttgagcaatgcctagagtcctaaatagagcatacagaggttcaaattctttgcctaggtcagattggatgcttttattttagtttgaaagaatctttcaacaaactgattaaattgaatgaataaagtgtgcacttcagacttagatttcataggaaatagccacacaaactttttgaaatcatccataaaactaacatagtgtctaaaaccatcattggaagaataaaaagagggaccccacgcatcagataaaatcaattcaaaaggttcatttattttattttctattcttttaaatttgaactggtgaagtttaccagtttgacaagcatcacaaaagtcaagttgtttacacttttcattttatacatctgtagacaagattttattcaaaaaaggttgggagggatgccaagtcaataatgccaaatagtgccagtcttggatgtgttgtgcacaagattactagtggttgtatgattgaaagaacctggcttggtgacattagaatttcgcaaaggacttgggagccttgaggaggacatttggagtttgtagaggccttcactgagatggccttgaagaacaacttgccttgttcaattatccttgataagacaatgaagatcattaaattcaaggttaacactgttatctttagtgaattaagaaatgctgagtaaatttttggtaacattgggaacatgaagaaggtcttctaagattaatgattggttgggaaaattggtaagaatagaattgtttcctatatgatgaatagggagagtagaaccattacctacaacaactttggctttgccattgtattctgcttcaatattgatatttactatatcatttataatatgatgtgtttctccagtgttgacgtaccaagctgtaaatggatcagatgtggaggtattgttggagatggattcagacaaaaaggcttggggatttccactatttggagcagatgaacttgatcatggtgaattccattgaaagtgatatcaaaacgatgataacacgttactgttgtgtgctcaaccctaccacataattgacacattggtccttgaccacaacctcattagtttccattattggatccgcctcctcttttggaaccatgataacctctgtttgagtaagatcttcttgagcttctattatgattggcattggcaagattaggttagacattttgcagagtttttgtagtgaattgttgaatttgcatttcttaactttgcaacatgaattgaacatcttgaagtaagaggtttagttcaggaggtgagattcacgatcacaaactcttattcaaatcccagaccaaaaagaatatagagaacaagatcatcatcaattattggttgtcttgttgcaacaagattatcagcatattgcctcatcttcaacatgtattcttcaatggtgagaacacctttctttgaagtttgaagaagatttcaaagctacaacaatgttgcttgagatcttgatgcaaagagttgagcaaaggtgttccaaatcttagaagatgtgcgacaacgaatcacatgtccaaccatgtgttcagcaatagaattcattagtcaacacatcaagaattgatcgaaatgcatccattgttgaagagaaggattaggaatattacttgcaagaaattcatgaggttaaagaagagtgctaagaatgtatccatcccgatcatacgcacgagttgcagcacgcacgagcgatctccagatggtgtaattatttcgatctagttaaagattcaaggggaggattgttgtttgggaagggagtttgagcttctaattcttgatttgcagctcgatcgtgttgttgatttactcttacttttatgtggttcaatttaaactttagcgtttttgccattgtttccattgatcgacatggctctaataccatgtgtgaactctgaattttagatttttgttaaaaaatgcaaagagagaaaaga

SEQ ID NO: 385990 - DNA, 2967 bp, Cannabis indica
tatacgccttgcagaatggaaaaccttagttggatggtcttgaaaaaccctttgaagaacccatatgagtcttctccactaccagctaccatgtcctattttttaagaactacaatttgtgaggcttcaaaaagagtgtttgagttgtcctaataacggtagagatagtgtgtggtattaattttggaagaaagaaagtggggtctctatatatatataatcttgtggaaatgaattaattggggaaagttgatttttttaaacatttgtaattgaaacttgggaaaataaatcttggtgcccagaaaatatatctttccaagtcttttatgccctatacttataaatctaaataactgttataatccctacctacgatttaatggggcatggctcatggctagcttataagtataatatagtcaattagaagcagtcctttttatactaaaataatattttagtgtgatatcattttaaaaatttttttaaaaaaaaaataataactagggatgcccatataaataaatggtaatttaaaaagagtaatatattaatggacatgatttgcttatgcacgtgttattattacatattagataataataaatgttttgtaattaattttataaaagtgtacacgtgtgaacaaatgaacacacttacattacaaattttctcgttagtagtgtcgatgtacaaacacacgtgacactatcatggcaggtagttagtagtgttgggacaccaagccgctaataaagttagatttagggtctcggtacccattttcataacaaaatcactaatcgctattcaattagtcttctcgttagtagtgctgatgtacaaacacactagtgacactatcattatagtgtagttagtggttcagggacacaaagtcgctaatcaaattagatttagggtttcggaatccattttcataatgaaatcacttatcactcaagaattagtcttctctttaataatagcgatgtacaaatacactaatgacactatcattgtatgtagttagtggtttcagaacacaaagtcactaatcaagttagatttagggtctcggtacccattttcataacgaatcactaatcgctaaaaattagtcatctcgttaatggtaccgatgtacaaacacactagtgacactatcattatagtgtagttagtagttcggggacacaaagtcgctaatcaagttagatttagggtttcggaatccattttcataatgaaatcacttattgctcaagaattagtcttctctttaatagtagcgatgtacaaatacactaatgacactatcattgtatgtagctagtggtttcagaatacaaagtcactaatcaagttagatttagggttcataacgaatcactaatcgctaacaaattagtcttctcgttaatggtaccgatgtacaaacacactagtgacactatcattgtagtgtagttagtagttccaggacacaaagttgctaatcaagtaagatttagggtctcggtactcattttcataacaaaatcacttatcgctcaagaatttgtcttctctttagtagtggcgatgtacaaacacactagtgacactataattgtagtgtagttagtgattctgagacacaaagtcgctaatcaagttagatttagggtctttgtatccattttctatacgatatcacttatcgctcaagaatttgtcttctctttagtagtttcgatgtataaacacactagtgacaatatcattgtagtgtagttggtacactagttttactaaacaccatgtaaaaactataaatgtacttggtacgtgatataatgtactccactaccatcgcacaaatacataaaagatatgaaagaaagaaaagacaaaaataaccccagtcttataacatggacccaccgtctacagtacttttgtactattaactatcacaaatagtaattttttttaaaaaaaatcacaaatagtatcttgattatacctttttgtacttttttattttttaattaaaaaataaaattgaacgatgaagaaacctacaaccatcggttgtcaaataaataaaaaaattacaaaaaataagaaaaaggttaaaagtatgtaagacccaccattccatacaacgaattacattctgtaactttttaaattggacataaaattagctgcatatatacgtaaattggacataaaagtatgttacgaatattgtaacatgaggagtgctaaagagactctctattaactctcaccatagttgaatgaaaaatgtacaaatttttagattgacttgtttgtacctattaattaaccttatcttaccatcttattacaattatacctatttaataaaattaataataattactattccactatttcttaatttatataggaaagaaagttatcttttaatcttctcatcttcatagattatttttagtataaaatagaaaactcttcttcaatgatataaaatagataatcactattcctttttatcttttttcaatatatgtattacctcttaaatattatttaatgttaatttctttttatgatttttcagttcaagctgcgtaaagaagtattcacccctaataaaaaaaagtaagtattatttatgttatatattatataagttgacatatattattattattattattattttttgaaaaaatacgtattaaaacatatctttacttaatactcacaatgtatttgaatcatatatgaaagatgatatatatttaaatatcttattcaatataataaataatggtacgataaattttatatatttttttttttaaattattcttttgtcacaggtattgaatcatttatgtatactaacaattgactaccttcaaatagacaagaataattagtaagtatttctctatcacttcatgatacttatgtctaatg

SEQ ID NO: 385991 - DNA, 780 bp, Cannabis indica
aataagtttcatttcttcacaaaaagcttctgcaaatactattgatttaactcagaatatatttgggcagaatcataagatttgcccaataagtaagaacagccaacagtactgaattaatcaaaacacaacaaccaacataggaaacattcctagagctccaaatacgaattctagtcaccattttctctataatgcaatcacaatcagctttagaaattctttttgaacagatgggaatacccacatatctaaaaggaagagagcgttttgaatatcatgaggaatcaagagcaaattgagcatctttttttgaaattccagaactatagacaacagttttattattattagcatgcaaacctgaagtttctgagaagcttttgaaaattcgaagcataataatgatggattggacatcacctcttcagaataaaagaaggtcatccgcaaagcataagtgatttagcttcgaagaactgcagcgcggatgatgcttgaaatccttcgtcaaagagattttggccattaatctagagaagtattccatacctagcacaaaaagaaagtgccatgttttttgtatgcattactataaaattggactttagttgcagtttttaagacttttcagtgtgggttttggtaaaattcgctaccgttgttgttccaggcgacactataggggttacaaacaaccgacactgtagggattctattgagtaggttattatgaaaaaactgcctccataaggtccctatggcactacagaattttga

SEQ ID NO: 385992 - DNA, 946 bp, Cannabis indica
ctacaagaatgccaacttttgctagcgctattgggtaattgcgctagcattagttgacatttgccagcacaagtcctcaaatgtgccggcaaagcaagtcaacaatttttgcccacctcaacattttaccggcgcctaatatcgccgccaatagccaatattgccggcaacaaaccgccaaaaggtgggaattattggctgttcgagtcaacttttgccggagagcttacttgcgctgccaaaacgatttatttattttttttaatattatttacttttgtcgacgccaaaatgcaccggcaaaagtctgaaagaaaggcggtcaattttccctcgcaatgaaaaaacgtgcgcgcaaaagtaggtgtggcctttttccggcgcaattaatttcgccggcaaaagtgggaaccgtttgaccagtggacacgttgcatcggggttttgcttttgccggcgcatagccctgaaatttttggcagtcaacttcccgcctaaaggaaaacgtgtgtgaaaattttgtgggaaacttttgctggcacaattaggtgcgccgccaaaagtcccagcttaaatgaaacgcagcgtttcgtgcatttttattcagccacgaacccttcttccccattttcctcttctctttctctctctctacgttttggttgaaccaccaccagcagccccctctttccccctccaaacaccattttcaccatcccaaaaccctattttcactaccaaatctttttttctctctttttcttctttcttttcatcttcttttccaaaaaaccatttctaccgggactccgatgagaacgtgttgccgcacctccggcagccgctgctcgagctgccacccgccacccgccgcacctccactccggtaccctattttttctctattttagttttatttaatttattttttatttgtgtatatata

SEQ ID NO: 385993 - DNA, 1861 bp, Cannabis indica
tttattctatgtaccgatgagacaaatatttagctatttaaggcttggtatttgatgcctgtgaaccagaataatggcagtaagaaaagagttgagttcaagtcatgtataagctaaccagttatagggcttctctttcttggcaagtgttggtgatttcaccaatatatgaatatcattagggtcatatataatcacatatatatacttgccaaaggagagttgccctgtgactgttgtagcttaattagcatattacgtactgaagctctcgttcgatatactttcatatggcgtactactcaaaatattatggtgagcaatttgatcatcattttcactaaaacctcactcgttttgtttatctgaatgatctcgtattcaatttaatcatatggcctactgttttttctttcaacttaatattgatcttctgattatctagctgaacattttggtaatcaatagagcagagtataatattgataaatatctaatgttaatactatattgtttcttgcatagaaaaatacagtattgttttttttttttaacatatatatatatctatattttttttatgttatgtgtggacgagtatcataaacactagatcttcgactaaatagaaaaaatgaccataaaaaacctgggagggcttgtttggtaggtagtcttttaatacgaatagcaattattttatattctcatgtttgtctagttttttctatttagaggatagtattaagagttagtcccacatttgttaataagtagaaataaattgtgatatataagatgaataagctactcctcttatagccaattaattttgagatggaaccttatttatctattactatgaaaagattaaccttttatgaggtaatttaaatactttcaaaatacttaaaaacttttttaaaaaaattatgggttccaaatattgccttcaaccttaatatcatagatttaatatatttatatttttatataattttttacaatatttgtcatattcatgtgttcaaccaaattaacaatgtaatttgattaataataactaactaactaatattcttatacataaccaaaccaattataaaataatcttattatttaatttattattccaattaatcaaattatttttaacaccttatcctgaaatgggaaaagaatgtcaaattataaatttatatattgatcatgatcgttcgcttgcaaaaagacggaagaatacaatgagagtagccaagtggccaccatacattatgatcatctaaaaaaagagctagcatgtacgattagtaattttaggacaatgagagaatgagagaacaacggacgtacagaaaataataatatcacttatcatacagccaagataagagttatcatcttaataattaacaggattaacaacattagagctatcagactcaaccacaactttcaaaaaccttgacgttaccatcagtatatcgcagaataataattcccatgcaagaccgttgagtgaatttgttcaaaccagcatcactattcaatttcagaagcccttgacgtggccttaagcatcttacctaatacgtttgcaacacctgacaattcatgttaccgtagttatatatagaattcaggtacctatgtatatataaatagtgttagtcatgctttgtcacgttgcatacctgaaatgtttgtagaataattatgtatttatttcagaaagtgataaaaataaagtggtatgcagtggcggaaccagcccttagtcttaggaggggcctaagtatgttgattttttttagcataaggataaagattttttgttcttttttagcacaaatatgaagaa

SEQ ID NO: 385994 - DNA, 821 bp, Cannabis indica
tgattgtcattaataggtgtgatatgtcccatgtttatttgggatgaaaatctagtattatttgcattcttttgttcccttatagctagctcaagtgtcatttagttaaacatgttattagaatttttctttttactatttatggtaaattgcttgattagtctattattgtttattttgttcaatgaacaataatgaattattaatagatttccatttaacttctgaaaaaatactattttttattataataataaaaacattaaactagcgcgcaaaaagggctatattggctagtttaaaataatgaagataaattacgagataatgtgcgtaaacaaagtacatggtctttgagcagtgttaagacttgacattaatataatagagtaactttcgggcaagtcggcaaaacttcacacctccatcaactctcataatggtatagtggttttgatagttttgtaagttgttttttcactataattattgaattattattatctaaaggaaaaaaaagaagcaaaagtagttatttcttacattcactaatcgtatacacgtgtttaacctccagattccacaattttgtccagtaacatggcatttaatagtttttaggctaattaagatttttgtcccctaaacttttaaggtcgttaaaaatgctccctgaattattgagattgttggatttaaggattttttttctaattttagtgaaaaagtctaacatggatgaaagttcagggggtataatttagtacatatcaaagttcgagggcatgatttggtagatatcaaagtctggggagcatggt

SEQ ID NO: 385995 - DNA, 1103 bp, Cannabis indica
aggccttgcgaccagggttctgggtttgtgtgttcacggtaagggttctggatcggggttaatgttggagagtgagagagaagtttttttaaaatattaaaagtatatatatatactatttcgaattttgtggtatattaacacaacatattttacatttaaaacatactaaaccaaatttctcttttaaaactatgggataaatcattataaagaatgaggaataccataaaaaaaaaattaaaagtcgtgagttttcttttgctagatatcataactgtaactacagaaattggtttattatttttttttactttttttaataaaaccaaactacacaagtcaaaacaatactaaaaaataatgtcaaaccagtaacaactccaatagctcagcatttcaaactctctgtcactcaaagcccaaagatagcaaaagaaatagaatacaagaaaaatattttatatagtagtgtggtggatagcatcatgtacattatgatctgcactagaccaaatttgtgccatgaaatgaatgtgatcagcaggtgcatgagtaaactaggaagagaacattgggaggctgtcaaatgtatgatgatgtacataaagaggacctcaaatcttggattagtttactgctctaacactaaaaaacttgaagtgttaaggtatgtagactcggactatgcatgtaatttggatacaaaggtctcaaactagatttgtatttcaaatcaatgattgcaccataagttgaaaagcaaatcttcagtcaagagtggctttgtccacactacaacatttttactcagtaccggcggaagtaataccggcggagccaaactgccggtattaatggggttattaccgacggaaaaggcattccgccggtattacttttgaataattaaaaattaattaaatatttatttaaatttagtattcccgacggaactttagtattatcggcggaaaatccgcctctaatagtttgggcgggatttttaccgcccaaattttgaaaagactaattccggcggattattgccggcgggttccgccggtatttgataactctagaaattagagttatttttcaca

SEQ ID NO: 385996 - DNA, 1486 bp, Cannabis indica
agcatattaataccatacaatatgtaaatcaagtaaaaatcaactcaaattaaactacaaaataaccaaaaaccaactcagattaaactacaaaataactaaaaatcaacatcgaaaagtttatcactatattttaaaaaaaataaaataaaaatagacatcaaaacaactatacataaattaaacaattcaattaaatgcatatgtttaagtcaataatggtttataaaaaaactacaaatcacttatttaactcaatatattgacaacaaaatatacttaactagaaataaactagttatcgagtatatataacaacaattgtatttaatataaaaaacaactacatattattaatacattttaacttaaataaaacttaaaaataacacttaaataacttctaagaaatatatatatatatatataaaaaaaaaaaacaactacactcatatattaactcgttatattaacattataaaagatagacaaaaacgtaacaagatattaatctcaaataatatcaattcaaaataaactataacacaattaccaaaaaaaaaacaataggacaagtaaattttgtaaataaatatacctataaatataagaggagattatatgtaatgaacatattacattcttacatattaaagttggaaaataacattgattttacagtattgatgacatgaatgttagagccaaaaatgagctagttatcaacatatttgtaatagatgcacttgtcactcttattcacttcaaagccatttgaaatgactaaagtatcagatttttcatgttactacttcagtgtctactttaggtcgtatagagatttatctaacttgcaaaccttatgcttcgggcctaggatcacgaacccttcgggtttatccttgcatgttttctcttctaattcactattaaggaacacaatcttaacattcatatagtgcacaactaaattgtgtatggtagatgggcaactagtgaaattaaagccctaataaatgttgttctagagactagtgaaaaagtgtcaaataaatctatattctttctttgtctaaaacccttggctactaaatgagccttatatttgtcaatagtcccatcgagtttcattttcttttttaaaatccacttacaacctatagccttgtagcggtggtaaatctactgtgttgatttttgttagatacaagataatctattttatcatttatggcctctcgcaaaatgtccacatctaataaagacagagcttcttagaggttagcaggatcctcctttaatgtgtaagcacaaaaatcataaccaaagcctttagctaccctcactctcttacatcttctaggttcattgtctaagtcttcagtatgttcatccctcctaatcattggaatgttgctagattagggctgaggagcatcggttggttttttttttctaattaaaaattcaaaattcggttttcggt

SEQ ID NO: 385997 - DNA, 1668 bp, Cannabis indica
attaatttaagttaattttttataatattgagtgtactaaaactcaataataataataataataataagagaaatttacacaaattactatctttagtaatatttttatttttttaggttcaaatattaattaaagtagagaatataatttgagctacaacaataaaaatagctcttaaaatatcaatagtatttaacattagaggtgacactttataattggttatgaatattacaagttattacattaaattatatatataattagtatcccatatctaaacaaactttatattttaaaatataatgtaattgttaaacttaataattatacaattacttataaatacacaaaatataatgtaattatactatcttgtaattatataattacttccaaaattatcattaacaaattataaatggtgcccaaaaataatttattatattaaaaccctatacttaattacaccttatttttaacatttctctttttaaactctatacttattgatcattcattgagtccacatctctgaaatttttgcctccgcaaccttcggttccggagaaagaaaaaatcacacaaatttattattaattaattaattaattaattaaatttaggataattaaattaatatatatttccataaatacaatctctttgtttctttctctctcttctgttctgtttatgttgtattgtgttcagtattgaatgtcaaatccagcgaagaattagattttgaaagcgggaaatgctggaatcgattggctgtgaatcaaaatcctaaaaagactttttctttattactttcaacaattttttgtatatggggagtggagctaccttagtggacggtgttcgtcgctggtttcaacgtcgtcctacttcttcttcttctacctctacttctacttcttcatcttcttcttctattgatgataataataatattaataatgatggtcttctatctctgaaacaagaatctcaaggccttactgttgttgaagaagattttgatttttctggattgaaccctattaacgtacccattaggacccaattcaaaattggacatatgcatactcaaaagaaggttcttttcgatctttgtttttgtttttacgatctgggtttgttttcttttttgggtttttttcaatctttactgtcttttatttatgggtattgatctgttttgtttgaatggtttgatgatctgacaaagcaatgaatttatgggattcttgtttttttgattaaagctcatttatgacttgggagacattgattttaatttctgtgtccattacacatatctaggaaaaatatatatatatatatatataaatatataatatttatgtttaaagctaacatctttacttttaatctaagtcaaacagaactgatttcttattaagaaaataaagtctctttcagattggatgaaaaattatagaacagttttgtgtttgaaatgtgatcttaggagtttagccaaattgtatgttcttattgaattgtcattagaattattattattatcatttcatcaatgtttgagattgagtcaagattttgttcttttatcctttagatggatttgagatctcagctatgtcttgacattgtttccaatgatcaaaatgtcatca

SEQ ID NO: 385998 - DNA, 723 bp, Cannabis indica
agtagatatataaattaaaggtttttttttttacctaccttatataccaactaaatgttttttttagttctagaaatttaaaattagctaagtaaggaccacaaaaatttttatttttttttaacatttaagggagttaagcttgaagcatttcagtccaaattactaattatttaattattttttaaaattactgaaatgttattaattctatagtctacatcaaactaaacatgattttttttttaaattgttatttaattatgcgtgtgaaatacgttttttttaaacagtgaaatacgcagtttaaatactgcctttttatattttaaattaatttgaattttttgaaagtttataataattattatatactatgagaaaaatttaactaattttttttttagatgcttaaataatagtgagtgtatcgttatacacttttttaggagtgcaatgtagaattgccaaacactttatttttaataaaaaaacactaattaagtgtttaaataaaatactttatattaaggtaaaaataattgatataaaaaattatatgaaattttattaaaaaatatacataaatttgtttgtacaatattttaataaatatataaagtaaaattaaataattaataatattaaaagaaaataatgtgaaaaagaaaattttaaaaatatattaaaagcaattattaaaaattaatttaaatttttttc

SEQ ID NO: 385999 - DNA, 1039 bp, Cannabis indica
acaaatttgagtcttaatcaggacgctacagtgatcttttagttattgtgcacccatttgctaatcaaagaattttctcgaaagttgtgataaatttaaacttttataactgtaaatatataattgtagaaaaaggtcgggatccatctcttaaatttatttatatgatcaaaataaaccttacaacctagtcccacaacaactataaaataagcctaagtcatccggagaccgaactctccaggtcgtaccgtctggacctatacaatcatcctcaagttctagactcattgttgctcagccttagtctttcttttacctacacatgcaagcaatgattgtgagacgacatactcagtaagaaaatcatatagcatataatatatcactaacttgtatataggcgcccatacacctattcacaaggcttaatagataattaagaatatttttaacatatggtactattgaccatgatattagccactaccagtgctatgatcacactgcgggcctgccactatgtttgtattgctatgatagcatcaataatacccaaaagtacaattgaccatgatatcactcttaactattactatgctcgtactgccaacacagaattttgtttgtactgctatgatagcgtcaattaatactttttggaattggatatcagccaaaccaagtactatgcccgtactgctaacccaacactatggttgcaccgttgtgatatcaattcataacattatactgtaccaatgtacactagtgacatacacatcatgcaatttacatacatacacatatacatatacatattatatactaatctaaccttctttcttgattcaagtgtgtcagtcaacctgaatagaaattcacatgctgaaagtaggccctatgtcacaatgtaaaacagataagtgtttaccatataacacttctctaatgcctgaatagaacctaggttctttctactgaactataaagtgtacactgttggattttgtgacctaaataaaaccctttacaatct

SEQ ID NO: 386000 - DNA, 2157 bp, Cannabis indica
agttagtaatattgatagaattactgagatatgttgattgtagaaataccaagatatttaaggtactcggagttgaccaaataccctaagattaaagatttcttagtggttaaaaaattgtaaaataattgttattaataaagttttattattattaatattaataatataattattattaataatattaatatattattattattattattatttgtaactaataagttttaaacaatttaaagtttttatatatataacgctttaaaataaaacttaagaaaatagtatgaataaaactttttttctgggtgccacgaaactttcacgtttgctatccaattttctttgatttttaacccgaaacctagtaatttatgtatcgataatagcgggatagtaaatcattgaagatggaaagcttaaggtaagaattgattttgtcttaagttgaaaatgattagttttatatagtgcctttgtgatttagagtagttatggagattatgacttcatggaattgttcttgggtagctatgggactagttttgatgtttacttgttgaatttgaggtaattttgagttagaaatcgagtttggaactttttaaagcttaagtatgaacattaatggcgtttttcatttaagggtttaattttaatttttgtaacgtaaggactgatgtatttatggtatatatgtgccctatgaagtttagaatgatttagataggttttggtgatgtttcagagagtgcaaaatttgagatttttgacccctactactaaccggtccacgtttggtggaaccggtcaactggttcgtgtcaggaaatggttaaccatttcaccaaacggtttgtcattttcaaaaaattcagggaaattaaaaatcgtattttgtcataacttttcactcgggttttcgttttggacgttctatacactgttttgaagcttgtgacgagctctacaatatggtatatattttagagccaaaatataagttttattttattgtattatactacggggtttggtagaaaatcctaggttatcctttagaaatattaagcattttttaggataaatgcttattggtttactattgttgcgacatagagtcgagattatcagagaggtttatctacttggattggccgacatgcatgaatctggatcaaaggtaagaaaagtataatgtacaacatggcctgacaggtttcataattatcgattgtctgattaggcaatgataatatgaatatgatatacaagctcacctgattaggtgatgtgatataaggatgctagactatggcatggacttgcttaattaggcaatttgatatacatgcgtacctgattaggtgatgtgatataaggatgctaggctatggcataagcttgcctgattaggcaaatacggtatatgaatgccagattatggcatgagcttgcctgattaggcaatgcagtatatgaatgccagatagaccataggcttgcctgactaggcaatgcgatatatgaatgccaagctatgacatgaattttcttgagtaagaaatgtgatatgtggatactggtatttgggttgttcctgtgaggcaaacacaataatgtcatgactctaaactgtaaccgttgttaggttgatgcttgtttaggcacaagcggtagtgacagtgagtgccaggctatcacacgggctcgtttaattaggtgatacaatacatttgtgccaagttatggcacatgcttgtctggttagggatgtgaacatttgccaagttgtggcacaggctcatctgattaggtgatgcagcaacaaattatgtgtgataccagattatgacacaggtctgcttgattaggcaatgcaatatatgattgcttttagttccatacatacagtttgtttccactcttgaatgttattgcttaatcattttttaatagtgaaatgaataattggttattccatgtactatcttttattacttttcttgctgagtccttatgactcacggttgctctgtggtgcaggtaaagacaaagaaaagctaaatcagtcataaggtaatagtcttatctagtaatgtacatattgatcctatcggcctgtgtgctgagttgccaagagttatttttggg

SEQ ID NO: 386001 - DNA, 851 bp, Cannabis indica
aaaaaaaaaagagaaatagttgtaatagatataagttataactgttgtgggaaattaagatagattcgtagaatactgaagttctatttgttggaaggctttggagtaacgtacgtacacagaatcagatcaaccaattgatgatatggaattaattcgtattgtgataagtcaagagatcacgatacctatatatagtaatctttaggtcaatttgatctcaatatataatccatacagcttgtatatcatctcaattaattatcagattagaagtcaagtgaatttccaccaaacattaagatataatgatatacatattctgcattatatcttaaagtcataatccagttttgtaatgattcttaatttcacatgcaagaatagaatctgttatcgcttcattaaagattggagaaagcatatatagattagttgggaccctcttgtaacatcatgatatcttttgtcatcactaaaaatagaggataataatttagtagaagtaataaaaataactttatataaagttagtctttttaatatgtaatattgtttcattttatatgtctatatttaattttatttacttattattttataattatttatcaaaaacactatcaattttcttgttactgttcttttcttcttctccctctttctctctaaaagtaactaaaaattactccttaaattaggtcccaaagctgtaataaaaaataaaagcttaggtgccgtttggtaacacttttgttttttaattttttaatcacaaaataaaagtaaaatttttgtttttaaaaaatttatttttaaaaaacaaaaatgcgttctgtaaccacttttgt

SEQ ID NO: 386002 - DNA, 781 bp, Cannabis indica
tttttctccccatggttaggaagaaaaaggtagtatcgaagtctaaggtggtggccaccgttgttggagctgatgaaccagtgaaggatctcccttcaatccttgatgatggattgtgctctgagactcaaacggaggtgttcttcctctgtgaagacattgaaactaagatttcacctggctgctcccaatcaaaatctgctacgagatgggcggaggaagtggaaaatgaggagagcaaagcaggttaatcggatttgtactccctcaactcgattagatttcaccgaacctatgaaagttgggcatagactcgtggccaaactggacattgatgagattgaatctaaagctgccttatggcattcatccatagtttgtatagtcctaggagccaatcctccatttcgtatttttgaagggttcgtgaagaggatctgggaaacttaggcattgataaaattattcgtatgcactctggctttacgttgtttagttttagagatgaggttacaagggatattgttctagaaatagaggttgttcacttcgataagaagttgatggttcttcggccatggtcagttgatatggatacttgaatatggtccgatcagtaccagtgtggattcgattgaatagtttggggcttcaatattggagtcgaaataatctgagtgccatggtaagtatcataggtaagccgattatgattgataaggtgacgaaagacaggtctatggttttgtttgcttgagtgcttgtagacatggaaatctca

SEQ ID NO: 386003 - DNA, 1333 bp, Cannabis indica
ttcgggtcttattatccttagctgctaatttggggtggcctctacaacagtttgatgtaaaaaatgcatttttacatggagaactcactgaagaagtctacatggatcttcccccaggatgcatggtgtcagataagcaaagcctaaaagtgtgcagattgaagaaatcgttgtatggtttgaagcaatctcccagggcttggtttggaagattcacaaagtctatggttgcatttggttatcaccaatgcaattcagaccatactttgttcttgaagaagcaagacggcaaattaactgcacttattatctatgtcgatgacatggtagtaacaggaaatgatccagttgaaagaaaggctcttcaaaattacttgtccagagaatttgaaatgaaagatttaggcccattgaaatacttcttgggaatagaagtatctcgatctaaaagaggtattttcttgtcccaaagaaaatatgctttagatctcttgaaggagacagggatgtctgcatgtcaaccaataaatacgccaattgaagaaggattaaaattacgaatggaagatgatcaagttcccgttgataaagagagataccaaagacttgttggcagactaatgtacttagcccatacaagaccagatcttgcttatgctttgagcattttcagccaatttatgcacaacccaggtaagcagcatatggatgcagtcacacgaattttgagatacttgaagttagcccctgggaaaggaattttgttctctagaaagacagaagaacaaaccatcgatgtgtacacagatgctgactgggctggcgataaaaatgacatgcgttctacttctgggtattttacctttgtgggtgggaatcttgtgtcttggaggagcaagaaacaaagtgtggttgctgatcgagtggtgaagctgaactacgaggactagcccttggtgtttgtgaaggattgtggttgaaattactccttcagaatttaggctatgctacaattacacctattcggttatactgtgataacaagtccgctcgtgatatggcctataatccggttcatcatgatcgaacaaaacatgttgagattgatcgattttttatcaaagaaaaattagaggagaaaagtctagagctaccgaaattcgatcagaagatcaactagcagatattctcaccaaagcagtctcagttcgcatattttcgaaatttgtgaacaagttgggcatgatagacatatatgcaccaacttgagggggagtgttgaaatattctacaaatcaattagtgatttctacaaatcaattagtgatttcta

SEQ ID NO: 386004 - DNA, 1150 bp, Cannabis indica
aaaaaaagaaaagaattgcccatttatttgatagtaactgatgttatacttatttcagattaaaaaaaaaaaaaactgatgttacttattatcccatacatattgagtttactttaatataacaatccacgctcatttcaaaaaaaaaaaaaggtttaatataacaataaagctttactactttttcctttattaaagaaataaaataaaaaattgaatagaagttttctttttctttttaaaatgaagaagttgaaagtcaaataggagagacaagaacaaggctgataccatatgataattgagccttctcactctaaagactgcaatgatttcactctgcaatataaatgatggctcaagtgaggcaggctgcaccagaaaatttgagccccattttactctaataatgacattgacattggcaccatctctattgtattattagtatgctatcaaatacacttaaattcatgtgtatatatatatatataaaagctaaatatcttatgtaacagtagcagcatagaatttgaatttttaatgtgtgaaaatgttatgttgctgaacaagacatagatgatgctgacagctctgcttcacagctcatttgataaaaaaaaaaatgcaaagagaagctaaaaatgaagtatgagaagaaaagagatggggacaaaagaagaaaaagaaaagtgggatcaattggaaccagaaaggagcatctgaagcagagaggacaaagggatactgattaaattgttgggccttcttctgttctgttcagcctttaaaaaaagagttaatgctttggacagacagccattcatttatatttattgatgtaaaaagctcttaggattaactatcaactattctgattgcacagtcatttctgtcagccattgttcctatccaccttacctatttacttacaccagaccacccattgttgcaacagatgaaatgaaagtttcattaacattttaagtgaaaacatttccatgtacccttttaaagtaaaaacaatatcagacactgtaggttaaactaatggcaaggatattctaagttgagtatcttatccaaatttaataatcggtccaaaaagaaaggcgaaaagagtttatgatttgaggatagtgagccaaaa

SEQ ID NO: 386005 - DNA, 2785 bp, Cannabis indica
acttcaccataacctccagacctactaattataccctaataaatatatttcatgcaacaaaacatcacaacatacttagaataaaaaatcaccattaaagaccaaagtttaagttcttaaactcagactttgtctaacaaccacaacaagccctaaaccaacttcaaagcagctcaactaacataattcaaacctcagaatataaactcaagcagcaagaacaaaaacaggatcctaagacataattcatgcaaaatttctttacttaaagcttaagaaaatcaaaaggaagggtgctataagggttaccttcaatggaatcaccaagaactagctaagatcccttgaattaagctgttgaaaccctagattctgctggtttcaaagagagttcgatagaaagagagagaagaaggaaagagtgttttgatttttttcttgatttttcttttttggataaaatgaggtattcaaagtatattaactaaattgaatttaaaaaatgagattacaaaacataataaactcactagaagacaaaaacctaaatggctaaaaagaccaattttccctcctatatactaaaaactacacttaacacttaggggtaatttggtcaattccaacatctcgactaatcctgacattcccaatgtctaactatattgccccactaaactaaaaatactaaaatgtgattctaaaggccaaacgccgcattcccatgttgtcgggcacaaaatatattgttatactcaaaattcggctaacacatcagaggaagacacgtgtaaagctgggaaaaatatgaactcagacatgtaatcataattatatttgaggaggaataactcgttaagagcataactaacagattatatttataactcagctgactgaatagtcttatgcgagacaaaaatatacaaactgttgccttgggcattaacaagaaaccgtgtaacttcagatgtataagacgaggcattaacctcgattacgtggatgagatatattgtctgtgaagacacttagtgtataatttacaatatacaaactaagtataacaaatgagtgagccaaagcaagtgatagcgaggcgtccaccttgccataggaagacatgcacacgaagaagatcatctcatcatcagaaactgggattgttagatagaatgttatgttttcaaagtaaaagcgacgggacttgcattatcaaccttagaaagaaatatgacaaacaccagctcgctatcaagattgactctactctattcccagcgagacattccaacacagtatggtttacaacatgtttaatacacatttattttgacccaataaaagcgggatatttacagctgtgtgatattcaaataatcaccgcatttatactacgtgatatgcaatcagaccccatgatttcaggggataaccgttgtaaaaatatcggtcaaccttgtaattaactgcctacaatgtgattataaatagtggaaggttagatcaaaaaagggagacacaaaaaaaatcatgtgaaaaaggccctgaaaaactatcaaaaatctaataagattgactcgtggactatgcagaattttaactgcaaaaccacgtaaaaaataatcctcatgaaagaaccaatcattctcctagaaaagagccattgagtccccaaggatcacttgatttatcatctgaacaggccactagctctggaaaaacccagtattggggacttagactcgaagggcctaggataagcaacagtcggtctctttataatcaagttgacgaggatggcacctatgacccaaccaggtacatacccatcgttgagttagaaaactgccttcttaggcgccgattggatgaagcaaactggcgtaatgctgaattagagcacgagatagctgcagtcagggtgtcacaagagaatagttcccaaaattaacctgaccttggagaaagagatccacaaggaaaacctcgtgactcacaaatcaagggtcaaaagacaacccaaaggtatccccaaaactctcaagagaggcaacctgaggaaactgagggataccttgaaggtgagatgccctataatcaaccaggaaccaaaaaactggaaattccccataggaataagggaaatttagggatacgacctgggatatatggatcatcagtcaggaatcgccaaccttctccccaagctcatatgaaaggagctcgcataaatccctataaggggaacaaggcgaatcaaatcttaggaagaagagcaggacgtgaagaggcgagagctaccgcgaggtacatggtaattcataactgatcaatacaagtagaaaagaacgctcgtcgcagcgatgataaaaaaggtagaatacggtctatgggtggaacgagattagccaatcggcatggccaattggacttacgaaaatgcttgaaccagaaaaaacctgatcttcgtcaacaacttggaccaaagcaaagggattcaatccatttgcgaatagacgagttggagaacaagttcaggaggctttaagttgaggaaacaggaaaacaaattggatgtgagtctgttgaagaatttaagttggagacttccgggtcaaaaaggaaagacaactttaaaaagttatccaacgataagaaacaaaagaaacacaataaatatgtacccatttatactgactataccgagcttaatgaaactcgggaaaatatctacctcgcatatgtacaggaagtcgtttttagcgagccaaaacctatgaga

SEQ ID NO: 386006 - DNA, 1367 bp, Cannabis indica
tcatcagtttgggcttctttgggcgtagataaaattttgattcttccgtaaataaaataaaactgtaatctagttagttagagcttgttttgttacaatttgtgggatgtacaactagtttgcattcctttccaggacctttattcaatattcacacatacatgcacatattatacacctccttttataaaagtaggttatacacctcctcttataaaagtaggtgtaatggttatgtttaaataaattaatgtcttgagaaaaatttgtcgggcaactttgtttttggtgagatggctgagacaaacagtttggtggctaactcatgttatgtttataactctagatacctgcttttggagcataccaatgttctggctttattaagcaaatctttttcaggggctcagaggtaactattacgattttccccttctgtacatttcgtcaactcctcgtttcttggcagtaagagtgtataatctaactctgtatatgtttcaccttttaaaatagggagatgttgaggatgaaaagagtcggaaaaaacgggaaaagctggagaagaaagcttcaagaggcaagtttgtcaaacaaagaactagataatccacgagcgctttaagtagagcaagagagcatgttagctctaggaattgaggctctgcaacatgactaacaccccaagcgaacatcttcgaagacttgacaaagacaaagtatttatttgtagtaaccatgaaaccctcactgttctgtttatggtagactggtttagcaatatgatgataaggttaggttaaacaaacttttgtaagaagcattattgagacatgtttttgaactaaattgtttcatgtatttcttggggaacaattgaagaatgaaagacaagtaaaaaataatatgtgcatgcatgaatgggaggtgattataatacaaaagatgtatgtgaacaatattaaatctcatgttcaaatttctgaatgtttgaatagatgatatctttcttaagtttaaataaagctgttagaaattaaaattcagcatgatgacgacaatgaataaagtcatttttaactagagaatgtcatgagttttgaaaatagcaacaaataggtttgagtacttcccaaattcattttatgctaaacaaactatgtcttgcctaattaatagttttaagcactgtgataaacaagatgaactaaacagttctctggtacataataacaagtgcatatatatggatcataacaatagcaaaaactcaaagcaaagtttttattttaacatatatataacttacttatttctaaaacctatcattattttatatgggaaatttgattttctatacttagaaa

SEQ ID NO: 386007 - DNA, 517 bp, Cannabis indica
gataccatagggaatttctctgttttggcaagtaaaattccaaatgacagtaatcaataaaactgtatttttttatgcataattttgatctctccaagtaaaaatatcattatacagcaccagaaattttatgccaaaaggccaattatgacatattttccaccaaagatacaatataaaaaaaaaatgggcaaaataatttttatttcttcttttcattttgataattcttcataaaaataacctctatctctcgtacaattcaattaaaattctggacaccctacatgtacattatttcatattgaaaaaaaaaaaattatattttacaacgtgatattaaaagtacttttcaccaaatataaaaatatgtaaatgagagagaggttgatgaatatgatgatcagatgagtagtgcagggtccagttatggttcatgatcaatatatatttagggaattaattaattaaagaatcaaaaaaggtgaaatatatatatatatatatagtagtatag

SEQ ID NO: 386008 - DNA, 1036 bp, Cannabis indica
ggaaaatagaagcatgtaaatctgcaaatgaagtacaaatagagtcaatacacttcttcacatcaatataagattcattatgtaccttgtcatttcgtattcgccaaatggtgtcaacaacaatcgaagcataaaggaaaacctcatcagcaggaattcctctctatttaagatcccagataaattttacccagccccacatgcgaatatcagagtcacacacagaataaataccctaaggagaagaccaccaaagatggaaagccacatcgtaggacaagaaaagatgttccataaactcctccaccaaaccacataaagggcatttgacatcctcaatatgaaaccttttcttgatcaccgctcgggttgggagagcgctagacaagatgcaccaccaaagaattttatgacgctccaaaattttactattccttagcttgttccagagcgaaggggcaacctcataatggggagccctttccaaagcctgagccaggtaggtagatttgcacgaaaaacgaccattactttcaagagtccaaattcatttatcattaccctggccagaggggttaccccttttaagattgcaaaaatcatttctagatcgagaaggccattcaatttatggatatcccattcaccactgatggtaataagatcgaccactctgttgaacttagaattagaggtaccacttggttttggacataaatattgatatgcggaaaccagggatccccccacatattagtattcgtaccatcaatcaccgatttacaggcacccttccttaaaattgacttggctttaacaacatttttccagaaccaagaatttgaattttatagctacagttaatgaaatccttccctctaaggtatttagctgccaaaattcggcaacatagagactgagaaccattaagaatgttccacccccacttcgccagaaaagcctggttcatctccctagtttttcgaaaaccaaggcctccaagagacttggggaggcaaagcttatcccatgcttt

SEQ ID NO: 386009 - DNA, 1557 bp, Cannabis indica
tctaccatatagacccaacagtatttaaccattatcttctaatatctaatttaaaaagtatataactactatacattatttaaatatgaaatcataattataccaaaacatatcataaccatatcatagtcatatcataaccatagcataactatatcattgtttaaataatgcgaatcatttgtaccgaccattatccaaacaacataactagtttaaataatgtgaatccgttgtaccgactattattcaaattacttatacatatctatagtttagataatacgaatctattgtaccgttcattattcaaatcgtatacaacatatatatctattgtttaaataatgcgaacccatcgtaccgtctattattcaaacaacatagtataataatgaacaactaaaaataaggttagaagtcttatacctcattctcactccttttgtacattatttcatacaaaaaacttaaaagtttatgtttaatttccttaattactttgaatgtggagatttgaactttgattgcaggagtgacactgagaattattgtatgctttattcaatactcacgaagtccttagtcctcaaagagaaatataggctagtctatgagaaatatattagagctcaaaatcttacaatccttctctatgtttcagccaccatgtgcaacccactaaaattgtgatcatagtatcacataaagaaacattagagtttgagcctgaacataaaagaataacgatcttatatataaccttaaaaaaataagattggagtttagatttaacaacttacaatcaccctatgataaccaaataaaaaagtgatataatgatggtaatggtgaaacaatcaccgacgtctcaactaaagaatatggttacaagttgatgataacaaatggtgatataaggtggtataggaggtgattgttgtatatatatattagaaaagaactcaaggttcaaccttacggtgtggaggatggaaattagatagagcttgaatgataacaatggtggtggtgatgaaaagataatattggatgatgaatatggggcactggttaagagagctagattttatctttagtgttgaatatgagtgagaaatgatgagaggaaccctccatttataacattagacactaaccatacgccctactttctagccagagcgtggctcttcaattatttaaggttaatttcaaaagaattcaaataagtaactatacctcactactcgatcacaaacccactactgagaaagactctcctttgagtcaaacaatcaataacaaactatatttctttgttgattctttgaggttaattctctaaggttgtcatgtatagccttcttatcatcctctcattactaattttatgttttgaattctctctcttaattaccatgcctacatgtccaactagtatgaaataaaatatatttgtttgtaaataaatttcttgatttaagtgccacacgatcagggcctattctacaagtggctactactaatatccattaatacaatacctcactatac

SEQ ID NO: 386010 - DNA, 848 bp, Cannabis indica
acccgaccaaaccgaccgatgtatatccctacttttacaatatacccctaaagaagtttatttatgcacatctatctagtgtattttggtatctaagagaattttttagtttaatttttttatagatgtctacgttgtaattatttaagacattatgtaaaattttgagagattcaacaatatataccatactaaaaatacggttcaaatagtttgtgtcatgttttattttatacgcgtgtgaattagactatttgaatcttttttttatgttaatttttttaaaattttataaaattttacaggttgtcttaaataattacaatattaataattataaagaaaattagactaaacaatttttacaaataccaaaataaataaaaatacatcaataaattcttgaaaaaaggtggtgtattataaaactattcaatcaatatatacttaataactattataaattgagataattattcgtacaacaccactcatttgagggtcagctcaatttgtaggacacatggccgttaacaattagatgctttattcttatcatttataaagtcaattggatcatgtctcccaatattcatggtattgttgtctctcactaatattccatgtccatcccactaattataattggaccttaatctaagtagtttattcatcttgagaaatttgagtttctatgactacactagcaccataattatcaaaaattattttacttattaaaatatgctaataattttctaagttctcattctcaaaattatttaaattatcgaaagagaagaaaaaatctacactaaataattctcttattacactatgcattctcc

SEQ ID NO: 386011 - DNA, 1959 bp, Cannabis indica
agtattaccaaacgacaccaattattgtcttaattgaaatataactttttttctttctctgttacattctgcaggacaatgagaacaagagattccataggttagatagtccacattcaaattataatcattgaacacaaactgaattgaacaatcttcgaagattcaatttacacacaaaattaaattcaaacataagcaatcataatcacaaacataaagaaaggtaatgcaagaaagaagaagtgaacacacataaattttcccgaggtccccaatcataggattatgtcctgttgaactcgccatagaactggattgctcttgcactatataatcaatcttagattacaacaatatcgtggaaatttcaagtcacacactgactagctagtaatttcaagatccggcctctctctcaatctttcttttacaaattgtttctctcacttgagaattcttctctcttgaatttcttagagcttaattttgctcaatctccgatcattataaaagacattaattcattgttaaactaaaatggacatataggactcccacaaggaaacacaggacaaaaatataaaacgaaaaacctctccagcaacactgtgaagattcctcccaataatattcatgtgattaattattattattagagttgagcatgtacaccattcaatattcatccatatatatgacattatttaattgcatgtgaatacaaaaatattgaatatacataatacatgtacgtataaaaacatatatttaactatttgttaccaactccatcaacaagaaaaatcataataatttattagttattggattttataatattatatattcacacatcacacacattttctctaccttttacctacacatgatcacacactttctctattttttacctacacatgatcacacattttctctttaattaacctactctctctctcgccaaatattcacatactctgatctacctactcaccacctatatatatatatatattcatctatatatatatatatatataaattatctccattatatatataccatcgtggtcttgattattcaaataaattctcctttttccaacctggatccctacatgcactacttttttctcttctcttcttcttccaaatttgttgcatgataggatatataggatcacacttcttattgatcatgcacatcaaaaaatgctcgcaccacctcggctagtaaaaatttactctatttatttacaggccaaactgaggtgcgagattttttgatgggtacgatgaaggcgtgtaattggactgtatattcaaaagattaatgtaaaaggtacctacacctaccttttatatatatatagtagtatagccctaaattgaacattatatatagaaatatataactcaaataatatatatagccctaaattgcattttttttcttctttaggcttagcacatatatatctctaattaaacattcaaacaatatttaaaatttcttgtctttatgttaatttaaagtgaaaaaaaaaatattattagaaataatttggagaatatattaattttgttaatttttagaactagtgaaaatttttatatatgccaaatgaatagaccacatacaaaattttgttgagtctgtttcctttatataactcaagtatgagactattattcattgggttcaaaatagagttttctgaagagagccattgtaaaaaaaagagagaactcttttgagagtcattccttagtgtgtatttacaaaagaaagaaaaagagagagttagtatctttataaaggaaaaaaatagtgatacaaaaagagagacaaagttgtattaagacgtgaatatgaagattagtttttcattaaattttgttaaaatgatcccctaattcaaaaattgaaaatattcttcttttcagggtaaa

SEQ ID NO: 386012 - DNA, 1311 bp, Cannabis indica
tgtctttgactgctattggttgacgactagctttcctccctgcacgctgatatggcaaccatagttggtcgatatctactcacgtcgcaattttttttacaaaatttctttaccgaagtaaccgccccttgtactcttgtgactcactccctctcgaggcaactgaggtgtcctttcctcctttcggggagggttataatcccttgtcactcaagttaattggaagatcgagctgatcatggacattgtcctacccctttacatatcctcgaaagtgtccctgcgatatgaaaccttctatctcatctttcagctggcgacactcttccatggtatgactaatatctccatgatattcacaatgtttagttggatcccttttaatcctcgcatgtttcataggttttggctcgctaaaaacgacttcctgtacatgcacgaggtagatattctcccaagtttcattatgcttgatatactcagtctaaagagggatatatttgttgtgtttcttatccttggacacccttttggaattgtcttttctctttcatcctaaggtttctgaattaaattctccaatagtctcattccccaattgtcttctgggtttcatgactcaatgccttctgaacttattctccaactcgtccattcacaaatggagtgaatccttttgctttggaccaagttgctgaaaaagatcaggcttcttcaagttcagatgctctcgttgatcactcctgttgtgactgcggtcggaccgtactcttcctcttaaggtttaattaaccttattctccctataagggtttgcacaaattcctttatgattaatctgaagagagggttagcaatttccatctaatgttctgcatatcctaggctgtatcactaaattttcctcagtttcctcaagttgcatctccttagagttctgagtatatttctgggttgtctcttgcaccttggtttgcgagccgcgaggtttgccttgtggatctcttctcccaaggtcaggttgattttgggtttcattctcatacgtttcccttactgcggctatttcacgatctaactcggaattatgccagtttgcttcctctagtcgacgcctaacatggcgattttctaactccacaatcggtatgtatctggtttggtcgtaggcgctatcctcatcaacctggtaaggaagtgaccggttgtggttgacccatggtccatcaagtcaaggaccccaataccgggttttcctggggctcacagtttgttcgtgcgatgactcaatagatccctgaggactcaatg

SEQ ID NO: 386013 - DNA, 2498 bp, Cannabis indica
cattctcaaattgcatccataatttgcagttttgatttccttataattactcctaaacgaaaatgtttaacccatactaaacttgtgatgtttgataatttttttcgttttggtttcagaattaggatttgagtattgaaattgaaactaatctcactatcgtttccaaaaaaaaaaaactaattccactatatttcaaaaaaaattgttaacaggccaaactggagaaagagaaagaaagtaaatacaaaatgcaatttagggaagaagaaaagactcaaatgaacatataaaagaagtcctggaaaagtaagaccaacaactatagtatcaaactatagaatgaaatgtaaatcatgaaataatacttttctcatttataaaatcaatgggtttcatcccattcaaagtgaagtaacaaccttcttataatagaaacagggaagaaaaactaaaaggcatgcattaggaatacaagtaatttccatattgtataccttaaataaatctatacttccttcaatcattccccaggagtccaaagccatcagggggccatacctaattacaggaagaaaatatttgaaatgttgagctgcacttggcaaaattgatacagttgtttaagtagagaaagtgaatgcaggctcgttttcatgcaaattcttcaaaagcaataattgtttatggcacagaagattaacatgcatgctaaagtagcaaactccatttacagttgagaataagtgggaatactacacaatgcagttcaaaaaatggtgacttaaatagctgtaaaaacattaccctgagaaaaacttttccttgaataaggccataaggtacagggccaaaatgtcgtgaatcattggagacgtatatgttatccccttgaatccaaacatgccccttggggacctaatttatacaaaatcaaagcaaataaggaaatactaagaacaaaaatgaaatgctttagtcaaacctaatatgaaacagattttacaatgacaatagaacaaaaaaaaacaaaggaaagaaaggtatagtaacatgtaagaaacaccccagaaagttgatcttcccaccagcataagtcaaagcttataattaatttcaataccaactaagtaaaaacattagtaagatccacttcgtattatgacaaaatactatcaattttatttgataacatgatttcccaattaacaagatccttactttacaaaagaaatattccgctttttaaataatgctagtgaatattagataaagtcatgatcaatttgctacaatacaatgttcaaacttcaaacttaaaccactgtcaaaagaaataagatttagtatttctttatttttctcattgtagaaataagatttagtattgaagatgtgaagaaataagatgatataagtatgacataaaatgccgaaatttacacctagattatatttattttataccatccccaatgtatctaaaagactatgaaggtttaaaagcttctttcactcttattctgaaactgcagatatatgacacaatttagagtcaaacttagtcagtgtttcactcaagtcgctaaggccaaacaataataggaaaacattagcttatgaaactctttttcatacctatagccaattccatttgtataatgatactgactaaaatactcaattacaacacgtctagaaagttatatttttacttcttctgagctttttttccaaaggcaaactcattcccaacacctacccaaagtcaatttacaagtgaaaaaacccatataatatcacaataatgggcaaccaaatttaattttgaacaagggggaagtgagagcaaagcaagagtctttaagaagaagctaaattactcacttaccacagcagttcgacacctttcaccgaaatttgggtcgagaaagtaagagactcgatcaccctccatgcccacaatgcgcttggtcattatttttccagggttttccggcgagcggaccaatactaaatcgccgcgacccagcttcccaatccgatgggacacgtgttcagtgattaccacgtcaccggttacattcaaggtagggagcatactaggtccgtgcacctgcaaataccaaataaaaaccggcctttcttatataatgatctccggaaaaaaggaagaagaaaaacatgacaaagccgagacaattggggaaagattgagaacggacgaggttgcaggagcagagataggtgttggttatgtggaggagggagcagaactttgctacaattaaacctcgatccactgcctcctttgctaagctccgccattgtcccataagaagctcactgcttatgcggccttggagtcctgttggtgaagaagaagaagaaagaccaaccaaaaggactagaaaggaacaaggataagttgaaaaatgtctcttttattaatcaattaatcaaatttgcctctaattttatatttatttgaaacatac

SEQ ID NO: 386014 - DNA, 1195 bp, Cannabis indica
gaggaggagggaaggtcctgttgcgagagagccaaatagtaagcagatttaatagtgaaaaggccagaactctcccgttcccaaatcatatcatctctattataaaacccaaaataggaacctcaagaatatcattaaccatggactcatcaaaataagctctgagtttagctagatcccaagaacctcaatcattaatgaattaagacaataaacaagaggagggaggatcatttgtgttaaaaaatttatgcttatgattaagaatccaatgatcatccaaagttctaatacaatttccatctccaactttctaaataagtcccgaagccattaaatctctatcccaaataatacttctccatgtgtaggaaaggttatgaccagggacagcctcaagaatagaagaacggggaaagtatcgagctttaagaaccaaactaaggagggaagtgggatttttaaggattcgctaagcctgcttagcaagcatagcctgattgaaatgtaccaaatgatcgaaaatcgagaccccctttaaatttggattgacacataaacttctaggatttccaatggattttcctagaagcccctgtagaaccccaccaaaacatggccatcatagctcaatacccttacaaagcttaatgggtaacctgaaacaagccattgcataagtaggaatggcttgaatcacatctttcaaaagaactttcttactcgtccttgaaaaacatttagcagaccaacatctaaggacagaagcaaccttatccttgaggaaagcaaaggaatggtacttagatatagagagacatcgagggagacccaggtatttatagataaaaggtctatctcaaggttaaaagtatcaaaaaagagagttttggcctcctccaaagtattgggagagaagagaatagaggactttaagatattgatagcctgacccgaggccctagagtagacattaaaaacctcttgaagagcaaaaccggaacttctatcagtagaacagaaaataatgctattattgttgggttttgtgccctaaataaaactcatttcaatataatcagatttactagttaataaagatcagaaataacgttttatgtttcatggttcacatgatttatttcatgattataaattctgttaagtccaaaatatatgtatttgttaatgatta

SEQ ID NO: 386015 - DNA, 722 bp, Cannabis indica
tttattattagaaaaaaaaaaaacaatcaagggaaagtaatgttgtattacaataaattactaaaatacatttttgtattattatgtcttcacacattttatacacacaagaaatacaactcaatattgctacaatgttgttctaattaagatctctgagtaatttaatagaccccctaattatttacaatagtaaatgaaatatacacactagtagtagtggaaatggtgacaaaaataaaatgataagaaaaagaatgaactaaataagtaattggtattatttcttagaaaatttcacaaattctcactctcaataatcaaactctcttttctgttttctctaaggtttagcttccattaacgctcccagttagatacttcctgcacaaggaaaagttaataagttgtataaaaacccgaaaacaaacattttatgaacttcacaaattatagagaagaagaagaaacaattaagactcattgtccttcacatagggctcctggcttcaaactcgaaaaaactataaaaatttcctacatcggtagctaagaggaactcgaacctaaggcccagaaaactacagtaaatctctatctcggtagccaagaaggattcaaacctccaaaccacgtgtctgaccatttgagttagaagagtgttaattacaactttctattacaacctcctagtcaaccttcacgtccgaaattacattgag

SEQ ID NO: 386016 - DNA, 933 bp, Cannabis indica
taaaaatgatatattgaaaacacaaaaaatgaaattactaaaaaaatatataacatattttgttaacaaataagcttataaaattaaattatcagaaaccagttccactaaacaaatcaattaaaatcttaaacatagaaaccaattatgtacaaagtaaattaaaattaacatatagaaaccagtttcttgaaataaccaaatcaaaaaataaaacttaaaactcaattacatttaacaactaactaacaatttaacaccaaaatcagttacataagacaccgaaataataaaaaaagtgaaaacataaaaccagttattcaaatatatatttataacacatttttttaacaaataacttatcaaattaagttacagaaaccaattaccctaagcaattaattaaaaaatataaagcaaagaaactaattacataaagtgaacaattaaaaaatcaattacatgattcttttaaaaaaaattataataaaataagacatcacatagaaattcttaacaaaatgacttacacaagtaattaaaaatataacatactgcatcatttaagagttgtagaggcggacagctccaccggtattaatgtccaaatctgctgatattgggtattatcggttgaatttgtcagtaataatctgtcggtattaatgggtcgctaatacaattattaacgaccaaaaaaaggctctgctggtaaaatattaataccgacggattaatagcagtggggtccgtcgatatagagtactttcatttatatgctgacataacaataccaatgaacccacttgttatccccaaatttacactctgacgtggcatcacgggaatggtgacacgtggagtctacttggaacatgtgctcgggaagataagccaagtaggatgcctcgctggcatgtccatagtaagata

SEQ ID NO: 386017 - DNA, 723 bp, Cannabis indica
ctttctttcgtttctttagggttttcagagattatttttttctttggagaaaaatagtaaagcgactctctattatatatataggagagagagtataagcttatcctactattgttgtagtgaaggtcacgtttgtaattggatttatttctcatatttgtctgtgtaattatactctaatttgtttttcatacaataaatgtcaatatatatatatatgattttgaatcattcttgtaattttttatatgcaaattaacatgcaaataagttaattacaattgttattttatattcgtgatatgatggatgaatagtactagctgagtaaatatatgtatatatactaggtatgaattacgtgccgaggcacgtaaatattagttttaggtgaagtttaagttttttttttattttttcttatttagattgtgtatgaaggtatgatcatacgaatgatttgttttattaaagtaatatttgtgctattataattggttattcaaataaatttgggtatatatatgtcataactatataatacttattatttacttatagaaaatttggaggaacaagtcataagttttgcagattttaaagcaaacattatgtaataaaaattaaagtgaatgtgcggtcttaaaatagaaggaaaaaagtattaaaaaaagtcttaatatatggaatattattagaaaaactaaaacgagtatagtgaaa

SEQ ID NO: 386018 - DNA, 1078 bp, Cannabis indica
aattgatacatatcaatattcatcacatggacactttgacccgagaccaattcaatgagccgcataatcaattttttcataagaacattagtagtagtgtgtctattttaggaattagggattgggattaagaaataagttttatttatttattatttttttttgaaaaacaagcaatactagaaaaatacttaaaggtcgaaacaaaatacattatctggcatagaggagacctctaaaaaaccaataatgttcatagccaaagttcttttggtaacattatgaaccacaaaattcaaaagtttagaaatgttaataaaattttagcctaacaacaagttagaaatatttaaacaatagcagtaacattattttgtagctccatctgttagacttctttaaaaacattttaaaaaaatacaaataattacatatttaatcatatttttaaaagttctataatgtagaaaaccttaaatcatatttatagaccttttgctaaatcaaaaaagaagaatatgagtacagataaacagaagaactaatttgagattgctgagaaggttatgatcttctaagaatacatcgtttctctaaagtatttttctctaatggagaatgtaaataaatcttaatattttttggggaccactacctatttatagactcatcttaaaatgagttttgggtatttataatttggccctcaacaaattatatattaacttaacttatggtatctacaaattatctccatgataatttaatacgtacccttttttatacccataacataattggtcatttaatttcgtatcacactttataatagcatatacattgtacatatgtttccacaatatgatttttaaccaacaatctcccacttggacaacatatgttaccttataaacgtataaccttatgagcttaaaatttgctatttgtaaaggtatgcacaacaatctcgtccatcataggatcaaagtagttttcgtcatatcattcatgactaaatctattaatggtcacatatacaaatatagccagataacatagatcaatcatggatgtgtag

SEQ ID NO: 386019 - DNA, 624 bp, Cannabis indica
  modified_base (582)..(582): a, c, t, g, unknown or other
tatttatacggaaattataccttagacttaaagttggaagcggtaagctgaaccactggggacgaaggtccatagagtgcatcacagacattgaagatcaaaaagaaaacaaaaatgagcgaaagagctccgaacaatgaagactgcgaacgatccactctcattctctctctctttttctcaatctctttttctaagatttgctgaattcttcaaaatcagagcagaaacctctcgatggctgaactaggaaagagcccaatattatgagctgcgggacgaattacgtgtaacgaccaatcattcttttacacgtcagctacactagtataacataatattgtccatctttcaagcgaaacgacagggttaaactgtcgtttctgcttggggagacacttaccacttaatgaaatttttatggttttttcttttaagtagtttgcggcaaaaccccctcaactatcaatttacttgtaaaatatcatccaatctcatattttagtaggaaaatcctccaaagtactgttccatttatatttttaaggtatcgtctgtcaacctcgtaagtctaatttgccncgtgcatgacaggtcactaaaaaattatcctacatagcaata

SEQ ID NO: 386020 - DNA, 1611 bp, Cannabis indica
ataaggtactaagtttgtattttcacaaaacataaggtactaaataagtatttactcttttaaataaacattatttaagtattttgttcataattttttatctaagagtctgatattaatataaaatatcattagaaagattattaaagtatttttcatgttcgtattatgtaggggtaaataattgattgtaataatttacagctttagtttattactgttatctacgttttcggatacatgatacatttatggtcgcattctaaatccatttgcgagctcattaacaaggctcaaataagccaacgacccagtccaagaacaaaattggattaaggttcagattcaaccaagaatttgttacgggtaaagtcggaaaaatgactccggaaggttaacacataactaggttagtgcgtctgaagaatgataaacggatacccctagggtatcctggaagagtagccgaagggatgtcgcgaagcgtcgaccgttcaggaccaatctgacatggcgcgcttctaacaccgaatctcacacaattaggggcttgtcccctatgttaggccttgaaaaggcgcacatcaaaaaagcaaaccaccttttgtctaacgtccactactctgacatttattatgcacgatcgacggtgcatgcccacctgtcaccatcacatggtacggtcttgtacgaacgatggttatcccttaaattgggcctcacctattcggcccaaagtcaatattataatattttttaccctatcagtgttgtgaaaaatccaacacgtaagtatacatattgttttaataagtaatactcaggtaagtgagattgtttccacgagaactgtagctaagtaccgaacaattaaatacttatttttatttggtaaaagaaatttaaaactaaataacctaagtaaaaattaaattataaaacaaacaaataaaataatgaattacaggaaattaacaatgattaaagttaaagtgactaatttcaattaaatatatttaatctggtttaacataattcaattctcaaaatctaattttcaagtgatagcgaatgtactatagaaatttatatttggactaggacatataaatctcaacttttatgcaaatgttttactctcgtaatatatttaaatacataggaggcaagcatgaaagtcctaattactctcgatatctgtgactatttcactatagtataatcaatactctcttctcagatttcatattgatatcataaacagttaattgatggtcagacaattaaaataaattaagtacgaatgaaatagatgaacatagaaaattgaggaagaattaaatcacattaaaatcaaaatataatatcaaacaatcttcattaacaccctaaatgaaaagtctagctactcatcataattaaaaatatctgataacaattaaccaagaacataaaaaaagagtagaagaaaagaactcttcgaaaaatgttgataaaagtctccagagttatttttttgcttcaagtgttggaaaatggcctttatattaggggtgtacgtcggtcggtttagtcgggttatagtataattttatcaacccaatataaata

SEQ ID NO: 386021 - DNA, 956 bp, Cannabis indica
cttagcaaagtcctcatcaaatttcttcttcataaatttttgagaataaggaattgacaatttatacaatggaagatcttctttcttcataaacttgtcagtaggcttctcttcaggagtctcttctttggcttctattgtatcttcaacctcaggaccatttgacttgtcttctagacccccatcaagtactttaccactcctcagtgaggtggcattacattattctatcaaattgacaattttatcactagggaaactactatttttctgcaaagcactcacaacattggccagttgtcccacttgcacctctatgttcttcatggaagcagtaatattagacaagtgagtctccatgttatccaaccttgtttcattcttgctaaatctcttgttggtctctatcatgaaagtacctagaatgtcttctaaggacttcttctcttcttgttgttgtgcataaacccaggaggtggttgcaacacatttttagtgttaccataagaaaaattctcatggtttctcaaccccagatggtaatagttaggcgttggattttccagatagttgttattataaggtttattggccatataacgtgcttgttctatactcatctcaaacacttgtgatgtagttgtaacaacattttttatagttaatgtattcttctggttagctaaggtagctacttgattagataaagcagaaatttaagctgctaaatttgtcataggatccacttcatgtaacccaaccacctttcttggagtatttctttcattaggccagttatagctattagtggccatctcctccagtaaattaatagcttcagctatatgtttagacaataacgctcatccggcagcagcatcaataaaagtcctagttggtgttggaaatattttaccaggatctagatttactaccaagtatgtttcattaacatc

SEQ ID NO: 386022 - DNA, 596 bp, Cannabis indica
attttactattataaaagaggtagtaatggtaatgatgtctatattggcaaaccaacttcacccctaacaacattattaaattacaattaataataaagataagggtaaatagtggcataagtacctaaagttttaggtttgtaagcgtcataaacctaatgattttttttagtagcataagtacccaatgtttataaaactgtaatttttttccagtttcatcagtacagactctgttattgtcttaaccagaacacatataagacccaaattttagattattgtcttgaccgatgacttttctaataccaatgacttttctagcaaacttattattacatgttttatcaaatttatttattgttttacaattttttttttaaaatatgtcataaaaaagctcacataaatgtaaaaaaaaagaacactcataaccccatgaaattatttatttattgttaaaaacaatcatagattatgagtattgaaagcaaaaatttcactcaccaaccaacattactcatagtaatatatccaagatcaagtatttatttaaagcatcgaattcataaatacacatacctcccaatccatc

SEQ ID NO: 386023 - DNA, 1137 bp, Cannabis indica
acgatgaggctcatcgagagccactttgggatcgacgtggccaccacggccgaacagctctcccagctctacgattccatcttcgacaagttcgactgcgaccgcagcggtaccgtcgatcgagaagagttcaggtccgagatgaagaagatccttctcgccatagctgacggccttggctcgtcaccgattcagatggttctcgaggacgacgatccgacgttcctcaagcaagctgcggatcttgaagcttcgaagttagctaagctccaatcctcaaatgcttgaaacctcaaaatttggaagtgatgctttctttgtcttttagtttctgcatattacctgtttgtgaaaacgtttgagtgaataaatttaataaatgataaaacatatacttacgtttttgagctagctataataataagaatatgtatttgttgcaaacttatcttttaagttcagtcaaagtgtaattcctagatctacttgttttgtgttggggctgtttgtttatatgaaaagagtgagaaaattttgagcgctaaaacagtatatgagagaattcaataacaataaattgctttagggagtacagaggtttatacaggcaatgagtttagctagctcggtggagcaactatcctagtaagccgtcaaacaaactactataactagaattaacaactaatcaactaactattttacagtttgttttatgtagagaagtaaccaacttaatcaattaattaagcacgtaacagaataaactaacaacttaaactaataactgttatagtgcaaatttttcgcctaaaaacacaagtaccgtaaatagttgacacgcagatccgatcccggatataaaatgttgatgtgtcactagatagctccagtgaagctaacctcgcatgatgtaaacttgcgagaatgtgcaactgagacaggtgtagtcgcacactatgcccaatgtaacgtgcgtgccaagatggcacgttacaagctaggtaatggccacaagttggccaagtggtcgtcaagtggcggtgcatgttgaggtgcatgttggtggcatgctgatgtttagtttgtaaagcaatgacatttttgtaaatatcttcaatattgtccagattggga

SEQ ID NO: 386024 - DNA, 1163 bp, Cannabis indica
cgtgccttgagcctttggaggctgccatctgcatttcttttctccctgaatatccatttattcccgatgatattcatacctggaagtttcggcaccagcaaccaggttttattcttcttcaaagctgtcatctcttcacccatggctgagttccaaccaggatgacttaaagcttcttcgactgtagcaggagtatcatttttccagcaccattgtgcttgaccgagatagaccttaggcttgaaaatccctgctttagatcgagtaaccatggggtgagatggttcaagagtagctggtttatgttgaaaagtctgatctggtttttccatggtaatatctcggctgttgctgtgacttgacatagtccctgggctattttctgtgtcattcacattagatttatgagacatgggagattgagataaatcagtaaagtttgttacctgagccgagttttgatcattaggatcaagtgtagccgtggcagtttctgagggtgcttctccagggacttgtgagttgacaatggacttcgaatttttgagattatgatgcaaggactgaaacaatgttgaccatgagggaacactcacacacacagactgttctggttgataattgttcaagaatccagaatggaaaggaaagtcatcttcattgaagattacattccttgatatgtacatcctacccgtggagctaagacacttgtaacctttgtgagcatcactatacccaagattaacacatttcacggagtgaaattggaatttatgggtttgatatggtcttatgcacggatagcaagccactccaaaggttttgaggaagttgtagtccggtttcttgttgtaaacaatcagaaacggggactgaaatttcagaattggtgttggtagtctattaattaaatagacagccgtttggaaagaatcccaccaatacttgagaggcatatgagcttgggcaagtgtcaagcccatctcaacaatatgtcgatgttttctttcggctctaccattttgggctgaggtatgaggacatgaatgttgaaaatcaatcccatgctcaatgacacatttcgaaaatgcttggaattcccctccccaatctgtcttgagtgttttaatttttctctcaaattggttttcaaccaatgt

SEQ ID NO: 386025 - DNA, 979 bp, Cannabis indica
gaattcttggtttgtgagaaattattaagtgactttttttttaacgtttttatttttggtttaacgttatttttttttttagtttttctattaactttaacagaacataccattatttaatggaatattcttaattaattttatattattttatatgagtatataagttaagtctctgttaaattacgattgtggattattaattattataaaaaaatattaaaaataaatttataataaaacaaaatgtaatttttctctaatttttcttcgatctaaattcttcttcttcatttaaaaaaatcaaaaagaaaaagttcatcgttgccttagattttctcttactgcttgttggacggtctgctttgtccaatcagtcttcgtctatcgtctttggtgaagaggtcgtttcccggcaatagaggtgccataattaatcgacttcggcatgtccatgaatggctagaatgtaattttttgtttttttctttgactcaattaatgtattgaatctgaataataagtcctatattagtttttttaaaaccttatcagaacttcaaaaataaataacaacaattatacagtcaagataatatatatataatcaaaccactaaaaaattatgaactgagtcattaattacttaataatatatatttaataaagtaaatatattttctcccaataaatcagttttgttagaataaattagatctaatattttcctaatacaagtgccacctcattattatctctttgatgactaattaaaagcatctccaacatgattttaaaacactaaatagtgtagtttcatattatatttactttaatgggatattaaaatcatacttataaatagttttatctacactgtcccaccaaatttagtagggtacggtagacgacactatttttttttaaatttttaataattaaataatatttttaagagaaaaattaaataattatatat

SEQ ID NO: 386026 - DNA, 2082 bp, Cannabis indica
gtactgataggcgcggaggcgtatagggttgagatatcttccaaataattcaaatttctcctcttcagactgtacggtcatttctccaatctaagaaaagtatgcaaataaaatactattttttctttagaatttttcatacagaaaataaaatttggaatttctctaatataaaagacatcttcatctaactctagagcatgctttgttaaggcgtggatagcttgattagtatgcttacgaacatactttaagaaaaatgacaaaagacaacgaacatcattaattaaatctgaaaacaaaataagtctgtatgtgaagaagtcaaagcagaaaaaactcttagtgcatccatttcaatatgtgttatctaaatttgttgttgattagcctaattgatactatgaaagagtgcatttgcttctaaaacagccttggactggcttggataacgcaataataacttcacctttgtagttttgaaccactgctccaatacccagcaccttatctttagtgtttacagtcgcatccacgttcattttatgacaattgacatagctaggcaacttccatggtatcctatttgtcggccttgtgttgttttcagttgcaacaagttgtgaggaaaaaaccggtgagacacaacaggtcgtgaggatacttgctggtgcaacacaacaggtcgtgatgaatgttgttggtgcaacacagcagaccttgaggaatcttgctggtgcgacacaataggcctttgtttgtctttgcaacttcttttgacagagaaatatttatcaagatagtttataacatggattgcaagagcagaagcttcacgtttcgttccaccatgtagcactttgtttctatcattctaaatactccacataaggcaaattagaagttcaacatctgttttaccaagaatggttgcgaggtgaatcaaataatctccattgtacataccatgagcacgatggtcattaatggagaaacatgttttcttccaaacaaacttggcatgtttacatgtgaataaagcatgtccaattaattcccaagcgcttttatgcattgaacaaattgttgaatcaatgagttttttttttgtgtgtgtgtgtgtacagcagtagccacgggcaatgcattttgaatgactctccaagcaaaaattttaacctttggtggcaagtttaaagcccaaaaaaacttccaccagcttttgtagttgctggatgttgaatcttcatttgcatctaaaatagaagtcgctagatggaacccagacttaactgagtagatccaagttgtgatatggtgccatattagtcgatcttgagattggtaattgttgacctcagaaattggacaaccgacaacagtcatattaaatttatgcttaccacgtgttacacaattagaactagaaagtaaagaacacaaagaattttatagaagtttgccccccttagttaacagtgaatgacctactctctttttaattgtattgatacctgaaaaatctagtttttgctaatgtcagtaattattacaaaagaacagtaaaaataaaactgtaacagtctgcagcagcagaatgtaattctgtcactgcaaaacacagttttgcagaaacaaaccagaaccataaataaaaaaaaaatcagcagaaaataaatcacttgacacaagagaattatatgtggtatcagtattctttcgaacactcttagtccatggggccacgcccagagaatgacatcaattagtaaagtatcaaagtttacaaaagcaattgacttaaacaaatttagactccctctagtgatttgtcacaaccctttgtaatccaccttactaatctgatctctgaaacacaccaagtagtgaactcccttcaactattgatgtgtgcttacttcctcccgaagtaagacttaaacaaatcttctcccaaagatatatgctcacttcctcccgaagtgagacttggaaaagtcttctcccgaagacccacacttgttcaaagcttctcttcaacctattctatgatagtatgagatcataataagaaaatcaaaa

SEQ ID NO: 386027 - DNA, 757 bp, Cannabis indica
ttataattattttttattattatgtaggatgacacactaggtgataaggaatcttcaatggataatgctaccaaagaaaacctagacaagcttgtgagaattggagaagatctgttgcaaaaacctgtttcaatggtcaacttggaaactggcatctattctcctaaacatggaactacaaatggagaagctcttaaaaggtatatatattaaaaatatatggagcttctacaatgtatctctaaaaaatggtgcaccgaaacattttctactgttttgggatctaggaaatttttttagtttaattatttttcattgccgtatatgttataattatttaatatatatattttataaaatttagagaaatttaaaataatttacaatataaaaaatagttttcaaacaatttatttcacacggatataaaataaatcagtgcaacaaagcactatttgaaccttatttacaacatgtcaaatttgtttatatttctcaaattttttgcaaaatgtcttaaataactacaatattttctagatgctaaacaaatagtggtaggggtgtatcgatgcactataaaattttttaaaaatatattcataaaatcataaatggaactaatatataatacaggaaaattttacaatgcacctgatgtaccctatttctttcggtatctgaaataattttttagttaatttttttatgattatgtacgttatagtttttaagacaacctgcaaaattttgaaaa

SEQ ID NO: 386028 - DNA, 771 bp, Cannabis indica
gatgtttgatgatgccagagagacaagcatcacatatcttatgggagacatatctttgaactgtgatgtcttaataggaaagccaacttcttgtctgtacaaatgtacctatagcttagagtgtatatgatcttaagaaatagtaaataaaattataaggagaaccaaatttagcttatgttatcaattagtgtaaaaagattgtccttgttatagggaaatgaataggtcaattagatctcatattcatattgtgtctctaaaataagagttgttatgttagttagttttggattctcatattgaattggtcagcaaatgagatgtccacttgatgtgaatgagatattgttgactttgattgaattcttgtaaagatttcattgaaaaatatgtactacaattgaaaaatatcttgaatttgatgttttgttcaccaaaactcaaatttcggtggtcactatgttatacaagacatttttttttttttgaaaaaatctgaagctttcattatgatagaacattcagtacaaagatttcaggttaagtaggaaggtagagaaccatttcaaatatattcattgtctaatcctaggttggcctcaagaattgtaccaatcgatttttttaagaaagaaaagtacctggatggattaaatttgaagataagacatgatcttataattactattgacgacaacaccaccctttgctgacatggtggggaaggcactgcgagctgagggcacagtagagtgcactcaagagtct

SEQ ID NO: 386029 - DNA, 1625 bp, Cannabis indica
cattatgtatggtatccttatcaatagaaccttatttatatatctacaaacaaatttctaattttggtcttgagtactctctgcttccaatcatcatgtaaattttttttttcattcttcttcttcatgtatgctacgatctagaacaaatatgttttgggtccatttaaaagaaataatactcttaaaaaatgcaatgaatcaatgatagagaaattaggctgaaatcttctctaaaatttgggttatgaaataaattttattttttttaaaaaaaaagattaaaatgatgttaatgggtgaaaattaattcgaagacggtggaagatggtcagtaccaaacttgtttggaagcaattaattagcttttgtgaattactctagtcttatttcctctcataaaactcttgcactctaaagccatggcttctcaaggatcaaaaataacaactttcatccttctacgtaactgagaagatgttatttttttttagaaaaaaaaaacaatattaaaaaaactaattaatagcatgctccacggctcattataaccccagacatctctattattcaaccaatcaaattaaaaagaaaatgttcttatggatgagagcaaaagtgatactctcactcaaaaaactcctatttatattatttataaaatgtggttcattatgtaaaaaaaaattagtttaatggtgatatttttaacgttttaatatttccttcatataagttaacatcgagttaacgaaactgttaacttaataaggaaaaaaaattctatttattagccctaactgtttatacttaaaagatggattatgtgaaaaatcagactaaaagagtctctctttctcattctcagttccgagaagacacgagtagaggaagctagagcaaaacacatattcaagaggaaacaatcaaaatagcactaataattgcaagaaatactcattagtaaaaattattgactatggaaacccttataattgttcttgggggtttttctcattgaaacattctgcaaagtttcatggcttctttggatataattagttacaatccaaataaaatcgtcgaaatagctattgcatggttttaaagaaattgattcttgcttcaataaagcaatcaattcaatcgattctttcaaccttttggctgagattgaaaaagaaaggtagaataaaatgtagcggaggaaaagggatggtgttagcccattcaatgggtatgatgccttctggtaaaatcttaaatatttttagatattatgttagaaaatgatttagttacctactagtgactagttaccatttagtggtttttatttttcactttttcagctcataattgtgtcatcattgcttgtaaattgtaatgattagggtatttgtaatgatcgctttagtaatttagattagtaaaggcaattagcactaattactgttatttttataattatttacgaatttaattatttatggaccccaatattagaaatgagcattagagttataatttctcaatttcagagattttattaaactctagggatattatttgacttatatgtgaaatatattatttttgtaatttttgctcggcgataacagaaa

SEQ ID NO: 386030 - DNA, 630 bp, Cannabis indica
tgaaaatatgattcaaatagttaatagagtattttcagtatttttttttttcaaatgtattgaaattttgcatgatatcttaaataattagagtaaaaaattcttttaatatcgaaacaaatagatagagagtacatttaagggcgcaatagaagcatcttaaaatattttttgttaaaacataaaaatgacttagagcatatctaataaagagttaaatatgtggtgtgttgttaattttttagcatttttcaataaaaaatttcttcaatagtgtgttataagtgtgccaaatttgtcacacctaaaaattaggctaaatttagtacaaaatataacattgtgttaaatttagcacataataaatgctactttttaattacatttttgtaattaataaaatactctaataaatatattttatttataatattgccattaattatttgtcattaatgatattttattttttagactaatttatctcttaaaatattattgtagattagagcacaattacaaatgttatgctaaatataatgtttgtttactttttaataatggaagttggatttttgttgaggaaataaaaaaagtaagaaaattaatttcgttatatttagtataaga

SEQ ID NO: 386031 - DNA, 2121 bp, Cannabis indica
agacaacacaataatcatgattaccataagtaatgaatttagatagaaattatatattaaacaaataatcacgaaataattatgtgaactaaataatataaagtttgacttcgatatcattctttattagtcaataagattaccatgagatgggttttatttagagcataaaatctcaacatactcacacttgcactaacataaaacaaaagtgtatctctctaaatcttataagctcggtgtatatatcaagtatagtctatgtctttatctttatcaattgatcctaatgtttgtgttcaacatcaatcttctttatttccaatacttacaaagactttgattcattttggggattcaaagttactactatctggatactatatctatgttaccttttggtgaaaattgtaattgttccatcactagaacaaatccaaaatatgtatttgaatctttataaatctcaataattttctggttgtttcgagcaacactattatttaggcaagctgatggagtttagaatatgcaaagataacttttacactaatcttgaataacttccaccccaagaataaggtctttcttttttttagattatctataaatccaagtttaaaaaaggtcatagctaaaattgtctggttatgtccttatttttcaatcatgaataaaattcttttattccttattcctcccactcaatagcagatctctagtctaagtatgccaaagaatatttaagacctttaaaggattacatccaaaggttaatggatgaggccaccaaggtgaaagacgtaacagaagatggctgatatacgaccatcctagggggaatctttccactgagtgactttcggaaagatatttggaggatctcaatcaaccacatgaaggcgttcctcgatagagttgatggctttataaagatggaggaaactatccgacaatccgagatagggcaagttggtaagaggcagtctcagagcatcctgcagccccatgacttgctaggtgtgcagactggcgctagcaactctgcccaaacccctagtggcaagaacactggaggcaagcgcaacaacaatatctctaaaagaaacagtggcaaaaagggaaagtacaacacttctcccactccacaaaactagaaagacaaggagaagaagttcacctgtttcaccctcaagatagagaaaccagaggccatcttcatggccacttagggaactgtcccatataagaagcccctctcatcaaaagggagtcgagcaaaagggacatgtcaaagtttcgtcagtttcacaacgacttcagccatgacacaaactagtgtcaaaacttgaaggggagattagatttattataaggaaaaacaatctcaatctgtgtcgttatgtgtacaaggtgccaaaaatgcagagcccatgccacctctagtggtaggtcacttaggggtcattattaggggaccccatattgcatgcgctactagaaaatctagggagtgctatgattggaaattacatcacgagccaaaaagtgacatcttggccatcgaagaaaggggctccaagcaaccaaaattgtgggagcccactatctcttttgccaaaggagatgctgctcaagttagtttctcacacaatgatccatgctcgttactgcacagattgggaatataattgtggcaagatgcatggtggacaatagagcctcctccaagattattttcaaatcaaaatacgaaagatggggctccaattgactaacttggcgccctaaaatcaactaggcttctttggccaaggcattgctcctatagggtatattagattgcccctcactattggagaaaatccaatagctagaactttgacggcggagttcaatgtaattgacattcccttggctgtcaacaccatgatagatcaactagccatgtacgacctgaaggcagtgacaaccatctatcacatttacctgaaattccaaacgacatggggtaggatgtttgaggagagaccaacaattatcccatcattgttacaacttgtattggaaatattttaccaggatctagatttactaccaagtatgtttgattaacatcct

SEQ ID NO: 386032 - DNA, 2109 bp, Cannabis indica
ttttaaaattaagaaatatttaaaatatactaattatatgtacacaaataaaaccttaaaatgaatcaatttgagcaattatcacaatgttgcttttatacaaaccatatatgatagtcaaaattttatgaaaatctcttcaagaaaaatgtagtattttccttgagatttttaaaccccaaaactatttctaccataatgaaaaaacattactagaagacgaggataaagatttatttgtagtagtaagattatatgtactaccaactgaataattaccatgatttgtgtagtgccaaaatcacgcattctcatgattgaatgagcttactggtatgaaaaaaaaaaaatacattttacatcaggtagatttacaattcaatataccactatagtatttcatatcccagacaggccataagatttgacactcttgccacatcatacaaaagaagcaagcttaggagaaaagaaggtggtcttggtagccaagggtctttgaacacccttgtatttttacaatttccaatactacgtcttagcccttttgacaataaatctctttcccgtaagatttattgctaagttaatgatgggtcgtatgatcccttacctacctctaggatgttagatactctaaaatattttgctttctagaggtgttcatcaaaccgctcacaccacacaaactgccacaccacactgcacaaaaaatatagtttgaaatcttttgcggtacgattgaggtttacatttttgccaaaccgtgcggtgcgatgtattttgcagttttacatttaataattgcggttcaaatcgtaccacattatatattataaaaatactaatttttacattatgatttctcttttgatgtatgagcaactcatatgcttacaaagtctaagccatacaattaaatttaagaaacatccataaaaaaaaaattatttttttattttcttaacttcttattgctaacatattattattgatatatataatatgtaatacatatatatgtatattatatacttttttagagacaattcaatacaatcacttaatttgtatgtatgttatgatgttaaaagtttgatacgatagtttttcttcttatttaattgttgaaactttattagactattcttttaatttttatattaatgtttgataatgatgatagtgtaaactgtctaaactgtaccttaccgcattatatttttacggtatgatttttgcagttttaaggttttgtgaagcagttgcggtttgagaaattgtaaagagtgaagactgcatatgcgatttggtttaagaaaatagcctaaacccgtactgcgaatacccctattgctttcattacttgtggtagtattgatgagggattcattaaaattctttatacttgtttggccaaaagagcttgattatactgaatacataaatagtctaaagcctaaacctccatcactctttggttgacacatcttatgtgaagctttcctctaaagttgtttttaattgattgatccccactaatttcttgctattaatctttctatctcttcactatctctccaccaatgccctctcgaattctctaaaacatgatatttggtaagttgatattacttggataacaacttttgctagaacttctttacccagttttgcgaaaagttttgcttgttaatcatgtagttttgcccatattttatccttcattagcttgaaaatcacacctatcatgggtagacccaaatattattcaatagcccatgtcatctcaatattcaaagcttatgtaaatagctaccacatctccttagatgtagagtattgctattaggtattttatggtgtctaacactatattaatgtagcgcgttatgagtatagttagcagtttcttatattatttattaaatgaaaatgtgtaagacctaatattgattcgtaccatagtaatatattatctcttgtggtacttcacaccataaaatactagttacagtgacggacccagaatttttgatctgtgagggcttaattgttataaaaatatttattatttacttgacattaaaattataactattttgtggg

SEQ ID NO: 386033 - DNA, 1041 bp, Cannabis indica
gaaaatcaaatttccctttataagtaatgaacttaatattgcaccaaaaatatcccatttacaacctattatcaccatcaaaatcctttaaagcttctttaaatattttcttaataatatagtttttgtcctttcctctatttatctcctatcaattactttttcattcagtttttttttctatttttcttatactttaattaataataaaaatattaaagatatatataatatccattagggatgatgtaaaggaatagagaattaattttcttaaatgagcttaatgtactgtttatttgtatataaatacagagccttctacgtagggacatcatccctagaagaaggcctcagtgtccaacagtgttgcacattccggggcagtttcttcaagctaaacgcaacaaacggggccgttttatgggagaccttcatgctacccgaaaacggtgggaagacgggtggatacgccggggcagccatatggggaagcagtccttgtattgacaaaatcagaagccatgtttacatagccacaggaaatttatactcagctcccttaagaatacaacaatgccaagagcaacaaaacaatgaaacattgggtaataatagtagtagtattattgacaagtgtattgagcctgagaaccactctaactcaatcatggcccttgatttggattctggaaagatcaaatggtaccgccagcttggggggtatgacgtttggttctttgcttgtaataacctctccacacccaattgtccacctgggcctaatccggacgctgacttttctgaggccccaatgatgttgactattaatgatgttaatcaaaccaagcgagatgttgttgttgctgttcaaaaaagtggctttgcttgggctcttgatcgtaataatggtgcccttgtatggtttacggtaagtgattatatatacttaattacaaactaatctaatcttgatcagggccggccctaagggtaggcgggcgaacgctcagggcccgaaattgtaaaaaaaaaaaatta

SEQ ID NO: 386034 - DNA, 605 bp, Cannabis indica
ttactaactattatcttcctcttgttttccaaattagacccacgactaccaccagatctatcagaacgaccagaatcaacaccatcgccatcatcagaaacctccttccttttcttcttatcagacattacttttgcacaatgagaagggaaaatagacattcgagttttaaccatctcaacaaagttcacagagaaatctagcatctaaacgaaacccaaaatataaatactctcaactcaatatcaaaccccaagaaaaaaaaaataactgataagcaaaataaatcaattataaattataaactcccaatttttttttttaaaaaaaaataatatttttaaatataaaccatttctaatacatactctaacctgaatcaaatttaaaaaaagcatgaaaattttgggcttgggcatgtgatttttgcagtctcgggatgtgatggacgtgcataagtggtggaaaatttacatggtatactaacttttgtcattttttttacaaaaatactgccaggcggtattttttattttttattgtatttttttataagtttcatactgcagtatactgtgttaagttttcactgttgttctattggt

SEQ ID NO: 386035 - DNA, 1594 bp, Cannabis indica
ttagtttttaaacttgaaaaaaaatcatattttagaagtatttgcataaaaataaaagtccattcccgacctaaaaattttataagttaatgagtaaaacattgttattaggcatcagtaatgcacgaagtaacactttaaaaatagctaataatattttaaaaaattattacattaaatcatgtgaaactaaataagtactatattaatataggtgatgtcttttagcatttctttaatgagtatcttgagtttgttgacattgctatgggaaattagcataatgcacttaaaattagatttttttaaaaaaaaaatttacaaattctgtattttataggtttttcacttattttctatttttttttttaaaaaaaatatatattttctacatttactacaatgggaaagcaatgtgaaaaacaacattttataaaaaataagattccctacttttgtaaaaagataaaaattaaaattcgtaataatgttaaaaaattgtagatctttaaaaatataaaggttgtttgtctgtgttttcagttttttaattttcaaaattgtgttttcaaaaatgagaacagaaaacagtttttttatcattttaaaaatttaatggtgtttggctcaggttttttaaactatttttagatttttctttactaaaaaaaatcaatattctacatcataccatgacatgaacccatccaatcccagaccgaatcataaacccaaacccaaacccggaccgagatgatattttatttaagatttataatgttacttagaaaaaaaaagtttgcctgaaaaagttatcattgttcgggtcctggtcttagtcaggctgggatccggggtcgacgcccagtgtttgggctctgggtccggggtcgaggtccagtgttcgggctctgggtccggggtcgaggtccagtgtttaggctttgggtccagggtcaaggtccggtgtttggactctgggtccggggtctaggtccggtttgggtccgagttcgggtcctgggtctagggtttggggtttgggggtccaagattcgagtttggtctgggtcggggttcgggtccgatttgggtctaagtttgggtccagggtccagggtcctggtctgggtttgggggtcgaggtccgggtctaggttgaggtctgagtcaggtttggggtccagggtccaggtcggggttggggtctaaattcgggttcgagtctaggtctagggtctgggtttgggtccgagtcaagtctgggtcgagtcaggggtttggggtcttggtttagggtccagagtccaagtcaaggttggtgttggggttagggtccaaatccggctccggggttcgggtttagtttcaggtccgagccagggtctggatccgagtttgagttttagtccagggtctaagccggggttcggggtccatggtccgggtttgggtccaggtcgggtttgaggtctgggtctggcttcgagattcgatttttggagtccaaagcctggggtctgggtctgagttccatgatctgaatccaatgtccgagtatgtgagcaaaaaatataaaaatataatatattag

SEQ ID NO: 386036 - DNA, 1894 bp, Cannabis indica
gacattgaaatacaccattagtataacgtaatccattattatataagttaagttattaagctcccctacatgacaaaagaaagaaaaagtagttctttcattcatcatcttgcatggtgagttaaaaatttgcaatttgcataataaagtaaaaaattgagtgccccaaagcagctcatcattttatgatagaaagagactaattaggttgtgtttggtctgactaaataaaattgaatgaaatatagaaagaaatcaattttcatttcattctaataaaatgaaatttgtttatcagttttttcttttttatatattaaaattttattttattctatttttatctctactctctttctctatctttttattcctccaaacctagtatatcttaaacaaactgtttttttaatggaaacacactacttttatttacctacatatattgaatagacaatagtaattatactttcacatataacattaagaaatatatttatcagctataattaattaatgcgacaatgttcttgaaatcggatagtctcgttttcttattatattaaaggcctaagcaaaggagagtgagattgtactattgaacccatgtgaatgtgattgtgttacctacacgagtgggtgagagagtgtgagagaaaggacctgacatggtgcgtactttattgcttttcctttgtattcacctaccaatcaagccttgctatgttgtagtttatttatttactgtgtctgttgtaggttatttttttattattattccttttgatgaatgttgatgaagtcattcaaacataatttttgtgtgagttggaggctagctactaaaatgacctaccaaaaaaaaaaagtacttaaaatgactaaaatgaagatgaccttttttctttgaacaaaagcttgttaatggtgacattttctactcatttgctcattggcaatgatattattattagttctgcactagaagtgtacagtttttacttccaatatgaagaacaagaagaccaaaagaagttagacaaaacaaaatctatgccaaactcataaaatccaatattaattcttcacgtacttacttaaactaatcatatgaaattcacaaacaagaaaccaatctcaacattcaatttccctatttaataatgtcatatataaacattgcttttgtgcaccaaatagatattagatatatatatatatatatatatatgtatagacatcccaaatggaaatagaaatggaaactgcaaagcatgaagaagaccatgagattgaattgttttcacttgtactctctttcgggtggaactcatataaagttgtagacttcccttccaatggattcattttcaacaatagcttagtaggccaatataggatgcatagctatcacgctgaatgttcacagcccattcaaatcttttcaagtctgcatggtcagtaccaacgtatttatatagcttgtagatgttcaagctgagaattgatattgaacctatcactagcctgcatatttgggtctcggaggaagagggaacgagttggccgaaccgccaagctcagcatcctttcttcttcttaaaaaaaaaaaccaaatatttttcttgcctagtaatgattgaagtcaggagcagttagtcatcatcaaagaagagtgttatctctcaaaaaatccagaataattgtgcatgaatttttattctagatatggaggtccaacaaagaggagcacattcaccaaagagaagctcattggccaaagaggagcacattggcaaaagaggagctcgttggccaaggaggagcacattggccaaagaggagctcattggccaagtaggagcacattggccaaagaggagctcattggcca

SEQ ID NO: 386037 - DNA, 1473 bp, Cannabis indica
ccatgtgattgctgaaggactatacttcttactagaccccattcaactacttggctctttggtttgcactattcatttgaataaaggaatacatatatatagatatattaccaaataatatcccaccaagtacattgattttatagagacttaattaagttccttagaatttctcttagatttttttcttattctaagttgaatgccaaattatgagtgcaaacaagatagatgacaaacaatgccaatacaatgtagatttttttccttagaagggccaaaaggaaatgccaatacaaatgaatgctattgcatttttttctacagatcagtggctcaatattgttagtatggctctttacaattaagtctgagaacttagatcagtgaagatattgtcattgatcatctctgcaaagaattgtactttcagcaacataaggtaatacataaagctttctggagtgtatgtaatcttcaaatttgcttcattaacattggaaattgacctccctacaggcttcttcttcccatggacaaaaccgattcatatgccatgttgatcttgctttccaagttttcatcttagaaaacataaaatatttaatgtgtctgtatatatagatgaatggttctctgacttgtttaggcaattgggttggtttggtatttgtaaagaaacataagcatttggagcttcacatggctttgtcttctgattcatacatggacacttggtgaacagcctacaactaataataataatgaagacacaaccatgtgattgctcaaagatgatgcttactccctagaccccatctctacaactgcctctttagtcttcaccattcatttccacacaacagacttatcttttctacaattatcatcaagggtattgattatatatatactcataatattgggtttctttagcacctcaactcctcacattctcaagtactagagctttcttttgcagtattttgagacctatctctttgcttacattttcttctttcttcaacaaacaatcatgggttttcgttttcccggtgtagttcaagccaagcaacttattcagaggcctttttctagtgcaaaagatgttccaaaagggtatttggcagtttatgttgggaagaacaaaatgacaagatttgtgatccctgtatcatacttgaaccattcttcattccaagaattgctatgtcaagctgaagaagaattcggatttgatcatccaatgggggctctaacaattccatgcagtgaagatactttcatcaatcttgtttcaagcttaaatgtctgatgatgagtctagattgatgctaactatgacaaaaatgattaattgttacaattttgtatggcaaagatgccaacaccatgtaaatatttttttcttggggactgaatgaaaatgttctctgagaatgatacaaatatgaattactactaaactttttc

SEQ ID NO: 386038 - DNA, 873 bp, Cannabis indica
acaaaaaaaaatattttgaattgtaaaattaaaaagaccccaataaaatttctcaaaaaaaaactaaaggaacctctatttgcaccccatacaatgataaatacacctcattattaaaaaaaatacataaacttaaataattttttaaaaattactcttaatatttttttaaaattttgttcatattatttaacgttaatttcaatacttattttgatttcatttcataatttttctaactcatgtatatatattttttattttttctaaaaaaaattatataatttttaattttaattttttgttttaatatttaaaatataatttatttttatttaatagttatattttttaagaataagaatataaattaaaagaaaaaagttatataaatttaacacaattaaaaatataaattttatataaaataaaaattattaaaataagatattttacaaatttttaggtaaataaaatttctcaaaaaataatgatgtaacaagacaataatgccctcatgaggaaggcttttgagttttcacataaaagttaaggctgtcattttcgactttgtactaatatacgtgacccactgaccgtcccatacgtacaaagaaaacgatctcacaataaacccaataattttcacttctttttttttttttaattaataagaaaggaaaagtttgtttgtttgtttaagtagaaatttctcaatattatttttttattaattattaaacctatgttataaaatataatattaatcgtggaccgacttatctcttctattttcaagatatatttatatggaataatttattaagatgcaatgaactactcaaatattctcccaattagggatgcacacgg

SEQ ID NO: 386039 - DNA, 1073 bp, Cannabis indica
ttactatttccctacttctaactactctctctctctctctctctctctctctaacactattgaagtgagacgtttcctttttacaaagttcaatctcaccttaatactttcctttacaacttagctatacattgtggagtaagacataatcattcaaaaatacataaattcctattcaatttgtcataagcctttttggcctcctcgtattcacctactgaatcaattcatcaaaggtacaagacaaaagatgactatctttaacacaacattttcatgattaaggaaggacaggataagaacaaatgtgcatgatctttctaagtcaatctcgcaaactggacacatagcaggaaaagaacagtttgcatttatataaaagaaaattagaaatatgtaaaaatgtaaatttttttgttattttgaatattgtgaaataatccctaatattttactatattttcgtttctgtaacagatatctgcattataactatctggaaggcagtataccatcaacactaggaaaactgagttctctccaagatttgtaattacaccaattaaaaccccaatcacttaattaattatatatcttcttcatacgtaatggctaccttcaaatcaatttcaattaattagttcttcctttatatggttttgaaaggtatttggacttcaatatgctatcagggtcgatacccgatgaattcggatccctctacaacctttcaaagttgtaagtttttaattattaatttctcacacgtataattcattcatatgaattaatgccttatttcttgattcaaggcagctggcagaaaatagactatctggtagtcttcctacaacattggcaaatttgatcaatcttatatcgttgtaagttatttatgagtgagaacacaaaacacactcacacattacatctgctgtgttagatctagctagatagaaatcgatcatgactctcactctcaactctatatgtgttgttgtagttggacaccatccaattattttactgggaaaataccagccacatacacgaatttaacaaatcttcgctgg

SEQ ID NO: 386040 - DNA, 1851 bp, Cannabis indica
tcacagtgatgaatgataagtagcagtgatattttaaattttagttagtgaaatgtgattatctgagctgggaaatggtgttcgtggttttcatgtttcttcttcttttgctcgtcacttttgtgcaaatcccgcatcgctacttgtgcagcttctgattaaacagtcatgtataatttttctttcactaatgaaaccaataacgcagcacaataactgatttacgataatagtaataattattattttttctcaactcttttaaaatttagtttaagttgaaaattagctcaacaacaaaattatatttttacttagaattttttacactaagattgatccaatcgtaaaacacaactctagtagattatataattctccgtaaattgattgtgactttcggtcttaagctcgagtgtactttgaaaatttattaggaagactttcattagtttggtgtgatcaagaattctccaatttttaaatgagggggtctcatatttataggcgcgaatgtatgttgcaagatccttttcttctgttcagaatggtcaacatggatctaccctctctatctctttgcacacttttccctcttatttgctagtccagctctattttcctaataatatcgagctctgctctggtcttctttctttctttttagtaaaacaatgtgttttatattactcctgtctcataactttattagttatactattattaaagtgaaattacttttatgccgtatgccgtcaaggttagttttatccttacaaatcgtaaagggtaaaacaattctattattcgagctcgtgagtattaggtctaagcttggatgttgtggaactagttacccaaaattattcacacgtgtctttatgagtcgtatttgatttgatgtggtaatcatttcaaatttttggaaaactgctcttgcctttccaattgaccctaattttcctattttaaatttatagtaataatattcaaccaaaagaattctaccaaatttagatacttccttgatttctttgccttttgtattaagcatctccagtttctcttctttctttcttttatattatctcttgttttttactttcacttccttctttctttcaatctattctacgattatagcttcaagcaataccaaggataaatccaagtcaacaagtgagaaggcttcacctatgactgcccaagacttcttgattgaatacaaagccgtttatgatgagatttgtgcaaaatatccagttcccgatgacatcaacttctgcgtattgacacaatctgagctaaccaaaacttggaaaaccttaagatggttgatggaaaaattatggtctgtcaaaaacatatgaaatttttgcatttcccaattactcccctgttggcatacatgctttgtctgttggaaaacttatttaattaggaccttatttgctattcaagtatattaaattatgtctaatctaacaacctaacatggattcctaaaaacaattgaaataaacatataaggagttcaagaaaatcttacaatgatcgcagcagaaattaatgtctctttccgttcagttctctaacccttgatccaatctgttgcagagtatgatcaagaactaaatttggattctcctgcgagatgtgaaagactacacaatcttccacactaatttaagtatttgatatgtgtgggcaaatactctgttgactaaaaaaccaagacacggacttccaagccacatccgctcgctagattggcgagaatgaaatatttgttaagtaaaagtaaagagagacagagcaatttatagtagttcactttctgtatcgcgacag

SEQ ID NO: 386041 - DNA, 963 bp, Cannabis indica
gggatacgaatcaaaggaaaactgatcaattttattcatttcagcagtagtacaattgtgagattgcaaaatattgcattgacaggaattagaaatacaagaggtagactcaatagaggtagcatgacactggtatggttcttgagaattttggcttgatatggtgtctcctagctggtacagcttgttcttaagtttccctttgagaagaactctccccgtttccttgtccttgacaaaacaacaagttttgtgaaattcaagaaagacattattgtcattagtgagctgagaaacactaactagatttttggttatagctggtacttgaagaacagaatgcaattgtaaaggacaagtagaagaagaaggtaaagaggtggtaccaatgtgagaaatgaccaacttcttaccatctccaacggcaacagcttcatgtccattgtaagaggtggaggattcaagattcatgggattattggtaatatgatgagtggctccggtgtcaacataccagccctcatcatcaccaaaatctggaacaaacgaagctgagaaggcctggggatcatagtcccattcttgttcagtaacaaaagcacgaggaggcacagaacctggtttaggggtgacccatgacttgtcaaaacgatagtggcaggtgggtgctgtatgaccaaatcgaagacaaacctgacattgtggccgagtagcttgagttcctggcttaggatatcctcgacccatgttctttgtactgtgaggagggcgatagacattagatcttggattcccataggttaaattggcctgcattttcatagctatttcattcacagcattgtgattctccaaacgactttcgtgggagagaagaagggcctgaacttcttccagagaaagaagatcacttctcgccgtaataccagaaacgacggaatcgtactcgggtcccaatccatt

SEQ ID NO: 386042 - DNA, 803 bp, Cannabis indica
agatagaaccctttttagaaaaaagaggagccttaccttgaaaagttcaaggcttttgaccgaccgggggtcacgaaggagactggggaggcagatgagatgtcaacacagtaggaacaataatcaacatttgataagggacgataaataaagatggagaagactcactgaaaaatccctcaattgttccagtcgtgactcctgaggaaataggggcctcaagtggtggaggaatttaagctttagaagaaatcgatggggtaatgacattctccatgattgactaaggcagatacaccttgacagctcaaaggagttgaaattttcaaaggttagggttttgtggaagaaaagtgaagtgaaaaatgattcactaccctttggcttttaaacgagaagaaccctgacaatattcaccatgcaaagaaaaaaaaatattatttttaaaacaaactttgcaaaactgagtagtacaagcccaaacaacgtatttttcacctcaatttatgtcatttatacaaatgaaaacatagtgacatgagttaacttgatcataattaatcaatgaatgcaaatataccaaccaaaaaaaaaatataccccagaccttaccaacagagattaaagagtacaagcttagagatgcttaaaacctaacagagttaataaagcagttagcatatgatcaaagaggagaaaccactactacaaaattcactattcacgtctgtttttaagtgtcacttaaagaatttacgtcactttataaaaccgacatatataccgtagtcgcaaatagtttt

SEQ ID NO: 386043 - DNA, 1372 bp, Cannabis indica
cgtaacaaaaccaattgcatttatctaaaattatttctaaatacaaccaattaaaaattgaaacaaagacatagtaacacaactaaaatagataaaagataattgaagcacaaaataagttacttaaaataaataaaacataccacatataaattcttaacaaatgacttataaaattaaattataaaaacgaattatgtttgtcagctaattaaaatctaacacaaagaaatcaattaccactactataaaattggggtttttcgactgttttaaataatggggtaaagtattctcgttggtctctaagaccgacgcctattcgactatcgggaaaatttgataaaataggcgacagtagaaaaccgtcgagaaaactttttcccgactatgcaaaatcattagggatatgagcaccatgcaaacaccactatcactgcataccaccaccaccgccaaacaccaccatgcaaacaccactacccactaccaccgcaagcacaccactacaataccactatcgccattccatttattaaactccaatctaccacaaaaccaataaaaacaaaatcatatcaggtctagatccacaaaacaaaaataaaatgcaaaaataatctcaaatccataaaaaaaaaaaacaaacaatatactaaaataagaaaattaataaacaaaaaaataagaaatagaaaagaaatgatgaacaacaaatgaaaacttgtggtgctcgtggaggagagggacggagtcacggtggtgttcgtggtggcttgcggtcatgcaattttctctgaatgagagagggagagggagagagggagagagagagacgagtggtagtggtggcggaggagagggatggagcgagacagagagtggaggagagggatggtggtggtgatggcttgtagtcgaggagagaaagtggaggaccgagagagatttggaatgaacattattgggtttttatatttaaaatagtatctttaacgatttaaaattgtcgggtttcgagatagagagagagttcgtgtgattggggttctgaaatgaaaattttggcttttatataataacaggttttcccaatggttttaaaccgtcaaggatacctgttacactctttttttaattttgaaatcgtgactattgtaaacagtcaagaattctaaacaactatttaaaaccgttaagaatactccattattatcgatagttttaaaaagtcgcgtaattttattagcgattgtccttaaaaaaacttatttgaggacttacaggaataagtctttctatagtagtatatgttcaaaatattttaccaggatctagatttactaccatgtatgttttattaacatcctaa

SEQ ID NO: 386044 - DNA, 2603 bp, Cannabis indica
gtttggttgcattttaaagtataggaataacactctaataaaatgtttttttcactattttggtagaatgactattctattttaaaagaaaaggaaagaccattctgatgtaagatgaagaaaattaatgatttttttaagaatgttttttatacattttaaattttattccattctattcctactcttattctcattctcattcttatgttttcattcctcaaccaaacactacttttatagtatttgggcggcttagagatatatataggggaagctgtttctaagcataacaactcttcattgatcgggaaggcagcttgttaagtaagaaattacaacactttattattattgaatagtactaatacaagctttgaacgcaactcttgcgcttttacactcggactctatttctcaaatttgccctttgggtacacaccatacttctatgtataggctgcataggagatttctaaatctttctagaattctctaacttccaaagttataaaaaggtttctaccactatctaaataattctagaactatctatagctagtttaactaactatatatttcttctaaaactttacagaatgttctaggttctctcctagtattttcttagagcattattattctaaaaattttagaatcggcaacgacttttaacacagctagccttcaagcaaataatgttcactattttgataatcaactaaaaagttttcgcacgaattaaatcctttatttatttaattttttgaaaaatacaaaggattacattaaactgaaaactcaccactctttccatttcttcttcatactcttcttgcatccgtcgattgtattttttccaagcttcctcctgaaaagatgatcggaatgatttgcctgatcctcctttccatgtctgtgatctgctcaacttttttttttgtggtgcaatgcaatgatcaacatcaacagtaaattagctcgtgcattgtgcatttcagacataataaaatcacaagaaatgatgaaaatagattttcattgcaaactgacaaacaaaaaaaactcattcaatgaatcgtaagtgctgtttccttgctataacatccacaaattcattataggcataaaatagcgctaaagagaagccaaagtattgcaaggcttgccaactcgaactaagtaaacactacttatggggtcttaagtattagtttatataaagcatgcagcaaaattaaaaagatttaagtatcaaattaacgattgaaaatatccttactagaaagaatagatgatgccatttatacagtgtccaaactccaacgaaaatattaaagttcatttatataatcagattaatgagaactagaaagtacattatgttatgcctaccactacctgagagtaaaaccaatcaacagttcttcgcaactgaccaacctgccaaacgggtataaaaatctaagaacgcaaacttatcgcaagttttcaagaagcaaagataaaagctttgttcatttccccaccatattacaaatgaaaattaaattctgtctttttctccttagcttaaacgaataaatacacaaattgagccgataaaagtgtcaaagtgtttataattatatacacacttaccgcgaacgtggtgacggtggcgccaattaatccgaagaggaaaactccccaaagtttcatgtcctctttttgggacgggttgtttggagacgacggccaaggattatcgtttctatctttaccatccccctccttcatcttccccgatcgaaatttgaagtatcaattaaaatattacagttgggagatggtaaagtatcactagggtttatcttgtcccactgatttgggatttctttttcctgaaaccgacttatggagctggctggaagagacagagattatcgtaatgtagatggggtgtttcagcttaatttcatcgtacacctgcggtcttacatttaaaaacgatttatgggaaaattttatttacaccccaaaatttttctaaaggcaccccattttaataatttttattttatataaaatttatatctttaattgtacttaaatttttttaaccttttttttccaattcatattcttaaaaaatatacctatcaaacaaaaataaattatattttaaatattatgagaaaaaaattaaaataaaaaattatataaaattttcttagaaaaaattaaaaaaaaaatatacatgagttagaaaaaattatgaaaataaaatcaaaataagtattgaaattaacataaaataatgtgagaaaaaatttttaaaaaaatattaagagtaatttttaaaaattatttaagtttatatttttttttaataatggggtgtacttatcattttgtggggtgtaaatagaactccccaaatgtaaatccaaatttacaatttagtacaaatattttatagagtaagttgaaatttaaatgtaaaaactatttatttaataattaaaattaataatcaaataaaattgctatttaatatatttattaattagacttaataaagtctcctaatgaataaataaaccctaaaatttcttttcttc

SEQ ID NO: 386045 - DNA, 891 bp, Cannabis indica
ttaataatgaaaaattaattcttctttactttccagcttcttttacacgacaaccttagctaggcttccctcaaataggttcaagttttagggcacctaaaatgtatactattcaacaataacataataaaattattcataaaacattaacccagacttttagatttcttcttttcttttttgttttcagtaaccatacaaactaaaacatataaacaagatctaaacaaacaaaatcatagtgtcctcatatttgagattcttctagtattagaaaatcatttgatatccaaaaaaggaaatttaaattaaaatcaaactttaaaatccaaatcaaaaattgtgactataagagaatggcctcacgacaaatcaataatgaactgagctaaggaagacgtcatagttaaggacgtgttcaacgcaaataacaaccccaaaaaaggaatgttcacgggttggattggcggattgaggctactttagtaggccaacttaattacatcggcttataaaatttcaacccattaacaattttttttgcacaacccaacccatatattttaagttgggttagattgtaattcttacttcacattaaataaaaaaagattttatcataatcaaattcatacttagaagaaagaaaaatgtaaagttcaaagttgaagtctaaaatatatgtcttgaaagttatttaaaattatttaaactatctattaacaatgtccatcttcttctcctttagctgggatcctttggatttgttatctacaaataaaaaataatataaaccaataactattaataatcaagaaacttgtccaatattaaagttttttacacaatagcaaaaaaaaatgagtactaccaacaaatagccaaaaaaat

SEQ ID NO: 386046 - DNA, 1172 bp, Cannabis indica
tgtgaactcttcagtaaaagttcttgcattggatgatcataattatactaaaagatagcgaggattccctgataggctacaaaaggtattgcctctctattcattagtctagttttaatctatatattatgttgagatccttgggcttggagttcacattggataaaatatttttatcaaatccgcttccatttttttttaactctgatatggactctaaaaaccagcacatgtcagttgccatcagaatatcatttcaaggtattagtgaggtgtacatagagttgtactatagatatatgttaggcatattagtagccattagattagcatattaggatatttgtgaagtgtacataaagttgcactgagatatcaacaaatatctgctaggttttcagaaagtatgaactaatttttatcacatcagtaccactagagtactagtataggctgattcgtggttagtcatacttttgtcaagaacgttcctgacctagttatagaattgtgattaggtgtatgggcgcctggttacggtctggttatatgcttatatttatgcttttcttattaagattgtcgactcacagttattatttgcatgtccaggtaagagcaagaattgaaccggaatgagtttagagttgcgtgaagattgtacgtatcaagatggttagacctagagtgttcaggtctttgggacagttcaggctcactttgtgttggtcgttgggaaataggtttagtataaaatatattttgaaaatagtaaacttttaacgggaacctggagttatgtaaattaggtttatctattaaagtttaagttatttaaaaagtttaaattaattacatttttcaacaaaccatttgatcagcaaaagtgtacacaataattaagaaaatactatagtgtgcctaaattagtagggccttacattattgatgagtcggactgatctggacccattaaggttccttatggtggtataatttgatctattgggctgagtaggtgagacccaatgtggatcttgttggattatattttaccaggatctaaatttactaccatgtatgttatttaacaccctaaatataaatttctaaaacaatgtaatttaaacacatgtaaagtttaagaatccttatagtgggtgcagcggaat

SEQ ID NO: 386047 - DNA, 567 bp, Cannabis indica
tagtgtttttatagaagcatccgagtggatatacgacatgtcgttttgaactcatttctcctcattatcttttgtcaccagcaaaaacttcagtttgcttcggagagagctaaccatgtctctacttcttccctccaagcttttctgcctcgctcctcttcgaaacgatatccctggactctactgtcctggccgacctctacttcatactcgtaaccaaacactacgaattgtctgcgctaagagagccggtaaaaggagatacccctcggagaagaagaggctgaaatccaagcagaaggagatattagcccaagttaagaccagaaacaagtttgaaggtttatggaggctatcaaagctcggagttcccgtccatagagacccggggaaggactttcttggtgtttcggagggattgcttgaagccattgctaaagttcttgaatttccggtaatttcaatttcaagttctgtctgtctgttttgtgagaagatttagatggattagcgttttttatggtgtgaagtgtgcttgattttggttaaagacgaaattcaagtagt

SEQ ID NO: 386048 - DNA, 542 bp, Cannabis indica
tttttccatgatatctgtgaacatcacacatctaaaatctttatagtgtcatcaaggtcaacatatactataacatttagaaaatagataataaaaactaattatacatgtataactaagcatgacaatcaaagattatggctgagaaatcactggaaaatggagagcaaaagctgaggaaaataattgaatattcaacctatcatagagcacagaagcaaacgaaaaagaaaaaaaggataattgaatgaaaatatattgtgaacttagaatattcaaatatttaatcgagccgctattgaagttaaagtggtttatgtagaatctttttagttatattttattattaataactataaagttatgagaaattattcatatctatactaaaattataatcataaattttaacaaaaaaatattaaaatttaaaaataatttataaaatatttcttaaaaaaaaaaatcagtacattctactctttaaaaaaactgttttaaatataaatgatttttaaaataaaacaaatctaacaaactgt

SEQ ID NO: 386049 - DNA, 1597 bp, Cannabis indica
atgttgcccatcattcttcaaaccaaaaggcatgagtactttataacaataaagtcccatgttggttaaaaaacttgtatgctcttgatcagggacatgcattttgatttggttatatccagaatatgcatccatgaatgtcataaactcgtgtgcagtagttgcatccaccaactagtcgatccttggtagtgaaaagcaatcctttggacattctttgtttaaatctgaaaagtcaatacaagttctcaaagtaccgtttggctttgggataagaacgagattcgatatccacgaggggtagagtgcctcgcgtatgaaatcgttggttaataacttgtccacatcttctttaaatgcccctttgtctttcagaatcctagggtcgtcttttttgtcttttaggtgggtaattagggtcgatattcaaatggtggcaaatcactgtagggttaatcccaaccatatctgaatggctccaggcaaattgatcctggtttaccttcagaaaatgtgttaactgctattgtagtttttcattcagattttcccaataaacacacatctagtgggattgtctgaatttaaaataatttcttccagttcttcagttggctctaactggtttttctcatcttggattcgaggatccagatcttcttctttcttctcgcttccctctgttatgaccaccattaattgatggttagctcttctattctgaagttctacacgatagcattcacgagccaattgttggtcgcctcgcactacacctactcttgacgatgtttggaacttcaaagataggtgtttgattgaactgactgcccctagtccaatcaacgcagggtgacccatcaatatattatactccaatggtagatccacaattaggaaatttggcatttatgttgtagataatggtagctcgcctacagttaatgagtgttcaatagtgccttgactggcgactctatcttcggtaaatccacataagtttaccatacaaggttttaactttatattttgtagtcccatcttctttaaggtatccttgtaaaggatgtttaccgagcttccattatccaccaacactcttttcattcttttgttggtgagttgtactgtaatcaccaaaggatcgacgtggggatatctcatgtgttttgtatcttcctccaaaaatacagttagaggttcttttgtttcggttttagttgatggttctagagcaaacactgattgctcgtttttagtttcattgacatatctcttctgagcattactactctctccagtgagatgcggccctcccgagattaccaatatgtcctccacttccataggaggaggttgcaatccttggtttcctgagttattgggcggatttcgctagttttgctcattaccctatcatttaatatattgtcaaaaataacgtgcgagataaggctctctatctcgtatttcaactgacgatattcttctgttgtatgccctatgtccttatgaaatcgatagaattttgttgaatctcttgttggaaattattttaccagggtctagatttactaacaagtatgttggattaaca

SEQ ID NO: 386050 - DNA, 2280 bp, Cannabis indica
aaaaagaaattgagacgagatgaatgtgaaaaatggggtttgaaacgtgatttatcgggagaaaatggtggagttagagaggcgagagacgatatattagatggaatggggtgtcagggcgtgcttacctggattgaactaacttgtaaaatattattcttcatcattaacaatgacacacaacaacaataacacctattatttatgcctatcttatgctcacttattgtttatacctttcacttttaacacaccaaatttaactttctctctctctctcttttttttttttttgattatgttagaatttatagaaatgctaaaatgtattattattgtttaatcctattctctataagtagcagatcttatataattttaaaaaaaatattgctaatcgtggaaagtattgagcacattatgtctaatagcaatgctctagaatttaagattaaagtggataaagtttcatctcaaaacttattaaaaacgagaagagtaactcatatattttatattatttctttttacacatttacaatatgaattatttttacgtttaaatttagaaagtatgggtataatgaattggacattagatttgaaaaaatcccactaaaataaattgggaaatttgtgagtgtacatatcgaaaaatttgtaaatttttttgaaacaggttaaagtacatagcaaaaaaaaacttttttttttaaactctgataccatgttagaatttgtaagatgcatggacgttccattttaaaattaattggtactgagaggagtagctcatgcatcttatgtacggtgttatatttgtataacttagcaacgtaggactctaacatccctctcaagatggtagttagttttttgctcatcattctttgatgactcgaacacaagtgacactttgttggctcgcaacagatcacaagcagcttttttcggctcatctttatggaccgacattactattggctcacaatagatcacaatcggctctttttttacctcatatttttggactgacgatacttttggctaagactagcaattcgttttatcatgtcatgttcgtgtcgacacgtttatggtgaacacaaacagatttattaattgtgtcaagaccttaaacacaaagaggacataattacttagcaggtcacacaataacacgtttaataaacatttcatgacataacccaaaattaacacgtttaagatacaatcaaacatgatacgattgacataattacgtatacaaacacaaatattacttataaaattcatagttttaattattattttttgataaaaagaaattagaagaaaagttttttttttttttgtttatagttttaattttattttacataatataaaaatttaaaaatatttatatatgattatatgtgttatccgtgatgatgggagaccttgcaaagtgggagcaaattctgaagaaaaaaaatgggagggctaattcctaataattgtatagaatttttatttttttttacatatttaatatatacgtatatataaaatagataaacttcgttaatgcattttataattgggtcattttcgggttaaccatgttgacccaaaaataacacgtttaataagtgtgtaaaacgtgtcgacttgattttgatacgaaaatgaaatgtgtcccacaaaccaatttattttgtattgttttcaaattgtgtcatcatgatgtgtcacgaattgccagtcctactttgggctcacaacaaactacaagtaatttattttttactcatcttttggatagacaatacttttggctcactatccttaaattacaagtggctcttttggatcgtctttttgaactagttattggatctggattggatattcgttagagttttgttaagctctgataccatgttagaatttaagattaaggtgcgtgagctttcatttcaaaaccaattgacaataaaaggagcagctctttttttataaaaaaagcattcatatatatatataagtaattagactttacgatcgttacaaaagagttgttcagggatagaggacatcagtattaaactaaacctctggtggaaaaacgcccacttagccacattatgggcagtaaaattacaatgtttactaatatgttaaaaaatacaaccgacaaaaaaaagagatgatctaacacaaaagaagaagatctaacacaaaaggagtagttcatacatgttattatcattttacacatatacaatgtgggactaa

SEQ ID NO: 386051 - DNA, 3397 bp, Cannabis indica
gagccattaggtggttcttatcaattttcaaattaatttcccgcctaaattgtgacagtgctctttagttttgccgcctaagaggaacgtagctttttttctgttttgttgatatacaatagaattattttaattattttttttaagaataaattctgttattataaatttaaagaattatttacaataatagaaaaaaaaatagtaggatgaattttttctaaccaaaatacaattattatttttcaataaagcttgtttacccaaaccataagcagcttggtttgtatctcgacgaacatgagatacacaaatattagagaaataggataattaatttttaacatcaagaattaagtcattaaaagataaaaaacttgatgataaagcatgtatagaattaccaagtactaaggaatctatttcaactaaagctacatgaaaattcaattgtcttacccattttagtgcatgaaacaaaaccttagcctccatctcttgaggtcaaaaattgcctgttgctcgccaacacatgacctaatgaatctcgaattacagcaccaaagcccatcttatctgtgatggttgcaaagcaacatcaacattcagtttatactatcctggaggaggtggtttccatggaaaatggcctgcaacattctgattcaattaaaggatcgagtttgaagttgaagcatgctgaaaattgcagagataagccatcgaatttgcaaaaatatcagcttgtttcttgtgagatttgtgatgaactatgttgttcttgtcagaccaaatagaccacatggtgcatataatcttttctagatcagatttggatgttgttgacagttggatgataaaatcaccttcaaacatcctactagctgctgcaaaataaaaagtgaattcggaagaacgccatactgatttggcattctaacggcttggacatggataacttaaatggaaaatgtgagaaatttgattgaaagctctcttatttatagatgagtccagtctcccaatcctaaagcaattgggagtactttaaattcaaagccttaaaggaaaagataaatgataagaaaaagataaaatatatattttctcctctcctttggcattaaatttgaaactcctacagaaataggaataggattttttgaatttaagaggtaacatccaatcctaatactactaagattaaggaaaaattagagattaaaaagaaaaagataaatgataagcaaaagatcaaaaatcttttctcttctttcttttttctctaattttcgaatggaatttctaaataggattaggattcaagtccaattaatcctagtgtcgtaagaaatacatgaaaatttcaagttctcaaagaaaaagataaaagataagtgaaaaaataattagtttttcctttgtttctttgactacataattttcaaaatttccctacataagaacaaggaaacttaaatttctaattctattgggattgcttgaagaatagaaacaattgtctaagattgtcaaattaatgcccatctggtagttttgagaaaaatagcatcagttcacgtcatcatgtcaactccacacaagtgtaaagttagcttaggcagtaaatattaacccaaaaacttttcctagtgatgtggacatcaatctttaacacgtagcaagaaaggtaacatcacagagttgagtagacccgattcattacagtcgacctgagaggggtccctagccttgcgcccaggttgactttgagaactccaagaaggaagcttggacttcattaagtattttgtaccataaagacatgtagcaataaaatctagacctcgagagatgaaattacatgaacttgcaccccataagtcaacctgggcacgtttggtttcacctagcgccaggttgacatcctaactagggttccagtttttgggactgtcgtaaagcaaatgggtcaaaattttcattaggacatgaactagacataccacaaacatatttgaggcatacgaatcagattcaaaaaaaagttcatttttgagaacctggtgcatgggcccccagcgcccaagttgacaatttgtcaatctgagtgacttctaagtatcagattgacgatataactttggcatcatcttcgtcttcatcaaaaataaggaaataagtaattttagtgaagaaacaacacttcttaggtaccaaaagtaaggcccaacactcaggttgacacttggggctagtaagcgcccaacacttcagtgatgttttctgagaactcttctaagaatgttctccttcttcagaaaaaattaagattcaactatttatggagaccaaatggaacgtccaaggggcaaaaacttggacccaatgccaagttgacacctggcactaggcccagcacctaggttgacatattgtcaacctaggtcaattctaattagtttctcaaaaatgtgttccaagaattttttttgtcatcaaaaatattgaagattcaagaaaactcgaggagaaaaccataaacccaagggcctagaagcagagcccagtgcccaacttgacaatcaacctggtgcactattttcaatcactcaaatgcaaaatctgattcatgtattctctccaaaatggttaaaaatggggtaggagaccttgtcctcaagttctaaaacctttgaattataaaaacgacaacttagaagctcctaaatgatcaccgagcacctaggttgacaaatggcctgaggcactgggttctacctacagttgcgagtacttaaataatcgactactaacaaatataaaaaagcaaaaaataacaagaacacaaagaaattataggggttcagtctgagcttagtctgtttagtccactgttgcaaagatttcagcttagttgatttgatttggatcactcctttatgtagaaagtaagtattctttaggatttacataactaattgattttataaccgttttacaataaataacaatattaacttagaataaatgtttaaagaataaatgatgaacagtttaatccgttcttgtattaagtgcaacaatatatgcgacttgctaagcgcaagttgcctgttcatattctcgcacaagctcgtaggattttggtacttttgtattcgctaaatggctcatggcgcatgttgtttggatgtttgcattcacctttgatcacatggacaaacatctcgcgtgttgataacgtggaacgtgcaagtccctgacgagtcttcgaacacaatcagtcattcagaccaatctcttgttgggttttgtgccctaaataaaactcatttcaatacaatcagatttactaattaataaaagatcagaaatcattctatattgcatggtt

SEQ ID NO: 386052 - DNA, 1107 bp, Cannabis indica
ttttttaaaacaatttggccttgtttggttaatattgcttttaaaaaatactaaccaaacatgacttatttttaaaaacttcaaaaactattttttattctcatttctaaaagcaattttttgaaaacaaaaaacagaaaacaataccaaacatgctcttaacaactcaagactaatacactaaccaatataattgactattaactgtcataacaattagttaggtcacagaccctaaaaattggttaacattcccctcaaacgaaaacgcatgtgtatctgacatgagtttggatcttaggtacaaaaactgtctattgataaagattttgtaagaagatttgcaatttgatcgttggtacatatctgactaacatttgcttggataaaatatgctccttaacaaagtgcaaattaatctcaatatgattagaccttgcatggaacatagaattttctgcaattgcaatagcactttaattatccacccatagaataagaaattatgaagtgttgatgtgaagttttgaaagcggggacatctgttgtaagatataaatatatgtgtatatttataatattacatatatatatatatttcaaaagaaacaaggacgtgactcattcttttatttgacttggtaatatattgaactattgcatttcctataaactagcaaccacacccactatcttctcaaaaatatgagcaacgtcttttgtgacgttagtgctctacatgcgtgtatatatatatagatacttaagggtattgcatgaagtagtatctcatatatacagtatcgtatatacaccgtatcgcacatatattatatacaacatatataacttatttatatagtacatattatatatataattgttcttggctgggttattatttttctgctgtttctgttttcctggttctttcattgtaatcagaagacctgttgaatcctgggggattactttgtaaatcttaaggacagtgtcttgtttgcacgcctcaggtgttatcagtttattattgtattgtaattatttttctaacaatcttaaggatttatgggatcacaatgctactactgctgctgctgttgataa

SEQ ID NO: 386053 - DNA, 2427 bp, Cannabis indica
caaaaaataaaataaaatgaaagggcttaaatgaaatgagagattattcttgatcttgacatccaagacataaatgtttcatttctgtatacatttatggtatgtacttaatttaaaactttgtaccctcaaaaaataaataaataacttatttaaaactttgacaccaatataattatcaaaattgacatggtttaaatacccaaaatcaaaatttaaaaaaaaaagagaaaacaattttattctcctgtaatttaattaattatcaatttaccacccttccatctctcataaatagttaaaatgaactattttaaaaaagtaatagataaactacttttaattcaaattatttaaaactaaagatgccaaattagtagggagcgaattctcactaaaaacacagccaacattcgaacacgaagaaaatgctaaaatatgcgtgttggaattactgaagtagaatgattagatgctgagctggaaagttagttacattcaattaggattagttttcctttttaactaacttctgttggttgaattagattagtcacgtattctttatactagtcttgtatgtataaattgtttacaacaataaaaagaaaagattgagctgccatttttattctttccattcagtacatttccatcttcctattctctccttttctgtcaaaaccaattgtttttggttttcttcatggtatcagagcttcaatggccaacaatggcaatcaagatcctttccaaccacaagcaccagctgcaaatctaggacacgaagcaacattaccaaacaacaatctgagactagaccgcacaaattacacactgtggcattctcttgttcttgctgctgcacaagcttatgatttggacaactacattcttggaaacaatccttaacctccaagagttcttgtagataatgtccctaaccctgcatttcacacatgtcttagattcgatcagtttctaatgcactggttaatgaactctatcaccgaggctatacttggacatatcatcaacgctcgcacttcagctgagatctggataatttttgagcaattattttccacgagatcaagggcacgactacttcaagtcagaggcctactccaatcaaccaagaaatgatcatcaacaattgatgagtacatcttgaagatgaagcaatatagtgatactctagctgctgctagacaatctttgactgatgatgatccaatcccatacattcttggaggattgggacttgagtatgaagctgtcatggtgaatcttactttcaaatttgaaactttatccttgcaagaagttcaattcatgcttcacagccaagaattaaagatcaatcaacacaccacaaaatctctcaccaatgtccaagcaaaccttgccaactcctctttcaacaacagtggacgaggttcccagaattatggtgggtgtggatatcgaggttcaaatcgtggaggcagagcatccaatttcaattctgttgatcgaggcagaggaggcaacatgccaatttgttaactctgtggaagatgtggccacactgtccttaagtgttttcaaagatttgtcatcaacttcacatgatctccaactgaaagtacagcttctgcatccaccacccttactgagtccccacaagctcacctctcacaaacctcaaacacacaagatctcaccactacctggtacatagacagtggtgccactcatcacatgataaatagtgctgacaacctcaataactccactgactacaaaggcaaggccaaagtaattgttggtaatggttctaaactccctatactaaatattggatcaaatgtctcacttcaaattctctcactcaccctttaattcgacaagatatattgcatgtcctaagtgtatccaaaaatctataaagtatctctcaattcaccaaacataacaatgtaatttttgaatttgatgatgtttgttgtctcatcaaggataagaacaccaagcaagtacttcttcgggttaatctccatgaagcactgtaccaactacaaatttagaatcactagccccaagatcagtctttccagccctcaagttcacttcagaccacaccaatagccctggattttactacttctagcaatcctatgtgtgacaaaaataaaatttttgatgtatggcattgtagactaggacatccttcctttaatgttctaggtaaagttctctttcaagtggctcctcaagccaaatgtagtaaaaactccttctgtgatgcttgtcaaataggcaaacaacatcactttagcttttgaagcacaactaataaaactacaatgccctttgaacttgttttgtttgatgtttggggaccctctttttatactttaatgatggttatgttgggttttatgc

SEQ ID NO: 386054 - DNA, 936 bp, Cannabis indica
tccctaagagattcggagccatgtaagcaacttatgtttggtttcaagtgagccaacatcgctccctgtggtaaaattagataaccactcatagtccaaatttccccatggcaaacatcactatgaataccttcataatgattgacaccaagtcttcttagaaggtcaacgcccaatgacctcctagccatctcactatctaccacctgtttgtcaagttcttaacagtagctggtagcgatcgtctcctttgaaaccaaagaatctcatgcaaatgttacaatatacataattgacatttgccaagaagaccccctctattgtgctagttgccaggggaagtagaagacctcctccactgtcgagacaaccaagaggacaaagaaggcatcctccattgtgaatatagcaaaagtaacgatgagacctctaagtttaagaccaagacaaaatggagactacacctacaatcattctaaggtgcactctagatgaggaagacatcacccccatcttgggtatatcaatttgggagttggtcacatcctcaatttactaaagaacaaccaatgactactacaacacttcgttgaaagttgccaagaagacatcctctactgtaaactcgaggatatgttgaaggcttcctctgctataaattcaaggagaggaagaaggtctcgtctactataaatccatggagatattgaaggcctccttcactgtaaatttgaagagatgaagaaggcctcctacgctataaatctaaggagttgacgaaggcctcctccacagtgaagctgaggagaagattaagaccacctttgctaaaacacagctgaaggaatgctaaagaacttcaaggctacaacctaagagaagataaagtctacatctatatctatataaacacacagtgcgacaagagagacaatg

SEQ ID NO: 386055 - DNA, 1711 bp, Cannabis indica
atgaatataccatgggtaatgcatggtcaaatccctaggtgctgtagggtttttatgtggaatgtccttattgccttttgattgacgtgactcttcacagtgtagccgtcgctagacttaaatgatcattactgtgccgctgctggttggaggttgtgccgtcagactttattgcgtgtagcagtcccaacacgcttcctcccatgcggcatttaatgcgacttgattgctcaggagaagcctgacacctcgcggagatgccttagcgctattcgagcttccgggagcatatgaagttccatgtgccttctccgggggctacgtcctggacgctaccttatggcataaagacttagcaaatattgtgaattgcttgatccacgtgtccttatctggttggtccacgtatattgggcaaaatcaggggcaacaaaagtcaatacaaaataatgtgcaatcaaaataataataaaatattgaatgtttttactatgtactcctttaaaagtagtccaccaatacattttatatatgtttcggtattggtagaaaatttttaatttattttttatgatcatctatgttgtagttctttaagacatcctccaaaattgtgagagatttagaataatttaacacgtcggaaacagtgttcaaacactttgttgcatattttattttatgcgtgtgtgaaataaactgtttgaatcctatttctatcatgttaaatttttttgaatttttcaaaattttacaggatgttgtaaataactacaatgaagacaaccatgaaaaaaattagactaaaaaactctcccaaatgacaaaataaatagggatgcatcggttggaccccttttagaggtgtattgtaccctctaaaatagatatacaaatacacttcttatctgtttcggcatttaagagaattttttttgtctaatgttttttcattgttaagtacgttataattatttcagacattttgtaaaagtttgaaacatttggaataattaacatatagaaagttatgttcaaacagtatattttacacactataaaataaaagagtcgcatgcaaacaatatattttaaccctattgatcattgtgttaaatttttctaaatttttcacaattttatataatgtcttaaataattacaacatacgcaactataaaacaattggactatattttttttttcaaatgctaaaacatattatagtgcatcgatgcaaccctttgagtagggtgcattattatcgaattttcgtagtttttattaatattagggtgtttatataatttcttgatgtgtaagtataatgctcttcactcaaggaagaaaagcaaaaagaaattagaaaatagttagagtaattccttatttatttcaatatttatgaaattttttaattctatttatttttaaaggtatttttacaatgtacatccagtaaaattttaaaaaattcggaataagttataatatagaaagtaatgtctaaactatctatttcacaaatgtataaaataaaataaaaatcacccatgcaaaacactttttaattgtaagctcaattctaaagttgaaattatttttggggtaagttggaaaatagcacttttataatcaattaatcaaatttacctcaattttatattaattgaaacatattctaccctgacataagagagttacatggaga

SEQ ID NO: 386056 - DNA, 1905 bp, Cannabis indica
agtaataatccaattgatatttaccaatgatatctacctaatactttaaatttagatgtaaaaaaataagaaaattagatgtaaaaaatcaacataatttcacagcaaataacatttaccaactgatgtaaaatcaaggtagccaaaaaaaaaaaaaactgatgtaaaatcaaatgcttaaaaaggttgcccatgtgggaactgttttagtgccccaccagaaaatttccctacccctatctttatatgtataccaagaatactgccatagatcgaaaactatgggacctacctccacaaaatacttgtgtcttctagtcactactattaattgttttatgcatgtctccactgacagagctagtacttcatgacttgacttgtggtatggtacaacaacctaaaatgtacatttacatgctgtcataataaatctttttgaaactgatccttttgtgctatttaagcttagagtcatttattaaaaggattttaattcatcatcaaaatggaaaaaaataaatacaatatatagttgccgacaatattgattcaaactaatctaatagattgagttagaggtgtatattgtgagccaacattcgtgaagtaaatactttttgcatgagattcaaatttatgtttacataatgaactgcttgttggtatgtgtaagattaattatggtaactaccaatagtttaagttataataaaactaggtgttcatcaaatattcaatacaatttaatgtaagtagatttaattaaaaaatataaaatttatatacttgtgtggattgaattttttttcttgaattcagaagagtttattgaattcaccaacacttacaagataaagttatttacaaaatttttgttaaagctttcacccactctctatctattttactcaagttcttagctttcaaagagttcactctaacacaaacactattagcaatataattaaaagtgaccttaacagtagaaaatttttgctccgaaagtaccttgtttctagcatgccaaatgaaataaattgttgatgtaatgacgctcaaaagaacctttcttttacctctagaaacttttgccttctgaatccactttaggacatcatggagctcttttttccgactagtaataccaatccaaatccacacttgatgaatcaccaaaactactgtgaatacaattaaaaaagaggtaagaatgactctccactccacttccacacaacaaacacaaggaagagttggtatgattaaatcgactaagtctgtccaaggtagacaaacgactcttcaaggctagccaacttatgaacatgtgtttaggagtgcaaaatctatcccaaatgccatcataacgtcatctaatattacttccatataagacatcttggcgtacaaattagctatggaaaactgataattgctatagtcatttttggagaagacttgttttatcctttccttagtttgaactattcttttccaataccaactagcctccaaagggacttggcagtcccaccaatcttgatttttgagatacacctcgttaacccattttacccaaaggttgtacttcttggtagtaaaagcccacacatgtttaccaatagtacaaagattccataaagctatatctttgaaacacaagccaccatctttcttaggtttacaaagatcatctcaggcaacatttccattaccattgctcatgtccactccctttcaaagataagtacgacaaatatgtgtaatcttttgaattacagcttttggtaaaataataatttggggccaataagtgttaatagacaactagatagagttgacgaggaccattcttcctgcataagaaaggttcctcgacctctaaattttaattctggctgt

SEQ ID NO: 386057 - DNA, 1491 bp, Cannabis indica
gggggttggcctataaatactctaaagaaagcataaggtggaactccgatcggtccttcagaccttcaccttgagattagattcatccttcatcaagaaaacacatttctacatccccactattaactcttgaatatccctactaagcttcctcttctttaagaggaacacggtggaagggagtagaagtcaattgtcttgtatttgtataaacaatcaccgaccaaagagctaaatgatatggactcgtggactaaggatagtgaaagcctaaaccatgtaaaaatcttttgtatgtcactatattatttataccttcattgctttcttaagctgtaaaatttttcaattgccgaaaaactcggtaaacatttttgactttcattgagagctaaagaaagagatatgtacggcggttacctacatgagactttcgagaagaaggtccatgtaagagaagaaggaagacctcctaatcactggtcgagggccggttgaaagccaaaagtgtgcagagtcgaggtggtgcccagaaaaagatttgatgccttcgcttgcctaagaaaggtggtccaaacaaacgtgtgtggccttaaaacacccactgcaccgatatccaccctcaaaagcgcagatttcgccaaccaacttttggggggcaagactagctgtcgatatcctcagttttaactcccccactgcatcgccatgcataaacagagcagtgcaagatgcgctagggctagacagagaagctatgacccaatgtagttacgatgacatactcaggaagggtcatcacatgcaacgactttattaagctagaaactgcagcactagtgccggtgcgagggccagatttttcttccgataactacttctcctgcgtttttgcaaggtggtaaagttactcaaaaatagatcatgcgatggcggccgctgagaggagatcgtgaataccatcgacatttgctgggctaccaatgaggcctagttatggtaccattagtagaggtcgggaactttggcccaaattctctcaatgccattcttgtcgcctggagtagctgcgcccccagagttacgtaaaaaaagagcaacctaagctattgaaaaccacatagggagtctttgagacatgcttaccttgctgggagaccgagtccttgctccaaagactctcaaatgccccgcgctttgacggaggtgacacactgcccaggagatccttcggtgtaagcatgcacctactagagccttccagtattcgagggatgcatgcagacttcatgttcgcccgtcaaaaattgttgggtgtgacgatacgtctccaaccctccttctcggattggaaggactgcttgaaggttatccaactctctgtgatgctttccttttgaacttttcaagcgatgtctaagcttgaaattttatacaacttcagcctcccttcccgaaagctaaagcatgttccataaaaattcaacatga

SEQ ID NO: 386058 - DNA, 1397 bp, Cannabis indica
aattaaattgcttatatatatagatatataaaaaaggatataattaatccatgtaccaaaaatcttaaaacaagtagtttttaagcttaaactataggcccctaaaacgatcgagttatattttaaatctattttagcaccatatatgtatttaattttttttttttaaaaaaaaaatcataagattctccaaataactataatatatacttggtgggtgggatcaaaagcataatataaaaaagcaaaattatgaacacttattaaaattaagaataaatgaaaatgataggcaattgggaagtgcggtggtggagactggagactgacatttagatcgtggttaaggctagctataccctatgtcttccacctttcaaccgtttgctagtgcattattgtttaaacaatattctgtgtgttttgttacttgatttgctacagagtaattaattgtctggctagagcttcgtgtcacatgtctagctacacctttggtgttacattattcggcagatttattgtagcttttggtgatattaattttaatgaaagtttatctcttttgtttttaaaataaaaatgaaaatatgataatatgatttttttttcttttttaataatgtataggttcctctatattatatttgtgtttattttgtattttctttcaattgttaaatattttagggaataaattgacagaaattttactgttattaatcatttaaaatttccgcaatgaaatgttgattctaaatttttagtaacctattatgtcatagtgaaacatgcatttattaccctactcaactcatgattcatcaattttatgtctcatttatgaaatggacacctttggttgataatgcaggcacgtgacatttctttgtggtaaaggtggggtctacgcgcttggatctgtggttgctaactgcattggggaccatcaaaagcgtgacatgtaccttaacctcttcttagaggtaattatctataactataatctatataacccatccctatcttcaagacttttttttcatctcaccattggaattgtatttttgcatactattttaaaaaatctacctaataaataaaatatctggcttcatttgatatccctttctctcgagagaaaaaccagtttttgtttgtttttttatttgtgctattaatatttttgcttttaggtttcggtatcttattcaaagatttattaaaccgtacacgcgtctatcgtaccaagcatatagttttactgacatagacaacaaaaagcaattaataagaatagtgaaatttcatttttttgcccttcataaaacctctaatatcaaaatttaaacccttcactaatttgtacaaattaattctattgattacatgaactt

SEQ ID NO: 386059 - DNA, 867 bp, Cannabis indica
agcagatacaaaatatgaaatacttgacctattgattgatgtggatataatcttttgtcccctcttgattgatgtgattcttcacaaagtagccgtcactagccttattgattatagtgtaatagccgaaaaaggggggttacgccatctgttgtgtcgtttatggagatttcaatacgcctcccccatgcagcattaaatgcgaggtgactgttcaatagatctcagtacctcccggagcaaccttagcatgttttcggcctcccggagaatgacgatattctttatgcctcctccgggagataccctccctgaggcactcttcttttgtctaagacttagttaatttccataagtgttggtccttacagctcccacgtgtcatctttatccaggtccatgtattttggggaaaatctagggcaacaattctaataataatttgaatgtttattagtaaatatttaaattttaatatttttaatgaattttttatataattttatgtgaaaaattatatacaaataattgaagctataaaaaatgcataactttagtaactatttcattaattacaaaaataaaatgtaaaacatagaatataaatttgagcacgtataagaaaatacaacacaaattcgagcataaacacgaatttgagcatgacacaatacagactatattttttatgacacgacacgccacaacctgtttttttttatgacccaacccgacttgacccttattttttatgctacaatatgacatgatctatatttaaagcacgacacgcatttagctaaatattttagttataataacttatttatttatttttaataaaattacactaaatataacatttat

SEQ ID NO: 386060 - DNA, 1726 bp, Cannabis indica
ggtgcgactccttggccgaagaatccatagacaggctgaagataggggttagatctttgagttggagccccatcttttcatatgtggtcttgaataagatgttggaagaggctccattatcaattcatagttctgaccaccatcttggtggctatttggacttccactaccaacgggtcgttgtgcgaaaatctaatttcgacagcatcttcgtcgttgaaggttatggtgggttctcctgcccgtgggattttttggcttcctctcttctacggccaggatcacttctttttgctcgtgctgtactgttcaggcatacctctcccgggctttgcctgaatctccagctatgtgctggcctccaatgatgacttgtacatgtccatcgactggtggaggtagtaagtcttagttgttaccactccgctgattctgatcggtcttgacataaatctgtatatgcgggttattcttccttatcaggaattcaatttctcactttagattgttacactcggttgtgtcgtgaccgtaatcttcatgaaatcgataaaacttagtcatgcctctcttactgacatcttttttcatgggtgcaggctttttgtatggggccagtgattgagtggccatctaaacactttccatgtcctccatcaagatggtaaatgctgtatacttggtagaattctcccggggaacttgttcagtttttctagtgaactttcccttttttccactcccctgcctatcattgttgttggacccgtttactgttcgagcttgaatttcttgggtaatgggggagctagacggatgtccaagtagaaggagattttgacttgccaggcttttgctcaccttctgctccctgaatggcctcttcgagtttgataaaacctttcgcacggtcaagaaaatcactcatcgagtctactggaccgtttttccttatgtccttccaaagcacaccaaggacaataagatgagaattcctcaagtttaagtgaacaaaaacaaatgaggaattgcaagaggttaatgaaggcagtgatggcaattgaattttattaatgaaagaatgaaagcaagaaatataattaggagcgacaaagaagcatctactttctgataacccaccatgagcttactttggagttaaacatacttaacttggggtaatctcaagatggaaaatcttctggggagtcatctcagaaagcgtaggagtaaggacaaagtatacgctagaaagattcatattaggatgcagaattagcagtcgttccagagattatcatgaggaatggatgtgttaataagtagatattgacaaggtattgagaggagtatatagtagtggatggaaataagaagtactctaattgaatatctatcagaaatgaatacttaacttattattaagctaagtgagtaggtcagcttaggaggtcccatataaggaatggaaagagataattatgaattaggtattgtggaatcttatgatatcgactgaatagtaatggtaggagatagtgagttaatatgttgtctataagtaggggtgttcattggatcacatccaatgtttttaggcctatccagatccgatccaatcatatattggatgttagattttaccatccgatccgatccaattaatttcatcatccaatcgatccaacatccattggatgttggattggatcggttctatccattg

SEQ ID NO: 386061 - DNA, 536 bp, Cannabis indica
tggtaattaaaaataacaatatggtaaaattttatggaaacatgatgatataattaaagggtgaagcaagattaaacaactaacaacttattcaaacttattaaggaggagggttcgtgataaactgatggtgatgcatggtatgtaatatatttcttttaaaatccaaacaattttttagtccacatgagaatcgcattgctcaatatcttgtggttaaaggaccacagaccaaatattaagccactcttagacattttatttggacttaaattaacttttattggtttaataaaagggaatttacaatattactgtataatgtgaaaacatttacaaaaatattctttttttacattttttactgtactaactttacaaaaatattgtgtttgaggtttaaaaattagaaaaatactatgtgttgacctcatttttagccaacgacaatgagtcttaataataagaaataaaggatatgattcagatataatatgaaacgataaataaagaacacaaggtttttaaagaggttc

SEQ ID NO: 386062 - DNA, 1503 bp, Cannabis indica
tcaagtgttataatgattttccaatccccctatcacatttgtagaaatgagtatatataggctctaatgccctaggatacaattagtggtcctaagggacaagatgacatccataagatggacattgcaggtggaggcctcatgccttctacctttgtctggtgtcaggtagtctcggattgaagggtagtggctgtgtgcactcttggttgggatgtcagcacttacaggtgtggtgcctccactacttgtacattctcgccttcagaacttgcagagggcatggttgtacatatctcacatgcacgccttgtccttgtgattgtactcttgttaccttcatttcccttacttaggaaaacttctttaagtatagttatgttgttgtggaagtagcatgttgagtggcaagcatgaagtccatgccgagtaagtttcctcaacacttggtcaagtgaattttctctatgcttgactgaatgactctccaaggggtgtggccgagtcaccctcaagaggtatggccgagtgaccttcatgaggtatggcccaaggcttctttgttgtgtgggtcttactcgccttgcacctattttgtgttttgagcataactttctcaatattaatctgatttggatgattcatgttgccatagaaagctgagaaagatttctacaaagctgagatgttcttgggcgagtgacattttattgtcttggccgagtgacttcttggaaaccttggccaagtgaattccttgaagccttgtacccctttcgtattttgagcataactccatcaatactaatctgatttggatgattcaagttgctaaagaaatttgaggaagagatctacaaagttgagatgtcattggccgagtgacttattggaaaccttggccgattgacttccttaaagccttgtaccccttctatattttgagcataactccatcaatactaatccaatttggatgattcaagttgctatataaatctgagaaagagatctacaaagctgagatgtccttggctgagtgactacttggaatccttggctgagtgactttcttgaagatttgtagactttccgtatttttagtcataactcaatcaatactaatatgatttgggtgattcaagttgctatagaaagctgggaaagagatctacaaaactgagatgtccttctccgagttacgttttattgtcttggctgagtgacttcttcaaaaccttggtcgagtgacttccttaaagccttgtcgtatgcttgaccatgtgggccaacaccatgtgatcatgaaccgtgcagtggccttcctcattactctgaattagccatctcgtgactaatacttaaagctggcctcttttatcttttgagttatcctttgactaatctcgagaattagccttgttaatttttgggattaacacatgcctccgtagtctgtgtgacagtcagtagtcccgtgatccgtaaggggaaacaccgggt

SEQ ID NO: 386063 - DNA, 1783 bp, Cannabis indica
ctcaaaattttggcaaagtctcctgcgaggcatgggtaccaaactgaagttcagtataggtttccatcctcagactgatggataatctgagaggaaattcagatacttgaggatatgttacaggcaagtgtcatggattttgaaggctccttgagcaagtacctatcactaatagaattttcatacaacaacaactatcagagtactatagggatggctccctatgagatgttgtacggcgggaagtgtagatctccaattcactgggatgaaactagagaaaggaaataattagacccagaatcggtacaacagaccagtgaagctatagagaagatcaaggccagaatgcttgcctctcaaagtaggtaaaagagttatgcaggagatcatgtattgctacgagtatctctgatgaaggggattaaacaattttggaaaaaggtcaagttatgccctaggtttatagggcctttcaagattctcaaaaaggttggattggtagcttactgtctagccttgcctccaacaccttcagaagtccataacgtatttcatgtctctatgttacaaaaataagttttagatcccgctcatgtgttgagttatgaaaacctagaacttcagccgtttaagaccctatagggttttcttcaatttgtaaactgcatttttaggaatggtgcctttaggtttgtatctttgtggcaatttcatgtagatatcttcatgtaattcaccatggaagaatgcattgtttatatccatgtggtgtaggtgccactgtttgatggcagcaaggtcaaggagaagtttaagtgtgctgaacttggtcacgggggcatatgtttcaaagtagtaaacaccttgttgttgagtgtagcttttggctactaatcgagctttgcatcttttgactgaaccattagggttatattttattctatagacccatttatagctaatggtgtgttggcctggaggaagtggaacaactttccaagtttcattggcttcaagagcatcaatttttgtatccatggcattattccatacttcttctttgcaagctcgtgcagaggaagtaggttaaaaaaacttgtgatagcaagagcagttgctctaaatttggcataattttttataagagaggaattttattatggggtgaggtgtggtggatgtggcacagctgtaatcttgcagataggcaggtttgtttatttttctacttgatttggttgttggacagttgtctgctgattgtggttcaattggttgaattggtgcttgtgtgatggtttgatcatgagcatgagtataatcaatagtattggtctgagtttgaaaaaaattaaatgttaggattatgagtactggtttttaaggggtaaatggagtcatgaaagactacatctatttattgaaacatgtatgtaacaccctacaaagttagctatgttatcatgattttatattaattgtggaatccattgctaatcaattggtttattgaaaatcgtgatttattaaaacttttcttgaatacttttaaatattaaagtagataacatatatataaccgagatccggtattaaaaatatttaaaatcgaggcacaaaatatttgacacaaaaatttttgcctagcgactacacaatatacagcctgctgtcccaaagatcgtatgctttaggtctaatcgccccgacatatacaatcttcatctgctcgcactcacggcttgtaacaccctaactagcataggcgtattacgtgatt

SEQ ID NO: 386064 - DNA, 713 bp, Cannabis indica
aaccatttgcatccaacaagcttttgtccctcaggtttgttgaccactatccatgtcttatttttcttaagtgacagcatttcatcatcaatggctttgttccatttcttgctttccttgcaagttatagcttcttgaaatgtttctggttcagagttaactaactcttcagcagcagctagagcaaatgctgtgaaatcagcaaaaccaaatctaacaggtgccttgtgcactctccttcccctatctctagtgagctgatagtcatcagtttcaatacctgtttctgcactagtaggatcatcttcatgaacctgatcagccccattctctgtctgatctgcagtgtcaggttccatctcaacctcaacaggtttgacactagagttctcatctggttttggttcatccttagatttcatagccatttcttcctctctgaagataacatctctactcaaaagacatttcttgtggcctggttctaagcaccacagcttgtaacctttcactccttcagggtaaccaaggaataagcatttcagagccctaggttggagtttgtcttgtctaatgtgggcatatgcagtgcatccaaacaccctaaggtgatcatagctaggttggtgtccagtccatttttcttgtggggttttgaaaccaatagcagcagaggggcatctattaattaagtaactagcagtcttaacagc

SEQ ID NO: 386065 - DNA, 1308 bp, Cannabis indica
tttcacatattttatattttcctctaattgcgttgttttatctgtgcataaatgtcttagaagatgattcaggcattgaggaaaagagtaggagacaactcgagcttgtatcctctagctaagaggtttaagggtggtgagactccgtccaaggagaaggcgccagttgacaaggtcattggccttttcgaggagcgacctgcggtggacctcctagctcacaagttctcaaagtccaagagttccagaggagggagcttaggcggatctaaacaagttagggatggatctgaaaaaattagggtcggatccgaacaagttagggcccctttgacaatcctggcgctgtgcacggaggctaggagagacaaagacatgctttaacactaccttacccggtcacttcctgaagtgatctaccagctgtccggagcggacaacgagttatccttggaagttactcgggtcaaattccttctttttaatttcattctattttggatagctcaaattttaacacattttccatgcaggcctgtgtgaaaatggcttatgcttactctcgagccaaatcagctgctgtgaagaaccttgccaccaccagcatgatacagaggtatgtggacttggccaagaaggaaactaaggatatgtggaaccagctcaaggccgtgaggaaagaacttgggaaggtaaacaagaagcttcttgctgccaacatcgaagttgattagctgactaaagagttgcaagatatgcctttgaccgaggaactggaggctgacaatgtttctctatccccaagaggtcaatcatctcaaggatgagtgggagagtctccgtactcttcttaaaactggaggaggatgttaagaacaaagaccggggaacttgtgaaggaggtcggagataagatgtccagggtggaggagctgaagaggaggtggacgtcctagagacagctgcccttgagacgaccatagaaaaccacgaggcaaccacctctacaactcccactgaccagaacaccgaagttcctgcagtccaaaccgacgatcctgcagctccttcaaacaaaattgatccctatcgagagcttgggattcctactatctgaatgtctttcttctctttttatatgtctattcggtctatatgccttctgttgtactcgaaattcagctagcactttagaggaggacacgtgagtagtacaagacaaggcatcaacctggttatgcatgaagagacatagacgagagatgatgactggtaagacacctaccgtataatacacattatacaaac

SEQ ID NO: 386066 - DNA, 2434 bp, Cannabis indica
caaaaattgagtcgtgtcatgttagttataagaaaataatatggatatgccataaaaaacaatatgagcattgctatgagatacttatagtgtctaacaatacgatgaagtataacttataattagttatcaatttctataatatttattacattaaaacaattggaccccggtattgagttacaccaataacaatcttatagatgccttttagtatttttaaaaaaataatggatcatgttatgtcatattatgatgtgtcaataattttataggttaagcccggtacggcccacaagctcaataattcgtgctgtgttcagattcatgttgtactttatttgggttggccttttttttttttttaaaaaaaaaaaaattaagcccagactattttcttaaacaagctctaatttaagttccataatttttcatttcttttacaattgacaagttaattactaaaacatatgtgtattttgtagttttaattacttgtacatctttatagacacaatcatataactgataattattagaatttgaatactactaccaacttaaatatttattcaataatgcaattgataaataaatatatcattattattattattattattattattattattaaattatcatactttttaatgtgtcgtgcattcggatttatcgtgtcatatcatgcctaaattcatatttttcaagtcgtgtcgtgtcaatttgcaacaccgtatcgtgttgtgcctaagcacatagttttttttttgtgtcgaatcgtgctcatgcctctcatactgattttgtgttgtgtcaaaaaatctgacccatatttacaacactattttacactgccttatttgtcaactttaccagaaagtaactcatgaaagcttttaataagaaaaaaataagttgtttacaccaaaagtaaccttaataacgtggacatcaatgtttgacatgtggcaagaaagataacatttcagagttgagtagtctcgaatcatagcaagtcggcctgagaggggtccctagccctacgcctaggttgacttcgggaactccagaatggaagttcagatttcaataatttaaatccaactcactatcttttagtattttgaaccatgaagatatggagcaatcatatccaggtcccaagagttgaaattacatgaacttacaccccagaagccaacctcggcacctagggtttcacccagcgcccaagttgacattcccaactagggtttcagtttctgggaccgtcttagtgtaaatgggtcaaaatttgcattgggataactagacataccactaacatgtttgaggcatcaaaatcatattcagagtaagtttatttttgagcacccggtgctccggcaccccatcgcccaagttgataatttgccaatctaggcgccttccaagtattagattgacaattcgaattttgcattatcttcgtcttcatcaaaaatggggagataggcactttcggggaagaacaacacttcatgggtgccaaaagtaaggcccaacccccaggttgacatatcttctttgttttcaggaaagattaagattcaactatttttggggactaaatggaacttacgaagggacagaaatgggacccaacgcccaggttgacatattgtcaacttgagccatttccaatcaagttctcaaaaaagtattctgggaattttctgtcatcacaaataatgaagattcaagcaaacgcgggaagaaaactataaacttgagccccttgaaatagggacgagcacccaggttgactaggtgttgggcttagcgcccaggttgacaatcaacctggtgtgctgctttcaatttctcaaatgtcaaatctaattcgatcattgaatttgaaatggtcaaaaatagggtaggagaccttgtcctcaagtttaagaactttggaagtatcaaaacaacaactcgcgaactcaaaaatggggtgcccagcgctcaagttgacaaatggccttactgcgctgggtcctgcttatccaattctgattctgttttcactgtccatctagtttttcacaataactaatatctatgaagtcggagaagtcaaattcaaatctttgcatttctcatttctaacatgggaaactcactcaaaaataaagagattcatgtctctcattttcgcagaacagcaacatctccgagaattggtgacaagctttgctagaacatagaagtagtctaagtgatgttaaaatatcacttaggcatcttaaattacattctttagacaattttgcacttacccagtgtctatgatgacgtcatatgttgattggttagttttaggtacatttataaagtgttttagaggtatgtttcaattgattatatttattttgtgcataattacgcttgttttcta

SEQ ID NO: 386067 - DNA, 949 bp, Cannabis indica
aatcaaataattttatcttaattttaccaaaatttcgacaacataacagctataatagaacattcctatgagacatttaaagctattaataaaaacaaaaaacaatcttaaataagataaaataagcaatgatgacttagatgatttctaatcattattctcatttgccattaatattttaattcgagttttatgaatcaagtatgttctaggataatagaatttatgattccagttctaaaaatatagtatactaaattactaactagtaactaattatgttatactaagttactaatgttttggtcgtaactcttttaatattatttagaataggatgattcaagatgttttggaaagctgaaagagagatctagaacttttattcacaatattttccctcaaagtaaacacatcataatcaaaaattcgttcgaagcttcaaacttaattttcaatcacaaataaagcgtgttgagtatccaaaactttaaatcactatttatatcaattcataatattaatctcatttaatatgtttcttctcattttcaattcacattatgaattttaccattcaaacttgaaataaatataaaacaaccataattatacacaaaatgaatataatcaattaaaatacacctctaaaatactttataaaatacacctaaaactagcctatccaaattccccaaacttagcctttactcaccatcgagtaaatatcgacactaaagataaacgaacacaaaacaatccttacttcaatttacactaccgatactcacaagattcaattgttataagactagatttctaatttgattgctctcaatactaactttagcactcaaacttaaaaaggaaaatataactcgcaaatgtctaaacggttagaaattaatatacatgctcaaaatcaatccaacatattcacaaattgatt

SEQ ID NO: 386068 - DNA, 1652 bp, Cannabis indica
acaggacataacataccttcatagcagggtatcatcaacctcccatttgaaaactcgttttgggctccttccatctttgaagagtctgttgaacagagcttcgtccaaatacttagttaaacgcttcgtcacgctcctgctacgcctgaatagttgaaccgccatttctcttcatccccagttctacttcttctccaaaattaggggtttcgatctctgtgtgtgatgaaatcgatcaattcaaacccctgctgctgccttcgaaaggggacgaagacaaacgtggtggaactggaaacgaactgtttccgggtctccaaattgggcttgcgtatgggctgggcaatacagatcttttcataaactgggcctccaagactgaaaactgggcctgttaaatatgcgcctacttccaacctaaataagcaaaatattgtgacagaagaaattcatggttatggttttccttttttattgctggagatatatgaatattgaatactcatttatacgattgccataaatgtagcaaaagtagaatttagggatatttgtgaccaacttgttataaatttttgtaagtagtacgacagaaattgataaaccaaagaaaggattagatttatctaattagttattattatgctttgtgattagattagttaaagaatattctagactattttctatactttagacaattgtccacttggagttggagtactacatatatgtctacaattattgcattagtccttttcttcttctttcactatcaattactctattgcgtaatatttgtcacaaataaaaataatatttgttacaaatatgaaaagtaataagggtagatatatactattatagggaagttgtcctaatcaaaagattgtggaattggctatcttccattatattgtctgttactgctcatgtgaatgtgaacccgaactatctagatcatcttataccttctttgctttttcttcattcattcacacgcatttctccatcacgttctaaacattcttaattaaaattcttctcttttcttttctaatgaaattcttatattattgttaatttataattacaaccttaattaatttatgctccaccttacaacataaatatatttaattagttggtagatagaatataatataagaactaataagaggtttgggtcgtataataataataataataataatatgatcatatcactatttgcaagtggtcggtagttgattctgggccatgtgaagagtgacccgatggatctgaaaaagtgaatgggtccaaaacttttttaattttagtaatcaaccacatttcggaaacatctacctacaccatcaattattattattgttgttttttattaccacgttattcaccacaaaaatagtttaattgctgtattgcaattattggcctctaaaattgtacttcactacccctttcaaaaaaaaaatactttattaacatttagaaaagggattatttcacaaatacacaaaaacaacaaaaaaattaacaaaaataacagtttcacagaattttaaacatttttattgatttttttgattttattttacagaaaaaacggtcattttatgttgtactcttgttaatttattgttattttt

SEQ ID NO: 386069 - DNA, 1076 bp, Cannabis indica
atatatatagatattttccttctaacattttgcgaaatcttaaaaacattttagttatgtggtcatagttgcaatgcaaaagttaatttaacaattccaagtacccacactaataataaaaactaaaatggtcagggctagatttgagcacaccagcttaaagctcacccagctcatgagctgaaaaaaaaaaatcattctaataatacacatattttattagtaatttttgaaatataggacccaataaattttttcgctgtctacggtctagttaatttcaagatcagccctaaaaaaaggtaaagccatccgttttaattgatgtttatactttttccgtcaattcttaaaactaaatatgccatcgacatattgtatgatttcgatagcgtcagttctcaactatcggtatctaaaactctagacaatttaaaattgatgccactactacaaatatatcatatatctttactgtttttatggaaaaaaataaaaatagaagatacacatagatttaggcccatttcgccgaactattgatggaagagctatatcttcggttataatgaaataaccaaagatataggtatccacgtggacacatacatcttcagttatttcaagataatcgaaaagatatattttataaaaccatcttcgctgaaacaaacagtttattttccctatatctctcttaaagcgatgagtgaaactctcgttggaccttgactaaaatgacgattctcaaccgtttttatactataaaaactatttttaggtttcaaagataaaaaattatgagggttttttgaaaccggtggtggactttgcagtgactttttggttcgattgacggtggttttgagtttttattgaggtattaatcaatcttacacttgttttgttaggtaccttgcattctttttttttttggttttttttttttggttttgtgatatatgtgtttgggacagtcggataaatgccaacagtgacggcggtggtgatagtttgctacgagttcaggtgagtgttgatcattggtgcattaagtgattggtatttttgttatt

SEQ ID NO: 386070 - DNA, 1948 bp, Cannabis indica
aataaaataaaataaaagatcaattctatctataaatatataaaaataaataataaaaaaatttgtccccaaaccccaaacccggaatacaaatcagtgaaaaagaagaaaagaaaaaaaatacccagaacccaaatgaagaaaagaaaagaaaagaattttggtatataaagccagaagaaagagggtgatatatattttttctcctttcgcttctttcaaaaatcacatcaatgaaaaggccaaaaaaaaaaaatgacacactcgtgtgcttgagatggttctgttgataataataataatagtaataatattcttgttcttctggctttctcgtcctctataacttgttctcgttgttgttgttgttgttgctgttttttaaggctacaactgccactttttcacagccagagcaacaaccaaaactcctcctcagattcctcaacaacgatacccgtaacgagaaaatcattactgtttaaagggtggaaagagaataaaaagagaaagagaaagagagagagagaaagaaaccatcacccttataataataatatcatatacacaactaatatcaataataataaaccaaaaaccagataatattattattatgagaaaaggaaaataaaaaaaaaagaggagaagacaaaaaagctgctagtgggcacccacgacgacaatagtaggctcaatcttgtccaataaaaactcaaagactaagagagaagagaccaacctttctttttattattattatttttaaattttttttcttccctttgctgtaatcagcactactttctttctggctctgctatatacacacacataatttttacaattatatacatttgtgggaggtgggtctgatgcataaacatctgcttcgctgtattcaaccttacattttatataaaaaataaataaataaaaaaatctctctaatgccctcgtcttaatattgctgagctccgtttatggcatttggtgggggctctgaaatcatataacctttggcttggaactctctctctctctaaactctgttcaaaaataaaaaataaaaaactgcagctgtattcttaaccggaaaaggaataagtaaaaatacagaattggtggttatgtttggtgggccagaactttctggcacaaccttctaaattcccttttaaattttttttggcgtagtcctaataaataattaatttggataaccattatgggctcttcttaattaaggtaggttgaaaaaacccaaagtacccttcattgcatggctaattttctttcatatattatatattttcttgcattagaaaaagcagttgggggcaattatatagtcagtagtactccgtagtattattaggcatcatgttagtagttgaaatctaaagctggctggttattaatatggtagaaaatacgtacagccttgaaagagatttaatatactcttaaaaaatgtcatataaaccatctccatcatgaggatcacatttcattaaaagttgatcaggactcctatatatattaatttcatttatctttcgttttacaatgcttaaaacatatatatatatatgatgagacagtagtaatttgtacatacatatatagtactcaagcattgttgttttcttcaatctaaaacaatcataacatatatgacctacttaaacttaaatgatcgctatgcactcaccagtagttggtgtaggtggtaaaatttgaaactatatagctataacttttgatgaagaagaactactcagtactcatcaattaatttatttatagggaaactacacgaacttagagagaagaaagggtacaattgtctttccaaaagaagtaaatggcatcccattggctgttgtagaatttggttgagataataatataataatataataaaaatgtagacataatgagttcg

SEQ ID NO: 386071 - DNA, 1378 bp, Cannabis indica
ccccttctccattgcccaaaaaagcatccaaaatgggtgttaaatctgtaacaaataaatccaaagacaaacgccgagttgtagaagacaatgactcaaactttgctctgcccattgtgaacgcgatcgtggacctgggaagaaaaaatctaaagtttctattcctcaacatatttctccctctgagaatagaaaaaggaaggttgaaggtgatcatggttcggaggtttgtttatagtttttttttcatttttccgcaacattaaaattttgtgtatttattttgtgggttgtctatattcttttaatttcagtttagggtttagatttgtgtagttatttgatttttatgttttgttcttttgttagttttcattaactgtaatcattttgttccttgaaattagtttttattgggttattatttctaattttttgttatattttttatgatttttctgtgatttatgcttttatatgttttattgtcgctattaggcttgtttctaaactgtgttgatggttttgcttttgatagtagtttgtttattatttttgatagtagtttgtttattatttttgtttctatctatagttttggtcactttttcttatagttgtttatcatttttttatgttgtctttaatttatattaatttgaatttatgtatgttcatgttgggattttatgctctaaataaaatctattttaatataatcagatttattaattaataagagatcaaaaatcaatttggtttacatgattactttcataattatatgtttagtgtataaattatattaaatttgaacatatatttattcatgattatagtgttgtctacacagtgaaaaataatcatgattatatgttttaaagttctaagtcccatgatttgtcagttcactggattttcactggcgtgataattggcgataaagtttatttacacattgatatgtggtatgtcctttccaaggtgttggcaaagtaagctagtatcatatgtatgtagtatacatcgggctggatcgatattgacattggataagatatcataaacttacctttatatctttctaagtcaatatcacttagttgatcttaggtcaatagatcttaatcctaagatggttaggtttgggcttaaatgtattattcatatttgttatcccaatttttgtactctgacgtggcatcacacgatggtgacacgtgaaatcaatcccgtgcatttgctcgcaagaaatatgccgaacagggcaccacatacattcgctcggacgaagccctctcaaccgagcagcgagcaatccgcggagcacgccaacacttaacaagtttagctttcacatcgtgagtcagcaaagaaa

SEQ ID NO: 386072 - DNA, 1359 bp, Cannabis indica
ttaccattgtaatagtagttttggaatttttcaatagccacagtactatcgcagtggatcaacacagttggtatcgatttctcccataaaggtatctcaactagcaatcttcttagcaaagctacttctttactagcagaggctagtgctatcatttcagacttcatgattgattgtactaaaatagtctgtttctttgacttccaagaaacaacgccaccagctatacttagaatatagccacttgttgctttggagtcatctgacaaagtgttcattacaaggaaaaactattttgtcagcaactaagctcaccggcaaaactaagagttactcgccgacatagttttatcggtgacatttggcgccggcaaaagatgccgataatgattcgtcggcatattagcttttgctagcgactttaatagatgtttcgacaaaagtatttacacaagagaattaagttgtcggcataagttcatcgccgaaaatttggtgttagctgagttgtccttgtcgacgttctgccggcgagttaatgcgttggcaaaactttggcacgaatttcgcgcctattcttcatttttccgccaaagttttgccggtgcattaacttgttgacaaaatatttaatattaaaattatttatctttgccgacaagttaatgtgtgccaacaaaagtatatatatttttttaatattttaatatttataatatatataattaaaatcatagtaaataaatataatatcaaatatattattgttgacgcagtttttcgtcaacagatctaagaagatcgtaaaacgagcaagatgaacacaagaaatagttaatcaaagtaaatcggtttgcaaaagtaaattcacaaaagataacacaagaattttataatggttcaccccctttcaacagtaataggctagtccacttggagtgttattagtctcaatgcttgtggagagttctccagagttatgttctctaagagtttactcgtcaagtgagtttttagaattttagagtggaagctcaggagaatgattttgtgagtatcgagttcagtatcccttttacaagtaattgcacctcccttatatagattattatctaggatctaaaattccttattcataggtgcaccttcccgtaactatagttgggttaggcttaagatacaaaataataataaaataatcattaaaaaataaatgtaatggccgctttaataatttggattagtaaaggcaattagcactaatttctgttaattttataattatttatgaattaatttatttgtggaccccaatattagaaatgagtattagagttataatttctcaatttcggagat

SEQ ID NO: 386073 - DNA, 718 bp, Cannabis indica
gctcatgcaactaactaataactattcactaaactttatgactaaaccctaataaaaaatcagaaaatctaggcttttctcattaattaattaattagttgtctgcattgtcatgtcttattctcaagtttttaaatatgtataagctttactgtttcatagattttgacattttaaccaaaaataaaaataaaaatgccatagcattgcactacatggcatcatgttcttatttccaattcaatccttagggaggaatatttataggataaaaaattaatatttgtccctatggattaggtcgaagacttatgtaacacttaataaaataatttgtgtgatataggaacatattttattgtttaaaaataaacaactgttttaaaatttattttttgtcatataccagtcaacttaatattacatctatgttataaaacttaaatttcaactaactattatgtcgaaaaaaaaaagacaaataagatttcctcccccggcccaacaaaaactattgcctttgttgagttatgtcattcaaatttttggttcattttttaatatacttgataatataatgaaacttaaagataaatttcaaaaatatatatctttatttttagaattaatgtttatttatgtatggtttgtttggtataacgtattacatcgtattgtatagtattatattaaattgtatttcatgtaatatttttat

SEQ ID NO: 386074 - DNA, 816 bp, Cannabis indica
aaaattaaacgtaaaaatgtaatgtttttacaaaaaatggaacaagtgagactaatctcaaattaatgtaaagttacattaagtttgtgtataatttataggaagattatttacacatttttttttatgaacattattattagtgtctaacactttttataagtagtgttttacgattagttagtgatattttctaagttatatgagatttaatacataattacactaataacagtataacaccgagatacataattacgattaggtaatgttttacgattagttagtgatattttctaagttatacgagattcaatacatattttctaagcactaatactgcatttctctttctttatattctcaactgaagtctcaacctatcatgtcattaattccttaggtttcagatgttgagtacagtatcaattgtgaaacgcgcattggttgttgaatggcttttattatttctgtaaattaatttattgtctatctgctttttgcatgtccacgccaccattttccttttctttttcttttgaaaaatgaccaaaatttctaaattgtttggatgatgaactgaactaatatatgcaagagtatcatgttatatatatgcaagtttgctcataattcataaagtatagctagtggttaactgatccaatctaattacaatcgaccaatttaattataattaattgtcaaatatttgatatctaattatgattagattagtttgaatattatttttgaatattcaattgaatcatgttggtttgtattggagaatattgtcccacatagattaaatgt

SEQ ID NO: 386075 - DNA, 2053 bp, Cannabis indica
actcctaggcaatggagcgaatctcgttgacacaataaatggggttgtgggacaaactactgtcactccccttaacctgtttatgaaaactgccggtcatgccgaagaaacttcaacaccagcggccaccataggacacttctcgcctatcacaccatccttggtgtctaaagaaattatccaattaagtacggcccagtatacagccttgcaagagaaaatgcggaccttgcaggccgaagtttatggacgagtcaggactcgacgtccacctcgagttcctaacacgcgttcaaacaatccccaagtaacaactactaggcggcaaactgaacatattaataacaatcatgttcgcagggaacaagaaaatgagtaggaaggtctcgacttgaaccagcctactcataattctgtgcgtaacagagaaccggtcactcgtaccaccaatcgcgttagagaggaggtatcgcaggaagaatatcctaagtgtcgtaacccgcgaagctgagctcaactgcgaattgaggtaaatgatgtcgagtctcactcttcttccactaacaatggctctccaagtgtttatactaggtcaggatttgtcgaggcgcgacatggaggaagatatcatgttcatagaggtgatctgcgtgatcatctcaatgaaattttcagggagcgatcccgaacaccaaggcataataataataacgagcctcttgatcctcggatgggtgatcaaggcatgcaaaacataaacaacccgacttatatagtcaacccgcctaacgcaccggctgtaacaactaaagtagtagtcccagccaacaaagctttgttgctgccatacgaacggtagcataagccaatcctgttctaccaggagggatagaccaatagagcctcctacgtgcattgaagatgatcgagcaatagagaaagctgatttacaaactccatgggacctcgtcttttattgaggaagtgtgacaagcttgactctcgaaaggcttcaggctctccgagtcgcttaaatacaaaggtactactaatcccatagattatttagataaattgaacacaattatggaagtagaccagataccgtagctagcagagtgtcgtatactcatggaaaccttggaggaaaatgctcacgattagttcagccaactaccctaagcctccatatcaacctgggagaccttcgtggatttgttcttaacgcagtttcaagccacgatgacgtacaaactgccgtacacaacgttgtcaaatattaaaaaggaaggcggtgagtctttataagattattttaaatgttttaatgctaaaataaccaaagtggagaaggcccccaagtctttgttggtttgcatgttaattacaggagtcttgtcgagaactggcttcaagaaggagttgcaagcgcaaagaccggagtcattggtggaattccttgcaatggtgagccgacagaattgagaactcttaggctgagttagaaagaggaaaggaaaagcgcgagtcacatgtgccacgatcgcgctctcgaagcccgaaaggaaagaatcgagaggacgaagcccaaggagacgcagctcacaaaggtgacgaagtctaaaacatgccaaatccccttctctgaaaagaaaaggaggtcctcgttttgtcaactacacagaaataaaattcattgttatcacatctacgcgattcaggaacaaaatagcgtatttagaaagcctccaccaatcataggaaatcataacaagagggatccaaagaagttcagcaaatatcacaaggatatcggccatacaactctaaagtgttggttccttcaggatgaaatccaggaattaatcagacaagtgaagtttagcaaatataaaaagaacagagaaaatcatccccaagcggatgaaagtgacactacaaataatgtgagtggctcttgagctcatcgcaatatcctgaccattattggaggcccatatatttgtggagattctaggaaggcagaagaaagctatgttggaaattattttac

SEQ ID NO: 386076 - DNA, 1218 bp, Cannabis indica
aaaaaaaaatcatgtatgtatatacatacaatatgtataaaataaaaaatatatattataaaaatatattttagaatattttaataaattgcctatttttttgtcgtgaaacaaattgtatattttcaattaaaaatcatcttacaagaatcttataaaaactgttctaaatttgacacaaaataaaatatatatatttaatttttattttactaattatattataatgattaaaagttgtttaactttttatatatttgtaatttaatatattcttgatatacttttaataaatattaaataatatttgttgcgactgcactattggatcagttattttaaaaatatatctaaccacgatttttatattattaatattgaactcctccatatttaattatttcattaattgtaatataacatgtatttttgtgataatggataattttttaaaaatgtgtatatatttaattactaatgttacactttataattagctagcaattttacttcttacttataattaataaattaaaatatttactcctaatttcagccaaatttgaggacttatgaaaaaggtgatgcgactaacctcggcaatgtgctcagtagcagccatggcagctagagctttagcattaacgaatctccattgaagcagcccattatgcaaaatcctaaaccgatgaaagtcctcctcttgaacccgcgaaaccttcttatgcctaataaaatacttcaaaactccaccactactactactactcgacttattattagccttcaccttcaccgaacccgaacaggatttcggtggcgctgccgccactgcaaacggaagagaccgagccggcgaaagcgcccacgccgaagacgaacccgggaccggtttattattaggggcctttgttgcaccaccaaagaacttggtgaaagaagttgatgattgatcttgagctggttgtttcttttgcacgtgtgaattagtagaatttttgtagtaattgtaattattattattaggtggccttgttgttgttgtggatttggaacgattggtagtagtagtagtagtagtagtgttggggctagttatggaggaactcccgctacgggttcggacaaggcgtggtgaaggtgaggatggtgcacttgtacatggatgccgccgatagtatgatgatgtctccatcatatatgatttattattaattg

SEQ ID NO: 386077 - DNA, 2517 bp, Cannabis indica
ttttggttaagtgtcaaacaaagggataaacttaatctcttaattactaattaactataaaagaataaccaacaaatcaaaaacttactaaggacaaagttaggggaaaaagataattctacccttgcttaaacatgaaataaccaacatgcttaggggtaaaatggtcttaaactataactccaaaaattcccaaaattcaaatgtctatataaattgcccccactattctagggtattaatccatactaaggtgactctataggccatacatcggattctactattactggacataaaaatataaaaaccataaaattcatatatatcataattactaaacttggaattcaaatatatctttataatcctaaaaatcataattaaaagtctaatttcgaaaataaaccttaattatctgctaattctcaaaataaagctaagtgatcattacaattatccccccattaaaaggattttgtccttgaaatctaatgtgaataactccgaataatgagccctcatatcaaacttcaactcccaggtggcttcctggccaccttgctatttctctagagtatattgaccaaagtaatggtcttgttccgaaggactttatcctttctatcaatgatctgcactggttgctcctcgtatgataaatctgattagagctctaggattttatagctcaaaacatgtgttgggtctgaaacttattttcttaacagagaaatgtgaaatatgttatgcactactgagaaggttggaggtaaggctagatggtaagctaccaatccaactttctcaagaatctcgaaaggccctataaatctagggtttaacttgtcctttttcttgaaacatttaattcccttcattagagatactcataggaagacaagatctcctacctaaaactcaacatttctacatttcgaatctgcataactctttcgcctactgtgagaggcaagcatcctgccatacaacatttcatagggagccatccctatagtgctttggttactattattgtatgaaaactctatgagtggcaaataattactccaggagctttcaaaatccatcacacaggctcacagcatatcgtctaatatctgaattgtcctctcggactgaccatctgtctggggatggatagctgtactgaattttagctttgtacccatggctggctgaagactttcctaaaactttgaatcaaatccctttccaatatgatggacttttgagccccatgcaatcttactatttccttcacataaagttctacatactggtccagtgtatacattattttcacagataagaaatgttccaacttggtaaactgatccacaaccacccatgttgaatcaaacatacatgtggtttaggtagtccaaccataaaatccatggtgacatcctctcatttccattcaggaagagtcaaaggctacaacaactttgtagttctttgatgcacaagcttgatctgctaacaagtgaggcgctgagagacatactccaccacatcctttttcatactgcacaaccagtagggttttaagtcttaaaaattttttgtgctaccaggatgtaatgaatagggtgtagtatgagcttcctcgagaatttcttttctaaattctacactactcggaatacaaacttgagttttataaagtaacattccattatttgacactgtaaaatccttagcttcaccaacttgaacttcttctcaggtcttaatcaactctggatctattaactaggcagctttaattttacctaacaaattcgattacaacatcaatttattaagcttgcgcacaacaaactcaatacccaatctaaccatgtcatctgccaaccgaggtgaaatcataatcatgttggatacttgcccaggacccttcctacttagggcatcgaccactacattggcctttccaagatgataaaggattttggaatcataatccttaaccgattccagccaccacctctatcccctatcatcagaaaacaccttagaccttatctgaatgcatcacaataagctataaatttctcctaatccgacagtagtgctagtactcgagttgtgataaatcgttgttttagctcttgaaaacttgcttcacacttgtgtgtccatataaattgctattttttttagttaattatattatgggcatttagattctggaaactccttcaacaaaccgaaggtaataaccagttaaacctagaatacttctgacttcagtgactgtctttggccttggtcaatacttgacgaattcaatctttcccagatcaaccttgatcccattcttactgacaatgtgtcctaagaatgacacttgagacaaccaaaattcatatttcttaaacatggcacagatcttgtgttctcatagtcgctgcaaaaccatccgtagatgttgcacatgctctgcttctggttgagagtacacaagaatatcatcgataaatactataa

SEQ ID NO: 386078 - DNA, 724 bp, Cannabis indica
atcaggaataaaatattaggaataactagtcgctcaaaataatcttgtggaacgaagtaggaggtttcctaggacgaaaaaagtcgctcctgatgacagtttttgttgtagtggtgtctatagaacatataaggacaaactctatgttttcggatccggatcattaagaatataccaagtaagtcttttcaagagctttttgttaatatatggatgtggtaatatttaagaatattgtatgttgaatattttctttctattgaacgttaagtataatgctataaagaataaagaattgatctctattaaggaggaccagttaagaataggcatgctaagatcacatgtgcacataagctctatgttacacatccatgattgatctatgtcatttaattatattgatttatgtgaccattgatgggttttctgacaagctaaatgtggtaaaaagccgctttgatcctatgttagtataatcaatggactagattgttttgaaatacctataattgtaatagtaaagttgaagcgcttataaactaatagaaaatatatgtagcctaagtgagcgattgttggatgaaaattgataatgtgggctcataagtatttgtgtgtatattgctaggcaaatttacaaaaatacttttatttggggtaacttttacaaaaatactgtcacacggaaaaatttaaaaaaatattgtgtttttataaaaca

SEQ ID NO: 386079 - DNA, 4205 bp, Cannabis indica
ataaaaaaaataaatagaagaactaaaaaagaccaaatattagctatctttttaataggtcggagactaatatgtaaagaaaaaggtgttaaggggacttaaatgcaaaaaggtgagttaggttacacatttttactacaaacaaatctttatttagcattgtttagtgtctacattatcacactaaacaagcaagttcacattaaatgttaagaaattaaatttatattgcttctctctattataatttatggtctattttaggggaaaaagaagaagaagaatattttgatggtgttttgtcttttgtgaatctttatacaaaatactcatttttcaaacaatagtctaaaagtgtaaaatgactcaatcttgtcaaactctaattggtttatataaatttatttattattactttaaaaatatttggtttgtgtatacactttaagataacatggtccccatttatcccacaaaaaaaaaaaaaaaaaaaaaaaaaacctaaatcaatttaagaagtattaaattacaataaaccattttcttttctttgcttttagtgctaatctcatcatctcacattctcacctacttaacttacttctaaacacaaacatacttaaataatgcataagaaatgcaaaaatatacccaaaaatatcaatattagttggaaaatattgataaccatccctaaaatatcaccacaaaatcttaataattaaacataatgatatcataatgtcctttttatttttgtatatatagaaaaatacaaaatttgttgtttcattatataatcaatctttttcataagtacaaaatatctccacaactatcttttcataattgtttattaaaaaaataattagttgctttaagttttgtacacttaattttttattttttttagctaatacacttttaagtttatttgtaatttaaactgttaattagatttcacttttaaatatcatttgagaatattgttgatgtgaatacttaaacttacaaaatccaaataaaaacatacatatattaatatacaatttaaatctaacaaacaaaaacaaaaataaacttaaaaagtattaatcaactaaaaaaaagtttttttcaattgaattctctcaattattaatctaattgtaattaaaaattattagtatatatatttttgtacactatatttatattagtacatatactatttattatttaaaaattattttaaaacttatgatatattttattttataatttttttaattttaaaataaattttaaaataaaaatattaagtactaatatatgtgagtaacaattaatttaaggctaattaagatttttgccggttgttaaaaatgctcttgaactattgagattgttggatttaaggactttttttcaaatttagtaaaaaagtctaacatggatgaaagttaagggtgcataattaatacatgtcaaagttcgagtggcatgatttggtaggtatcaaaatccggagagcatagtttagtacataaacaatcactaaaatagtaaaattgaatgaaattagacaaatccttaaattcaatcatctcaatagttcagagagaatttttaacaaccttaaagttcagggggcatgatttggtatatatcaaagttcaggagacaaaaatcctaattatttaaatttatttataatttagtaatttaaaaaattttacaattaaaatttaaacttaaaaaattaagtggctaaaacagttaaaaactcttaaaaataataagaaataaaaagattttaccaccaattacaaaatatatataaatatcatttcatatttttcatttcaatcaaaatttaattacataaattaactcaaaatactacactttttcaccactctctactaaatcttcccttacttctaaaatcttaaaaaaaaaaatcaaagactaatcatgattatcataacaataatcacaacaacccttttccttcattaattttttttttcaagaaaaaaaaaagccattttctaataataataacaaagcttaaacttagcttaactcatcatgaaccgttataacaaccctaccttcttcaccaccggaaacattttccggcaactcttttctttcattttccgacgaactttctcctccattttctggattttcaatttcatttctttccctaaccaaaaacgacgtcgtttgcttctgttccaaaagcgaatgacgacaattcggacaagaagaattcgaaaccaaccaagtatcaatacacctcacatgaaacccatgattacatttcggcaaaaccctaactttctcaccatcttcaaaatcccccaaacagatcggacattcactgctcggaatctccatcccagacccgtaaacagccacgggtaattgccggagtcggctttttttcaacccagttctcgcaagtctcgctgcagcttgctccggcgtttcggttaaccggttactacaacgaagaacacatcgaacgattgagttcagacccagagcacagatcaaagcgcagagcaaagcggctaagattattaccatgttggtgtcgaaattcgtttcgctgatgaaggaatctctggttctgtttccgttagtggttgttgttgccgttgccggcgacggaactgttagagctgcatcgagaatccggcgactcatggttggaaagattggattttgagagaatcccaatttgagaaaaggtgaattgtgatttgggtttgtttcttttgatgatgattttgtctcaatcaatcaaaatatcaactttttctttttttgccctaatgataagaagaagaagaggaagaagattaatagaattttctcacttgagaaaataaaaagaaaaaaaataaattaaaaatagatattttgagcaaattccatggatactaaatagtgttgttgttgttgttgttgacactttttttttggttgagaagatgagaaaattgaaaagtgtttaatgggtttgagggaaattatttgagtgagaagattgtagttattgagggagacatactagtatataggtgtatatatatatgtggaggtatatacactactaatagaagagtagatgtattttttaattaaaaaaattggtaaaagtattaccaagaaaattgttgtaaatctatacctaaatgtacacgtggtgtgtgaataatagaaaagccaaattaaatgctcttttgattactttattgttattgttttaaaaaaattaccacttggcaagctacactagtgcttttgttattagtgttattattttttcttttatatagtttacttgcgttagttagaagatcataaggataatttgaatttgttacttaagagtgggagacaactagattgaatttacttggatgatatggattaataaagttgtagttctttattatagaatagactaaattaatacacaatttctataagttattactattatgttgttttgagcttaacccaagtggtaaatgtaaatgtaatacaacttttttacttagaaagattggagcacatattgtatttataatgggtgatacaaaaatcaattttacaaataataatgaactttatttagaatgtatcatattattattggtataatttcactagttactcgtaaactgttaatttataattttaaatatcactaatacttaataataatgcccctatttgattagacatgttacagtgattttttaattactatacacgtctttgctaatcaaagagtttataaaaaaacatgataaattagaacatttttaatttaaattttataataaatacttatatttacataactataagattccgttaaaattttacaacaacttcaaaatatgttttctacaaaaagtgtcgcccaatgattacaaaatatgagcccatatcttctcgaaaactgaatatttcaggcttaactatcctgatatgtacaatcacccaagagctctagactcactactgcttagccctcatctttcctttacctacacatgaaaccatatttgtgagtcaataaactcagtaaaaaaagcataaaatacataaacataataccaggacctttttaaatattttggagaccctgttctaatttaaaatttgggcccctataaaaaatacaatttataaataat

SEQ ID NO: 386080 - DNA, 1304 bp, Cannabis indica
atttttatttattttttatttatattcttcttcctcttctattggaatgagttatttatttgtattcaatagtgagaaaatcttgtgtttgtggaaaaatgcagcaagtaatttaattaaattagtaacttttttttttataaaattgtcgtgctcagaaccttttaataaagtttgatcaagttgggcgatgaaaacttgtgtagatcgagttttgttattttgtctaatgatttgagttttgatacaattaaaatcaagttctgttaaagtaaatttttattaattaaataataaacttttttgttttagaattaattatataataataataagaataacaataaataacaaaagggttctttagcgagttttgaagttaaattttcatatatatagtcctatgaattcatcttattcagggttagaagattatatacagaacacaattaactgtttttcaaaaatggactataaatacaatgttctctattttctaaaggttggctgtcctttgtgcctcgagttttgtccctatttataggagtttaagatgacagttattctcttagggtctgatcattttcaaccgttcatgaaacgtgaatatttttcacgtttcatatttatgaacatgagataattatatataaccgtataactgctctttatctttatttataaacggttatgttgattgtgctttgttgatctcgtcattcaatcaatatttttcttaaacctctctgtagaataatgtctaagtgtatagttatagtatatctcactcttttttgttaatgttgattgaagtatatgcgagatatttacttcaacgcgtcaatagcaaggtgaataatgttgaagtcgtctttatccttttaacatactcacgagtatgtgggtcaatcagttgcaaaactcattatctacatattccaaataattttataatgtattttgtttatcctgagatggatttgttcactcgtggtctcatcagtcagtagttattatttgtgtctcgccattgcctatgtgatggggagttcgagtatttctattaactgcatttcttgaggcgagtcatctgaatgcatttattgatgcataatttgagctggttcatattccagctttgttacacgtgtcaacttcatattactgttcaaaatatgagtataacaaaatattgcccctaaaaggtatttttttaaaataaaaaggactttttaattgccttaagggtacagtcgtattttcctcgtttaaaaattacatgcttttattttggcagttcaaaa

SEQ ID NO: 386081 - DNA, 1727 bp, Cannabis indica
aacaaacagacaaagtattcacatagaacaaaaaataaaaaaggataagaaaagggaaaagaaggagtaatttgttttagaaaaaaaaataaaatttaaagcttgattgacagcactgcagtcacatgctttttccgacaatggtgttggtgtgatttgatccaaaatcatcaaacagaaactaagcccaacccagcccagcccatattagagtggctggctgtagagtaaaatcaaaacggcaacgtttcatccaatgcctttatgggttgcgtttgaggtttcttgaaaacgaaagataaacagacgtgcccgaaatgaaggcaaaacgttacgttgtgtgggggcacaccgtcttaacgtgggcacccatgacagcggttagttgcctagttggcgttgatgtccgtactcgcttgctgtcacacccaacccagctcaaaaaatagaaaataaaaaattattaatgaaattaattaaaaatgtgagaaatttatagtatcgtaaagtgttttgatatatgtttatttatttttaaataggtatttatgggagtatttttttcataattacatatgtcttaattttttaacatcacttgtaatttttttatatattaaataatttacaattccaaaataaaaattcaattaatttgagtacggtaaagtatttagaattttctaagaatactcacaataatttttctaaaatggagaatagttaaaatttttaaagaactatactaaaaatatactacaataaatgctctaaattcttttattttaaaacttttttaaacatatttgattaattatttaaattttaataattatttttgtatgatgatatgtgtatgttaatatgttaatattatatatttaaaattaaataaatatattaaaatttaaaaaagtgagattttggtgatatattttaaagaaacttatgtataatgtaagagcactcataagagtctctataatagagattttctaattcttttagctaaatatgattaaaaaaattacttatatcaactcctttaaatcatatatgtataatagagatacactaaagctaatgcaacttacatgtagagaacgaataatgcactctttaaacttattttaataatatctaataatattttatttatgtatatagtatatatgtttaaaatttattattttaatagtgtagaaaataaaaataatattaattcaatgatgtaggaaaaaacataaaaaaaattgatgtatgatataatataaaaatatagtataaaatagaaaaaatagagttttgattatgtattttaaataataaagtagagaggcaataaaattaaaaaaaaataaataaataacattttactaatgtattttaagtgatagtattgacaagttgttggaagtgctcctaccaaaaactaagatgtagatttgagatagcagtgtattgaaacttccaaatatatatgaaaaattctacaatatagtctcttaaattaggtacatgcacccttatttttttagttgtatatgttgtacttgtagttatttaaaatatttgataaaattttaaaaaatttggaaaaatttaacacgcaaaaaatagagtttagagagtatgttacacacgtgatatttttattttatacgaatgtgaaataaacagtaggtgccgtttggtaatacttttgttttttaattttttaattcaca

SEQ ID NO: 386082 - DNA, 990 bp, Cannabis indica
aactcatggtctcacaatcattgacttttgaccgaattggaacactccctcctccaagataagatctcgagtagcaacatcattgaatttgacaatggtaaatctcccattcattcgaacaatttatgctattgcgagttctccctatttgcgtttaatcaaaccttcaaacattgcaatcagatggttaactcctaacaccatacatactatagcagaatttcaatttgcggctttctctttaatctctaccacatcaacttgagctattctttttccatctttcaatataggtttagtataggccagattaagttctcagaaaaaagtcttaccttcaatgaatttcttccattattagttgagaattcgagtggaaatcctcatgctcaacctccttagtccaactatcctccatcagttcttgatcaattttaagcaaatcacctgatcacaaagctgtagcaatcaattctaatccttacgaaccaacattcacctcaaaaatcttcatatcttcttggattgaaggggcatctgcaagattcaatctggataaccggatttcgaataactctttttttttttaccatggaatagaataaagctgatcatgcaatgttaaaaaattttaattgttgatttttttttatataattttaatagatttttattttatatatttttttaaaatttgaactttttttttaccatgattttaaatttaaaagtgcaaaattaatgttgcattattctaaaaaaatattataacttcttaatttcttaatcatccatgaaaaatgactaattatgggacaagcttaagtgaaagaaaatcaccaaaaatttataaataaactaaaagtatataaaaaaaaggataatataaaataatgcttcacatgacatagtaataggtaataaacaatccctatactcaaaagaaataaataaataatggagcttttgttttttaattttttaatcaca

SEQ ID NO: 386083 - DNA, 834 bp, Cannabis indica
ctaccttactcaagctaggggtatgggtgatcgtctgacttccattctaacgaccatgatcacccttcatgattaacagtcacccaaacggtcatgactttacatattcttaattaattcagtcccggtattttcgtgccacgtgttgctactcttgacacgtcatcatctttaaaatttaggtaaacaactatattttttataatcaacatacatgttagtaaattaagattttgttaaaataagttccaacattatatacaacaaatccataaaaaatgaaatctataagagagccaccaaatccaagaagaccaagaagaacttgcaaaaaaaaaatatgggacagttgtgagatagatcgagaatcataaatccattgagagagagagagagagagagagaagatcggtacctttcatcgatggtggttgaatatttgacaaaatgaggaggagcgcacaatggaggggcctttgacgatcggtggagatatggatgaattgaggggcacatggtggaggtgccttcgacgattggttaggttgtcgattttttttctttgcaattgagctgtcgattgagagactgaagagagaggtgggattgaacataatattaggtttaggtggttaatattatctttatatatagtaggtatttaaagtattaattggactttaaaatgagcttttttattcttgtgtttgttataaacaaatgctatgttgcatcagtttataatcagcgcaaaagcttttactataaaaaattttacttttagttacaacaaaacttatgactaaaagtaaaaaagttgtgactaattatgaa

SEQ ID NO: 386084 - DNA, 1102 bp, Cannabis indica
attcttgggaaacacttaaacaagcattctataatcaattctctccatcaagcccaaagatttggtctgcatcaagaaacaagaagacaaacctctaaaagattacctacaacgattcttagaggcgaccacgcggacgaagatactcagtgaagcggccaaggtcatggaaatgactgctggactaactgttatgagtccattatggaaataattgaaactcaaatcattgcacgccatttaagagttgctagatagagctgatggtttcatcaagctcaaagaagccattatgaaggtcagatgagtttctcaaccagaagcaaccaattacactgcttacctatttcatgagtctctaatagacattgatcaggaaagggaagaagaatcaacactgaatgcttccactgaaacacactcctcttttgtttcccaagatgaacttgggcagggaaatagtgatgacgagtcccctactatttctcaagaagatctcaagcaggatagcattgacaaagaatctccccttacatcctaagacaacttgggacaagagcagtgatgaagattctccctctatttccaacaatgatcaagaacatggcagcaacaataaagatgtgtcctatgagtcttttaaagatattgaccaagaaagcaacactgaagactcccaatgagagagggagggaccttatatcatcactgaagcattagaacccatgacaaataagatggagccaactatgacttctacttaaatccaatttcggtaccagtgtacttgaataggaagtacctgagatgatattactaataaagtgactgttccctagacagttcacttcatagtgagattcactttaccttgtgcaagtgaatcgattgcctcttgagctgaaaagatacatcaaagccatctgcaagccaaggggtccatcgccaagttatggcccctatacttaaaccgagcatcagtgtaatggggatcaacttagcttctttgattaaattgtaaacctacaagtgttgttttaattttatccaaactagctagagttgcgcaacccccctcaacctatgtaattacaccaaaact

SEQ ID NO: 386085 - DNA, 709 bp, Cannabis indica
agaaaagttagaggcgttatcttccttcttcttgaacgtatagggtccatctgagtgttgtggatacacttctagagggtcgggcaaccccatctgctaggagtactattgtagctgatatcactgtgactgttgcgagacatacatctgaaacaaaatgactgtctaaacatagaatgatggcacaaaccaagcaaactatgaggaaggcctcgatatctgatcctcaccttgcctggctatttgctacagctggggtggagcaagccaagcctctgagcgaggatgaagtagttgttggaggggacattgaagtccaagatattgaggaccagtgtgaggttttccatgttagtccctccaaggtcgagggcgaggaagaagaagaagaggaggaagtttgggcgcttccttttggtggctacaatgaggctggagagtctatctttgaggagggagatgtcttagtagcaggtcgagattatgtttaggagaaatacacagaggctcgacctttaaacaatcgaagtctgaagggtgcttgatgggtctcaccaccattcgtgctaacttataagagattgactaatctcgatgagaaggtcaccttgggaagtggaggcatttctcctagtctcgaacagctcgcaacaaattctaaattttatcttttcacattattttttttcttaaatatgaataaattatt

SEQ ID NO: 386086 - DNA, 2585 bp, Cannabis indica
gccaactccttcttagcttgtttgtacttgctaactgaagactcatcacgccccaatttccaccattgcacttcacttttatacttctttatcatgtccttaaagtttctcataacctccttcccctaagaactcagtcgctgcccacaaaacttgatttttttcttgcacatcagttacatcacttcaatcccagctatctttgactatttggtcgcacagaggctctcaaagccacgcattctcaaaacaaaaccgagttactctcctttgcgtagcaatattaacgagttcaagcaatatgggagaatgatccgaagtcgaaagctcaaggttatataatttagcaaatgaaaaagcttgcagccaagaaagatttgccaaacatctatcgaatcgaacttcaacccaatgagaagtgcctctgcctctttcccatgtgaaaggataaccacacagctctatatcttgcaaacaactatcattcgtagcttgttgaaagcgttcaattaaaaatttaggatagcgttccctccccttttatctttgtgagagcaaatattgttcaaatctcccatgacgcaccaagacaagtttgaattagtagcgagcaaacgtaaaagattccaggtagcaatcctatggcttctatttggctctccatacagaccagtaaacctccatacaaccatgccttcaactgaaaccttcacgtcaatgttatttgttgagaaccccagcactaaaacttcatcttcttctttccatagaaatgaaattcctccgctcctctcatgaacatcgacaaccatcatcccatcatatcccaacaaaacacgaggaatacaattttgggttacttttgaatcacaatattcttaaggaattgaaaaacccatgggttcccaagcccatgacaattccattataatattttcataatggacgatgggcctggataccagaacccactagactcatattttttgaacccattgcaactttgttaatctcccgatcttcatcaaattcattcggcccatcagacaagcccgattccatccttcttctcttcgtgtccaccaccaacaaacaatcactatctttagcaatattctcaataaattcctgatcagtagcaacctccataaaatcagtctccacattaatagggatatcacgttgacccatgttatcttccacaataataggagatttcaaaaaaccaactgtacccgcaccagcaccgactaactgtgaccgtcgaacctcactggcggtcatgtttacaggagcagtaggtacctcctccatagccaccatgaattatttcaaccatttttctcctatggtgtgattcttacgcataggccacactctcatccattctccataaggcttgactatctttccctctgcagcatcaaactgacaagggcaaaacttatctgagtgccccattatcccacaaataaaatagaacgtaggtagatgctcatatttgaagttaacccagaactcaatcccatccgtattccgcagtgtcatccgcctcttcaatggcttggtcacatcaatagttactcggaaatgtaaatagtcttgccataatcccataaaatttctttcatttgattcgacaaacttcccaacataatttgctatatcttttacaatcgtagccgttttaaatctcgatcgaagatcatgcagttggacccacatgtcaacttcattcagcactatctatcgtggatcttccccccttttattaaaagtccaaagactacgatccatcatactttgaatatctagttcgtgatagaattaaaataagtatatgttagaatcaaattctttaacgaacatacacttcccagttgccaaagagaagccaacatatagtgcatcgcgtcgaaatctatggatctctcaatcaagaatctaccaacaatacaccaacaatcatcataatatcattactagtagtgacactcgcatcataggataatactaccgcatcctcttcctcaatgataactgtagccctatcctcttcatccatcctcttatttctgctagaagccatcacaaaacaaacgaaagacaagacttgcaatcttaaacaagaaccgacagaccgaacccaaaccaaaaaaccagaaacaatctcaaactagaaaacttatactattaaaccagaaaacaatggcaaaatcaagaacaatctcaactaaaaaacaagaaacaatctcagactagaaaataatcacaccatgtcacaaaagacaagacttgcagacggtggccgtcgttgattggcgacgccggccgatgacgtacaaacgtgaagcaagaggaagacgacgctcctatactgattgtcaatcctggacctagatgtagacgcgatatttttctctctcctaagatgtacgactcgttaggttttctctttcctagacgtacagattgtattattattattattatttaaaatgttaataattattatttttaactttaaataatattactattttttaacgaaatatttttagttaatcttttaataaattactttt

SEQ ID NO: 386087 - DNA, 4428 bp, Cannabis indica
gaaaaaaaaaaaataactataattgtgctgtaaaaaattattaagtatttggtaaattaaaattagaaaattaagtgttgtggattggaaaagttgcatctaatgtttagtaaattatataacttatagacatattttactatccatgtactttttttactaagaatattaaacagttatctttattttaacatttatttttaaaataaataatagaaaaaaatagttaagtttcaattttttcaagtggaaaatgaaagtaatttttaacataaatatttaagtgatttgcaatataaatatttaagtttaactcttagttgcaaataaatacttaagtttgatttttgaccgtaataaaacttaagttatatttctagaactttcgtaggtacttgaccgttaagtgtcaagtcattattcacgtgttatattcttaatggtatttttaaactattttaaataaaactaaaattaataacatgccaatcagagaatgtcatatggccattaacttgacacttaacgaccaaatacttacagatgttctacaaatataacttaggtattattatccccaaaaaaacttagatatttatttacaatcgggaattaaacttaattattttatgttctagattactctaagcattttgacatttcaaaatttaatcaaatagtaacaaaagacaataacataaataataaaaaataaaaataaaaagatgcgaagatcttttctagttattgcccattgaagttgcagcaatcagatctgatgttgtccattttattttagtttaaagctttagttgtctgatcttcttcaacattattggttgttcgatcatctacataagattgtttctaatattttcaaaatcctgatcatgtttttttttatgtataatctcaatcatgtttagcatgccttcaaatgtaattatgtaaggtcattgttgtaattaccattttacttgttttttgtatagataactaggcatatctcttaataggttttgtctttttttctatactccaaaggttcgttcaataacacttcgaagagaagaatgtgcctcgttgaatatttatttataaccaattgatctgctacctcgttgaaattgtggaagatgatacctttcacctttatatggtccttaatttttttttttaatttgtggatatcctgcattcactaaataatgttttcctacaaacacaacatagaaacaaaattaaaatttttccaagatcttaataattgatagatatgtttagattgtgaccttgagagggtttgggaaaacttgaagttgaatcacgtaaagttggattataaaattcttatatcatgagcagaaccattccacccaacatatgcaaatataaatttcatattacatatagccataatattctgagtcagtacttctttcctaccaataaatggtacttgtgctataggaggaattacgacattcacattgttggttgataacttttccaactaatttggagtctaataaacgctaattaatcaccaataacgagttagaattagtaagtatgtagaaagtacaccaaaaattatagaggttcgaccccttaaatattggtaatgacctacttctcttttagttgtattaattttaagataatactatgcaaatcactaaggaagacaaaggaaattctagctacgactctcaagatgcttactaggccggaacataaaaaccgctaaaccatgggaaccgcataacccattagaatccgcccgcatggaaaccacccattaaaaacccacaaaaattgggttgggttgagttttaacccgctgtttggcgggcgggtacgggttagcctaaaaacgggcgggtccaacccgtacccgttatttattattttttttattttttatacttaaagggtaatggctgcctaaaaaaaactaaaacaaaaaaaaaaaaccctaaaactaattatctgaacttcacagccgctccgctccgtgtcccccccccccttcttctctgctcgtcatcgtcttctcttctcccatcgtcgacagtcgctgcccaggtgaggtgcactttgtgctagtccatggggctgggcatggagattggtgctgatacaaaatatgtgttcttctacatcatcggatcagaatcagatcgactcatcttctcaaactcctcttctccgaaagaatatcgcccgtaagtggtcgatcgccagactggccggagctttgctgtttggagttaactcggcgaccggttaccttcttatgttggcgatcatgtcttttaatggtggagtttttgttgcgatcgttttgggactcactattggttgcttcgtctttcgtactgttgatgatgatgttactcttatcgttgataatccttgtgcttgtgcttgattttcatcatacggttctcattttcgatttcgattttaattttattgtaaatttataattgaaagtttttcatgattctgtttggttctcgggaaatgttgaaaggaaaaagcataattagaaatgttcaaactggagaaaaggataatattcagagattacgaatactgaattactgattttttttttaatctgatgtaaatttacaattcaagagctgtgtaaattgttgttgttgttattattgttgttttctctctaattttctgtttggttctcgggaaaaggagagcgagagtctctgattcaatggttatgatgttgagatttttttcacaaaccgcccaaaaaactgcataaaattgccctctaaaaaaccgcccaacccaaacttttattggccagttatgggttgtgattttaaaaaaccgccaaataaaaaaaaactgccaaaccgcccaaataccgcccaacccaacccatgtccagccctaatgcttacagagaatattgttcacaaaagtgctcttagagtcaagataatgattttaggttcgggtcccctttccttgtgaaaatgtttactatttataggaagtaggaaagtacatttgaacatttaaaatataaaagatacataaaaatccctctttttttaagggagttacaatctgtttgaaatgcctatacttgtgggttgaagagtcaaacccatatttgtgggatgtcgttggggatattcatagagtttgttaatgatgaaatcaaggcctgtgtagtcttgagcgacctttttgggatcatttaccctggccagccagccttgggactgcaccatggttggccagcttgccctccacagtggcctgaccaaccaagaggtgctctgcagggtttcctgtgcacttctacacgtggacaacaactcctgggatgcaaattgggctgtaaaagcccaacagaatggttgaaaagtatctagattcaagggtattttagtcttttgtaattatgtaacaaattatgtaaatacctagggtttcaaattgtaatcaagggtttaggcctcctatataaaggccttaaccctagtttagaaacctaagttgattctaagcctgaaaccttcctccaagctctaagcctaagtctgacaacttttctcttcctcacttcctctctcacacgcctacacaaacatcatctcaacacttgagttttgccattattgattcataccttgtattcctaagggtgctatagtagatcctacctatagtgatctggatagtattaacctcggtattaatacaactaaaaggggagtaggtcgttatctgctatcacaagggagttgaacctctataacaaatctattgtttattactttttattcttatttgtgcaaaaacgtggcaattattagatctatacgaccccactatcgattgatcactttttgaggtcaaaaatttagtgctttcattgagagcgtggatatcgtatctgatcaaacgccaaggtgaacagaagaagagctcctgacgcaccatctacatctttgggtctccctcaagacccacaaatcgtagatccaggtaatcatgttccagtcacaactggaatccccatgaatattatagatgtggtgaatcctgtcaccacaacaagcgccataaagctagccaaactgatacaggcatcccaatggattcaagtggcaggcccctgtctctaagagaagacccactattggtgcctcccactgaaggaagtgttgggttttatgccttaaataaaactcatttcaatataatcagatttacttattaataaagatcaaaaataacatttaaatgttgcatggttcacatgatttatttcatgattatttacataatgtatgaattccatttaagtccagaacatatcaatttgttaatgattatagtgttgtcagcacagttgaatataatcttaattatatgttcaaa

SEQ ID NO: 386088 - DNA, 1002 bp, Cannabis indica
ttttttttttcaattttcttttacattttcaatgtttgattttaattgggacatatctgattttaattttcatgaattggttggtgttcaggacttcagcgatattttggatgcatagaagaggggccaaaattatatctctatgctaacgattactgtatgtgaatttagaatattttttcattttatgctgatttcattattttttttatcgggacgatgtgttttatgttaattttgaacgttttctattttgttgtttatatcgattattataggtgatgataacctaatcttactatatatgctacttaaacaatttctattgatattgttttttctctctttcaagttttgcctgattttattttatgtagaagaggatgaaaaaataaagaaattgagatcatctatgatgacaaggtacctttttatagctccttcactctatatattttcaacaatttcatagctcatgtttatatagattattatatatgatgatcctaacctaatattatatatattgtgacttaaaaatgttctaatgatatttgtttttttttttttttgtattttgtctctttcaattttacttgattttgttttctgtagaagatgatgaaaaaagaaattgagatcatttcttatcaccaggtacattttcatagctcacaatattttaattttttttttttttgcttttatatgataaatttctctccgttacatgtcacaccttcttatgctaatggtttttttttttatttagctattttcttttgtacagtctatttacgcctcttatgaacctctaaggatctttgttttgatctttttttataatatatactggtttctcttacagtctattattggttcttcaccacaatatcttacaaggacatgagtcatgcaatatgcggtctccaatttgcatgtttttgtaatacccgataaaaatatacatatattttaaattttatttgttatacaatttgt

SEQ ID NO: 386089 - DNA, 1674 bp, Cannabis indica
ttagagagaaaattgtgattaaacttttatttgttgcagtttgagcatttccaaagtccaaactatttagaggtgtaaaaaatctccacgtcaaaaatctcttttttatcattattttttataattttacttctaaaaggtacttcaaaagttaatactattgtctcatgtattattatttaatatattatttattatagttttgttcataaaaaataaaaataataataaaaaagtggatgataccaatggcaagttttggcatcagtgttactctatctttggcttgacacccaaacattttcaatagttagctcattctaagtattcttccacatcagcaagcacctttattaaagatgctcttactggctatgtaaaaaatttgatagcaaaagtcctatgtagttttattaaagatgctcttttatgtaggaaaggaaaattcaaggtaaaaactttgtacctttctctcgaagtcagctatagcttggcaagtcattaataaccatctcttgacaaagagatcatctttgtaaagtccgtttgattccttccacctcagtaggtgactgaaactattcagcatttcttttttgattgcatatttacagagaaggtgactgaaaatgttaagttagcgctttgattagtttgataaactccttttgggaggtgaaaattaaactctttctttgtagtagtctgttggtagttttataaagggaaatttctgttttatgtttattttataaagatacaatattaatttttgtacaattatctcaaattctaatatttttgttaatttctccttataaatttcgtttggcagtttaatcaacttttttaaatggaaaaagatgggcaagctcaggctaaataaagaaaagattccgattgctactttaatgactgtaccttatgaaaatgttgaactgggctcggaggggtgcgccaggcccatgctgtagtgcaacacataggcgacgcgtaaagacccgagtagcaagctactgaatgggcctttccctttaaaaaattaatttaatatcgtgtgggccattggcccacatatcagatattaaactgataagaacagatactacacttgatcttagccaaaaggccgagaaaggtatgaattgaatcaggaaagagttccacttaaatagccacatatacaagaagaccttctctatttaatcaatgtgggactacatgagtcaactgcacttgccttatacctggaaaaatatatgaagataagaaatccaaatgcctgccttaattctccactattataaaaattgtttggccaataagtataataccataacacaaaaaattgataaaacattctaactagcgactgcattttctttcaaacttactttgctgcgccttagttatttcaaccaaaatctgatatgtcatataaaccagaatcgaatatgtcatttattagttatttcaaccaaaatctgatatgtcatatcaaccaaaatctgatgtcatataaaccaaaatcatattagtttgccaccttagtaactaagctgcaacaaagtaacaaaaagtttgagcgtaaatattattttggaccttgtgttttgcaaaagttattgattggactttctattttgttaaatgacaaaatagatcctgtattat

SEQ ID NO: 386090 - DNA, 777 bp, Cannabis indica
taaaatataagaaaattaattcgtgttatcatgtcaacatgattattacctgacacaattattaaatgtgtcgacatgactatgacacgatacaattaaggtaaacacgaacacaacacaattattaaacgtatcagaaacttaaacacgaacacaaaacaattataaaatgtatcagaaactcaaactcaaacacaaacaacacacaattattaaacgtgtaatccaaacccatttatttgtgtcattttcgagtcgtgtcgtcgtgtcgtgacccatattgccagctctaagcgaaagtgatgagctatgaattttctatatatacacattacgcgtaaatataaaattaattagagaagtgtttgaaagcactaatagtgcttagactatctctaattgttaaattttagaggatgattgcttatgtgcattgcttatttggcaaaaacaaaaggatactataccattagagttaaatatgtgttatcatagaaaattatattgaggccactacacgacaatgatgctttgcttttaaaaaagataaaaaattaaagataaataagtagtgtgaatatttataattaaaacaaataataatgtctgagatcataatttaacattttttaaaagtactatatatatattattggagtgtttgtagaattaagagtgtcaaaattggtgtggaagagagataaaataaaatattatatttttgcatgatatggagtttttagcattttaagaaaatattattattggagatgctct

SEQ ID NO: 386091 - DNA, 2114 bp, Cannabis indica
ttttgatcaatgcaccaagcacacaaacagtgtattttgctaatgtataggtgccttttggtgatctttttatcaatgcaccaacaaccagttgaatagaaattatattttgtaaatgtttgagtgttcatttaaattgccaagttttcccttacattctaatactacagtagcaatcaaaaaagcagtacatttttatgaaataaacatatcattacagggtatccttaaattacatggaacaatatccttaaaaatagtacattttggggttaactgttacacatttaaaagttaaggtagtttagcctcataatatctccttacattaaacaacactcaagacattaaccaaaacagaacaatggcaaaaacaacacttatgactaagattccactggtgcaaatcttttcttttggatcttcaacacttgtactactactcccattgaaactctccatgcaatcaattttcccatactgttaagcaatgatttctcatcaacctaaacccccttgttcaaggccttcagtatagaagattgctcacagttattgtccacactgttcaggtaattatgctcatcaatatttgatcttgaaatgtttgaaatttctccctcaagccttctaattttacgcagtagcccaggaaccacctatgatgccctttcacacattagtgggtcgatccactcccaaaaataacatccaccaaccagctgtggaaaaaaaactattattgtagaatcagatgaggactcgagcaaaccaatcacgaaaaaacaaaaaaaaataaaaaattacaactcaccctttaacgtcgacacatcgcgaatcttcttcctgcgtttgcatctgtccacgaggttttgatcattatagggtgttcacaagagcacttgggatgtggaaccctcttcattttcttcttcgactgtgcaacaatggcttaaggaagggaagggaagaacagggggaggtcactgtgtcgacaatggcggaaagaaggggcatgagtcgtgcaggagagggcttttaattttagggtttttaattttgctttgtttttggcatatttctgtttttgatttaatttaggattttaatttaattttggagttaagttttaattttattttgggagagggatttatttaatgccaaggtggcatgagtggctgacgtggatcgtgccacgtaagccatttttgcacttaaacagagcctgagtgacgcaatagtgctgagcaaaacggaagtggggttcaggtagtttagtcgccaaaaattgagtttttgtggttaattgtcacaaatccaaaagtttggggatttagccgccaatatccccttcataaaatatgggaattgatcacgtttcatttaaatcacgtgtggataacaattgataaccgcataacaacttattattcttatcctcaaagatggtaaatgttgatttggacaatagcaccttgcttaacttgtagatggtcaatgctgatttggacaatcatatgccttcaagaaatggcatgagcaccagtgtactaggcaaacttaagatctgcttttcaccataaggccttgcagactggacaatcgtgtcttgcatattttcaagttgttacactttgttatgtaatgaaaaatacgctaagtgtttaacaaatgattcgccttgtctatatttcttatgaatagcaaggtggacaccttgctatatgtagtctgaagttgccttgggtaacttcacttattccttcaaaataaacgaattttctctttggatctgtgattttcgaggtaggctggtgtctcgtcaatacaagtattaatagttttatatcctggtctcgcttaaaactatacagtcagcgagttatgaatatactctattaattctatatttaattagttattcttctttgcattaaatcactactacaatctggccttttagtgacactatttagtgacacacactaaagtgtgggtcactatagagctaggaatgatttttagtgacacagtctcgtgtaatgtgtgtcactaaaactatgaagtgtcattaaaaattaatacccatagtttttttatcttttattttt

SEQ ID NO: 386092 - DNA, 742 bp, Cannabis indica
ggggagtgaggtgcctagaggttgatctttaaccaacaaggattgggagtgggtggaaacacccaaaatggtagctcaagaaatgaaattgatcccttcaggcatctagatctaccaaactctaccaatacctcacgtcaacacacaactagcatcagttgaccatggagtcatgggcatccaggccttgccttttgtaggtctagctgaccatagaagcatcacagacgactagaccctaccctttgcaggtttggctagccatggaggagtactgggtagccagaccatgctaataaaggtctagccggctaagcacaatagctagatgtaggcctggctggcctaggctagctcccgtacctaggaatggctggctagggtctgctgttctacactggtctagctgatcttcaccatacactctcccagggtatggccagccagcccatatctcttcataatttgcagcctccctatgggtgtcaatcaaccaagtccccacaggaccagatccttctgtgcaagcatagttggaccaactcagggacatgatccagggcataactggcctgaagccttcatacctttaactttatcggtaaaggggatcaccattctcaacatagatatataccttgcccttgccaaagttcaaaatgccggtatggaagatgtataccggacgagaagacccactagcttagaacaaatacttgaagatgcaactcgatctctagaa

SEQ ID NO: 386093 - DNA, 2165 bp, Cannabis indica
gcaacaataaccctgacagcgagtagtagcttttctcctaactttccgaggttgataatgtaaatcccgtcgtttctacgctgtaagacataacgctccatctgaaaattgtaattcttagtgacaagatgaacttcagcatccaacatcatttgaatgtcagcttctttctgagagagctgatgcgacggagcagtggagctcattgaaagatgtctggagctgattagtgaaggtactaggagcatgccttcatatggcgagatggatgtctcgctattctttatccatgcccttgaagctgctacacttagttggtataatgtatatcacacgctaagtattctaacagccagttcgtctcgccaacatctctctacatatggcgaggttgatacctcgctatgtattatcgatatcatccttgcgattatgtcttctgacatgaaatagtttctcgtcaatatgcgagtcaataggtcgtacatccttgtctcgctaaggagttgtgcagtctgggagttataaatataccctattgatttctacatttaaagagttattccatttaatatttataaataaaattgtcattattttttctagttaatataccctaaaatgaacacgtgtcatcttctgaagtaccagttgaatttcgggtataacacttttagagaagccttttgcaaagggtttaaggttgacttggtttttatatattttttttctatgttagcctttttgatgttactttctcgggccacagccaccacagtagcatgcgccgaattgtccctgcccatacccttttccttctaaccttcaaccaagccttctttagactgttggataaggctttgcagcttaccaaccccccgtcaaaggagtctccgacgtaactttgggctctttgtccttctagtaccgacgagtattttgcgcccctttaatggcctcaaagaaattattcaacctactatcttccttaagctagtttcaatataatggagttaagacccttgatgtatatttaaccataccacaactttccttgcaatcactttgttcatggccaaaaaatccacactgaaaacataacataggaaatatctcaaatttgaattggatccaaacctctttcccctcacttgggatatatcttctctcgaacacatgtttatttatgggaaatctgatctggactctaataacatctttcacaatcaattacattagtattagttcaaactaattctaacacctcccctgccatggctcctaaatgaagcacattattttttgttaaagcattgggagggaaaccttttattttaatccaacactcaaccatgttcaatcttgcatcttttcaacaccctgtgaaaggccatttttcacctattaaaatgcctccatgaaaaaatcaagtagcttttttatacactttatcagccaactctttttcctcaaagaataaacccaccaaggtgtgtaacctttcccttttgctaaaacctcaacagaccaacctacatctctttcccatatacacactgttgaaaaaattgtacagtacaatgccttttagctaagacccttcccaccatagatccttctttaaacttcacactcacctgatcattagtctcacactcttcttcttcctccaccataaggcgatcagtgaagaaattttatctaccacactcctcatactgagacacccacacatgacatagtaccactactaccctctcaaaatagactaatccaaataagaaagctcgagaaagaaaacaaaaacaaaaagcacttcttaggagacaactctcacaccagaaatctaagcacacaagaaaatggtcaaaaaaaactagagttacactctctagagagagaattaagaaaagagacagatgctcttcatagaagtgtagacccattctcacttatttttgacaagggttaacttatttttatttatttattatttcttaattttaatttatttattcaattaaatctaactaaagttcatggatagaaaaaagagcgcaagaacattaaataaacttaggccagtagacctatcaaaattcttggtttgggttcttcagaacaaaaatcaagtcccagtttgggccagttataaataagaatga

SEQ ID NO: 386094 - DNA, 1231 bp, Cannabis indica
  modified_base (355)..(355): a, c, t, g, unknown or other
aaaaagcaaaagcagaagctcgagaaaaagtcttgagagaagagcgagctaaagttgaagctgaaaaagaaaaacaaaaaagagagaaagatagaaaacaagctaaaaaagaacgcgacgcgcaagaatttcgccgatttcatcaggcttttaaggtaaaagaagagaagaagaactggtacaatatattttcttagatattaattaaggggttttaatatttattatttgtgatttagtataaatattactgctaattaaattaaataaagtcaaatttgtatgattaattattttattatctgcctgatcgatgggtacaccaaatacaagaactgctatttttttttttttntttctttgtatctgctcttcagttgactttctagctagaaaaggctatatattatacgtttgtgaaaatagctaaattaatagtattttaaccatacatattttaatctctaattataatcggttaattttaaatattaatttaattgttgaaaaattactgtaactagatagaattaaaaatttaattttttttttgaaaagaaaaaaaatttaattgtttagtatatatatctaacaataatctttgcaagttccatctcacttacatgagataaataaatattcgataaacccattagttagattggagagtaataatattattgttatgaaaaccaaaacaacaaaacaaaaaagcagcttccaaggatacaacctagccatgcattctactgttcttgcacttaataattatcataccatgcacgagaatgattatacatagccgatcgagttggacggtgtactgttcgttaattgttattattctactactattagtactactagttaattgcctaatagtactagtagtagtacttgttcgagttccacaatcgaataattgtggaactgaaactcgtgatgatgagaaacgaccaccaattgatgaattagcgtctgagtaattcgattttgtataaccaatttcacgtgatctacgactgcttgaaacggcgtcgtagtataactggttagacatgggtattcgatttgaaggaactacatctacagttagagctctaatagtgggtcttcgtcgaaaaattgtctgacatgtttttaatgttattttccagctctaagctaggtgggccctaagcacaagcctagcccacctatacctaagatcaagcccgtgtgcaataattaa

SEQ ID NO: 386095 - DNA, 1312 bp, Cannabis indica
tacgatggttctcgtgtttcctctaataggtgtggcgtactaggttagggtctggtccagctacctccccttccatcaatgacatctactttcctagacttgtggcccgaaccccgaccctgaacctcgcgcaccccggacccttacatgcacctggacacgcaccaggacccaaactcgcaccccaaacccggaaacccaaaccctgaaccctagacatggaaacggatcaaaaccatgaactcagacccaaactcggaccccagactcaaacccaacctcgaacctcgaaccccaaaccgagaccttaacttggacccgaacccagcctaaggctctcacactcgtaccctgaacctagcctaatatatatttagtatctaataattcaatcatcaaatataataaaattgttctctttctttaataatcaaaatacctttacatacatgttagagcataatctctaataaaatgcacctgtatttatatatgtacagtgaacttgttttgtattattgcaatcaatcgaacaattatatgatgtgatcactactacaaaatgaccctttagcttcgatttttttgggcttttaattttagttttgataaaatttgcaaccagaggcattccaggtgaagcgaaaggggtcaaaaaaattgaagcaaaagggcccctatgacttcggttatttgctaataatcgaagccataaatactttttttattctattttatatattttttttttattttttcagttcgatagaggatgattaatatagagaatgagagaatggattcttcaaatgatattaactgtccataataatattaacacaaacaatttttctcttgaaaaaaataaaagaaccacttgcaaataagaaaaaaattgtgagatgtcaaaaaagtctaaagaaaaagagagagaaagaaaaaagatataataataataataaaaaaaaaaaagcttctagggttggcagtggtgtgttctgcagggttgaggcattgttggtgctagggctagcagtagttggacacacacacaaggttgtggggctcccagtaaaaaaatactacattaaaaaaattaaatatttttcttttcatttgaaaattatagcacaaaaaattgaaaaaacccccacaaaaataaataaattaaataaagtaaacctaaaaaaaaattaataacaattaagcccccacataataaaaattttgcgtccgtcactggttattttacggttattttttagtttttctacaattgtttttaattgttctgttttgttgttttacggtt

SEQ ID NO: 386096 - DNA, 1367 bp, Cannabis indica
catcaaagtttgaataagatgtctcaataaaatagagtctcaacataaactaagaaaacttgaaataaataagaaaatgaaaaggatgagccaaattcaatgtatttgaaattaattttttttaagacaaaagcacccaatatattaaacaaccatcacttctctattcatatccaatactgacacaattattgtaccttaattaatctggggacacatacaattatccaaatgtaccagatgtcacaactattgtcctaaaacactaaatttcttaggcaataattttatagtgtcggctttacaggctccaacacacactacaggaaatgtcacttttgctagcacatctttgtggtggcaaaagttggtattgagctggtaaaatagaatttacttgtgatgtattgacaaaagggggttgacaaatcaatgttggtattagaatttttgccagcataaaatgaaaagcgctggcaaaaatgactttttccagcgcgtaaatacgctagtaaaagttagattttagccactataaatgtacgctggtaaaactttgacctctttgccagcgcagtttgcgaaatgcactggtaacttttaccagagcaatagcgaactgtactggtaaaagtgacatttcttctagtaacataatagaaaactagaaataataaattatgaagaaaatatataatcttaataagaagaaataaattacaacaaatgattttaaataaaatcaagaaaagagacttcttaaaactctataatcttatccaatattattctcaatatcttcaaagatgaccctttatgtcgaaagatattaaatcaaaaggtaaaataatatggtattaatttattcactatataatttgacagaaaatttccatctatatattaacagagcaaatgaaggtccacaaaatatgaaaagtctatatagtaattttttacatatgtatataatcttaataagaaaataatatacctcaaacaagacccaaatgaaacgttatgtgcctagtgcacattttcaaacacctaagaatagaaaatcaagaaaattaagaaaattaagaaactctatgagcagcaacacaataacttttttcttcttcactaagtatcaacttaatgattacttacaatggctaatattgaagaatggttaaggttttggacgtagccatggagagatgttaacgtcgaaccgttaatgttccgtctgttttattaaaaaaaaagctccgttaaaaataattgttaaaccaagaattaccgttagatagacagttttaatatatataaagatttcataatttataatattttttatttttataatttcatttaattttaaa

SEQ ID NO: 386097 - DNA, 1305 bp, Cannabis indica
tattactaaatctggtatttttcacattaatgttaatttttgtttaactaacgtgctttctatacctgatttttagtttaacattttatcggtcacttctattgttcaagatccaaaatattctaatttattctcacattctagttcttttattcacaacacgagtcagaatctacagattgagattgctaattgcattggacaactttcctttttcaaacaataaaataattctacttgtgattctgtttaatctaatagtttttgtaatgttgtacacaaatggcatttacgccttggacatccctctgtacggattactaaattcttgaataaaattcttcgttttaatgattctgactcatctttgcttccttgccatgtatgtcatttagctaagcaaaaaagactaccctttaattcagctaacataatggctcatactgcttttgacttaattcatttggatatttgtggtcctttcacaaaatcagcatagaaggttatcgatattttcttactattgttgatgatcacactagacatacttaggtttatatgcttaaaaataaatttgatgtcaacactatcatacctcaattttatgctcatgtactaaaataattttctatttctattaaaggcatacgatgtgataatgcgaacaaactaaacttgtcctttctttacaactaaaggcattcttccttatcactcatgtgtagaaagaccacaataaaattatgttgttgaacaaaagcatcaacacatattgaatgttgcttgttctcttgctttacaatctcgtttatctcttgggtattggagttactttattaatactgttgtctatttaatgaattgcacgccatctgttttacttaacttcaagtattcttttgagttgttgtataacaggttgccttcttatgatcatctctgtatctttgattgccttgcctatgcttccaccttggataactcaagggacaaattttccccaagatctcgggcttgtgtgttcattggatacccggttggtatgaaaacctatactctacttgaccttgaaacccggttggtattggaggttatggagcatcctccaaaatctcaatgccacgagtgtgatccaatcacattcgaagaatccaacttagatcatgtcagctacccacacaacgatcctttagtttttgaggtgcaaatagcaaacatgatggtggcaagagtgatggttaatgatggagcgtcttcaaactgttggaaacttatttaccaagatcttagatctactcacaagta

SEQ ID NO: 386098 - DNA, 949 bp, Cannabis indica
atttacagaatgaaattagctatatatagacaatagttcaacctacctaagaacaattaatacaaacagttaaaaaatatcagactcacataaactttaacagaaagctggtatgcagttataactgattaaaaccacagatatgactggactcactattaatataatctatcaaaataatgacccttacaaaatcattatggtatcaaatgattttacaataattattctaacaaacagaatgaaacaagatgtaaaatatagagtgagaggtggtaccttaaaaaaattataattaatagatagtgaagggtttgctaatttgtaatagaattaaagcaggccttattttttatggtgatgcgcatgcatatgatgttaatgatatttgttgagcaatataatttacacaaaaaataaaatatatatatatatataatatcaacttgctactaatataatataatataaaaaaaggacacatatcacattaaaaaaaaaatatataaaaaaattaaagatcacatatgcatgcttagctcgtatagtagctagctagctactgtgttagctaaacatgcttatatgatataaattacatggggaaggttgtatttggtgttttgattacaactaatatatattttataaaataaaaattaaataataattagaataattagtaatttttttcccagaactttcgacaatattaattttagcacctaaaatatatgacttgttaagaatcctccctgaactattacatttatagaaatttagtccttttgttaggttctatcccattattctgtttaaatgatgacgtatctttatcaattaaaactttgccccctaaatttttacaactatcaaaatgtaccgcctcaaaattaaaatgagaaaaattcaacatttttttttagtaaatcttaaaaaattaacttag

SEQ ID NO: 386099 - DNA, 969 bp, Cannabis indica
gaaaaataaagtataaaaactttttctgttttaataatacttatttataagtaatgttcattaaaaagtatatctcttgaagaaaaatgaaaatgttgcatttatgattaggcacttaaattaattcactataattatggggcatttagtttaattaatatatattgattattattattggacactagtagtgtctagtattttttagatgtgtcactttgcgattggttagagatattacatacaaattattatattaaattatataaaatctgatacttaattacgcgataatattaatatataggaatgtgctaacttttaacatttctcatatatatatatatattatataatgaaataataattaattgagcagtactgtaaataattattaagattaattaagcatgcgaaataattaattaatcaaactataatatataattataactcgatcaccaccagcaacaaaacgaaatcattatgtctagacagctggaaatattttgtgataatatatatatatatatatatatttatattttttttaaaataaaaggattttgtgatgaattgatatatagatagtgttaatttcaattattaaaaaaaattagtgatagctttccccattataattactaactattttttttttagaaaaaattactaattaattagtagctcgaaaatattgtacattttcatttaataatataagtagtacagtttaatacaagtataacattataattaggagtttaatacaaaggctcacaatttagcaatattaacactacgggtagaaaataataaagttgttaggagtctttaatcttgtaatttataatcttgtttatattaatggtgaaactctttaaaagtgacaaaaatctacacaatcatctaaaatataatattttattttatctctttcatattatttttaacacttttttattttag

SEQ ID NO: 386100 - DNA, 977 bp, Cannabis indica
gttcgagctttgcctttttcaccttcttcacagcccttggcacaaaattagctgggaagagttcttacttaataaaattgacctcaatggccaggagagtgatgtttcatgcatcgtgtggtagttgaagaattttttgtgccctcctcctgagccctaatgtgaatggagggcagtagtaagatggcacctactggaagctggtgtggacagtgtccattccttggacaagtaatactcatctacaaagttccctattttactcaccttggtatttgtggtgcccgtcatctagttctcctcgatctgaaaatagaagaatcttgatctgttctacttgggacttaactttgaatcaaagagccagctagtgtcatgtggggacggctcacctcatccttgcgagacataaacgatgaacagggcagacaagtatttgatgccattaggagaaaattgggtcgggctaaggtggtagtagtccgtgatcttcctcaagtacgtaagcaagggtaacaaaacaccctgcttggtgtggacgcctgaccatgcgcaataaccttcccttggactagtcgccaactggttggaggagggaaggaaacattcgacatcccttaagtaagaactcttgagtagattcttcatatttcccctggttaccacggatggaggagaaacccaccgatcttctagtgcaccttgcctccttgaaggaccagcctcggtgtattccttagttacatattattccgcgacctttaggacttccccaggcatagacacaggttatccttcttcattaaagccactaaatggtagcctccgagctgcaccttcctcatgttcaaccttagaagaagtatcaggacagacctctgttggagttattttaccaagatctagatttactaccaagtatgttttaaaaacatcctaatatgaattctaaaacaatgaaataaacacataagagt

SEQ ID NO: 386101 - DNA, 1421 bp, Cannabis indica
attttttttttacttatttaagacatgtagtaaaatttttgaggaattcagaataatttaccgtacaaaaagtagggtttaataagcagactattacatgcttataaaattgactgtttgataattaatttgtattagtttagatttgggtaggtggatatgaggaataagtgtttaatggttgttatggtaataatatagtgaagtagtgatgttgttgagtaattgttgatttagtatataagaatagtttggcttagaaaagataattgtatgtaaagtagtaagcttttattgaaagctttgcagctttggctttttggtgttgtgttacaatttggaatcctttatgtgtatttatagttgctagccttcaagcattaaggctagaattgtttgctctagatctttctagttcaagaatcttatccatacacttctacaaattttttaagcatgcataactagaaattatagactaaagtcttctagaaatgcccgtcttctattgtatttttcatatgtctaaaatatcttacaattatctaaaaaatttagagtatatttttttttacaaatgtgtagaatattctagacttaattaagtattgtagaaatgtgtaacaatttgtaatacttctccttggtacatatttctgtaactctaatcatgtctcgtagtagttcaaactttcctcttagtaacgcctttgtgaaaatatttgtcaactattgttcagtgcggtgcctgagttatatttctttgtcagcttctgtttctcttagaaagtgatacttgatgctcatatgttttgttctgttgtgaaatacaggattcgtcaccattactatagctgatttactatcgcagtagatctttgtagcttctttttgtgattctctcatgtcttcaagaattttttttagccatatagctgggcttgtagtcatagctaatgtaatatattctgcttcagcttaggattacgcaacagttgcttgtttttttgatgcctatgaaaatatttatgatccaaaggtgaaggcatatgctggcatgatttacatgtcatatacggatcctgcacaatcacattttgtgtagctaattagttttgagttacttgtaacttcgtatcatattccatagagttttgttccttacaagtatatgaggattcacatggttgctccatagtgaacttgactttgatcatgtatgaatcttgataggagactaattgtgtacattatgtctagtcttgttgtagttagatagagtaggttgccgatcaaattttgaaattttgattcatcgagttttagtgagccattttccttcttgagagctttgttattttctattggagttgatacagtcttgcatccctccatttttaatttcttcaatagtgtctctg

SEQ ID NO: 386102 - DNA, 1741 bp, Cannabis indica
aaacccaacagtcccaagggggcaaagcgtcgctttcacgctgcatgttgtaggtgcaagaggtggcattgcaccttgtacccttgtcttatatcaagtggtccacgttgcaggagggcagtccccggttacaggaatgtgatccctagttacaggcatgtggtccctagttacaggttgtaggagggtggtccctggttgcaggcaggtgatccttagttacaggcatgtgatccctggttacaggcatgtggtccccagttataggttgcagaagggtggtcctcggttgtaggtatgtgatccccaattacaagcctgtggtccccagttacagattataggagggtgttccaagctgtagacatgtgatccccaattacaggcatgtggtccccgattacaggttgtaggagggtggttgcagcatacccttggtcgggtcctcaggccttgcaggtttgttccactgctactcatatcttctcactttcaaagacttaggttgcattgttgtacgcttttcccttgcatctcatgtcattttattcctcctccaatgttattctcatcaatatgcattcacctctcaccttacacttacagcccccaaaacacacacacaacacacacaatggcttgcatgggaggcccccacaagggctcgcatgcgagccctaatgcataacacacatggaacacaacacacacacacacagcttggatgcgagcccccactcgcacacgcatgcactcgcacacacttgcacttgaaacacatggcttgagtcccccactcatatgcacatgcacactcacatgcgagcccctcatgggctcgcaacctcgtatgatagcccctcgttactgtggatcgcatggatgctccaccacttctgtaaaggctccacggctcacccaaatgcttcccaacttgtccaacagctcatgggctcacacaatgtctcatgggcttgcacaatgtctcatgggcttgcataatagctcatgggctcgcacacccagttgtcacaattcagcaatcatagtattttggccataactcgcttgatatatgtcggaatttaacaattcaaaatgagtaggaaagatgggaaagagatctatggaatatatgtttataacaaggatctaattccaaatgcgtaattatgagaatcctctaacaattataacctagtaagttgatcttattagctctactcatgagttattatggagttgacctccaagttgcgtggatataccttaagacttgccagaattgatccttattattaacgagccctaggctacaccattgattcagtcaatccttaaccaactcttgcaggcaatgtctctcgactgtcgagactaattgttgactaatcttgaaaatttactctaccaatttttggggttaacacttgctccctagtctataagaactcctttaagtgttcttgttgattaagtgaattggggcttttcttgggttaagtgtaagccttaccttctctatgtttttcaaggatgtgcccactatacataggggacctgccttgcttcagtttcacttcataatctaaaccttgaaatatcggaaaattcttctcaccttttctaggaggtctcaggtttgaactgttgggttttgtgccctaaataaaacccatttttatataatcagagttacttattaataaagatatgaaataacattttatgttgcatggtt

SEQ ID NO: 386103 - DNA, 865 bp, Cannabis indica
ttataagaccaaactagtaaactataggggaacataaccacgaccttttaccaactggctgaaagctcttcattcttacattaatgaaactcatcacaaatacatgttacgaaaatgcaatgtacagcttaccttgtcctgcattatattgaattaaagaaataaaagcacttcaggtttagcacacaatcatgctttgtatgctcagagcccaaaagagaaagaaacaaaaagtacaatacaaacaaattaatttgcatcctcgttaaaaatcacctgaccaatttgaggactgagtacaacaaaatcacatatgcagtcaatcagcttaacacgtccagaccactccagatgatcaaattccgaaattttatttaccagagctccaagatgcatcaagctctggaaaaaagaagagggaagtatcaaatttttttgaaaagattaaaaaagaaaaacatgatataattttcattgtgcactcttctaccaatcatggcaaaaaaattacatgcacagaaagaaagaaagaaataaagattatgccttttaggagtaaccattggctactgcctagactgtaatacagtgataggttacaatcctttttagtacaaatcttgttccatattatggggaggatctcttctcttttttcaaaaaaaaaaaaacttgttccatatttcaaaaagaaaaattaaaagaaaaggacaaacaaacaaataagtacaacaccagcttgagcaaaaaaaaaaggtaactacaacaccaaacacaaagtgaaactagaaatgaaaggaactcattgtttcggagttcttttttaaaaaaaaaaaaaagaagaagagatcctcttgtcttagac

SEQ ID NO: 386104 - DNA, 829 bp, Cannabis indica
tcacatttcaatggtcttagtatttttaccatagctttctcgcatgaaaatcttcatgagccttgcacacaccacacatagctcgcatgtgagtccttcaaacacagcacatggctcgcatggtacagctggcatgatggtcttgcatggacgtctcgtatcgtggttcgagtggacgtctcgcatgcctcaaggctagcatgaatgctcaacaacttgcacgaagactccactgctcgcacaaatgctccctgacttgtacaaatgcttcccatcttgcacaaaggcacaccgactcgtacacaggcacactggctcacacataagcacaccggctcgcacaccccactctcacattttaatggtcttagttttttagctataactttcttgatatatgccggaattagacgatttgaaattcattggaatgattagaaagagttctataaattttatgtttatgacaagatctaatttaaagcaaatcattatgaaaattctccaatgattgacacttagtaagttggccttactaactctactcatgcccacctacctccatcaaatacttcaaacaatcaaatatgcatgatggacctttaaatttttttatagagtgatgtctcatcctttatgctttctcaactttcccaaaaatttgcttgtgggcgaccctgagtccgatcttcgaaatgcttggacaagtctttgagaatcgtcaatgccaattcatagttaacaccgggttaactgttgactgatctcgaaggttagctttgctaatttttggggttaacacttcctccctgcctataaaaactctttt

SEQ ID NO: 386105 - DNA, 559 bp, Cannabis indica
atctataaatagttatgttgattatattgattcatctcgcaatataaacgatcctcttataatgctttattctgaagatggctttctgtgcctaagtattccctaggtagtacctctcgcgtctttctataaatgagagaagcaaatgcgagatactatcatagtgtgacaattctaagataaattatactgggagtgcttcccttagtctttcaacatactcacgagtatgttgatcaatgaactgcaagtttttaaagaattcattatctatcctttcaaaacatactttctgttgagtattatgtgtatcctgagatggatctcattgattgttcgtctcgtcggtcttattaatcagtagttaatatttacagctcaccattattttcaaaagatgagttcaaatatttttactgattgtattttctgaaataaatttattgagcgcatttattgctccataacacgagctggtttatattgggaaacttacaaaaatactggaatttgggataacttttacaaaaatactgtcacacggaaaagtttacaaaaa

SEQ ID NO: 386106 - DNA, 479 bp, Cannabis indica
aaggaagtttcttttgtttagctattggacaaacataacaaggttctttattatgcaaatcactagtattacaaccaagaatatttttgagtaaatctaggcgcttatgagagggatggccaagtcgcaagtgccatgtttcagcagtaacagataggattcgagggactttcatgtgcagtgtcaaggacataaagatcctcttccaatcgtcatcttactggcactgtcctacataatgaaaccgtcagcagtgaatttaaaaataataggagcattgttagttagatggctcacatatataatattgtacttgaaattaagagcatataagacattgtttagaataatattgttaccaaggttcacggttccactttgatcaaccataagagagtttttatttggtaagataagtttagttgtaggaaccttacatatacattggaatagtttgatattggtgttgggttttatgc

SEQ ID NO: 386107 - DNA, 534 bp, Cannabis indica
gctaaaagcgaagtcaacaaataaattgctatatcaattaagaaaaggaaaggcaactaaaaaggactaatgatattttttttgaggggtgaacgcaaacgattgaaatcctaaatataataaggaagcaaaaaatgtagttccaaagaaatgttttcaagatttgtggatcgtctaattatactccacaagacctttctagaaaagcactccaagtgcgtgtgagtggacaacttgggaaaaaggaagacttcaaacaataaaaagaagaagggctttaacacatggcccaaaaaatatgctttgagctctgagacttcgaagcaagattgatgagtccatatttgttttctaagtataactaatttatatattaatatttttaaattaattctttaaattattcattagtgtgattataattttttaggctattttaaagactaattatgcatttagagtcatttggagggatgccagcacattttagtagaaaatagtggaagtcagcgaactcggttttacaagacaaaa

SEQ ID NO: 386108 - DNA, 1007 bp, Cannabis indica
ggaaatgtgaaagttaccacgtccacaaaatctttagtaaggaaaaactacagaaccgttcaccaattccttatcaaggaactcatccatgaccgaaaaaactttgaacggtctctcttctgatcttgaatataataaaatggttggtaagcttagttttttatttgttggtttctaatgaaaacctttgtgaggtttcgattagttaaggatgttaagcatgttctgtttttgtgtgcatttgcagtctgattctggctccatgagtgcacttgttcgtgcaattctgttagataagaagcctgatgaagttcccatggtgtgtaatgatacatattcaatgctgccatttactaagtatcaaactgtgcaatttttttttccttttttacaaacatttttcgttttgttattttgtttgaacagttggtggaatctgtcttaagtaaggtggtggaggaatttgagcatcgaatgtctggtcaacaatatgaaacagtaagttagttttatcttctttagcaagtttaagatatcttatgtctgtactgttatatataaatttaactaactagttctttgtttatgacttactatattttatagctaaaaccaactccaagggacatgtctatttctaatggaaacaagtttatagccaaatctacttttggtgatagaaaggtactcttttctcatttaggcctattaaaacttcaagctgagaatttttgaataaatgagttcaattgtaatgtaagcaactcattcttatcattcacttttgagtattgtgattcatcaggtagaagaaaaacatgccaatataataaaggcagagcagttccaaaagaattgtatttctgatgaggagtcaaaaagaaagctactaaatcaacaattgatttttgataaacaacaaagagatattcaggtatgcaaagttgagatataatatgtcatgttacaaaattgaaactgtactaactaaggtacttattttagtt

SEQ ID NO: 386109 - DNA, 2679 bp, Cannabis indica
tcctttacatgcatgcctcgtcctcgtgatcgtgcctccgctacattcgtcttaaactcttgggaaaacttcactaagcttttttgtgtcatcgggaagggcattatcgagtgagttatccttttgaatgacgagtgacaaggccttgagcatgccgagtgacatgcaaacttggcacatggcctagtgacttgcattgtccatggtcgagtgactttcatgttgcatggccaggggatgtgctagcttgtcacatgaccgagtgacttacattgtccatggctgagcaacctagttgaaatcatggttgagtgacatagttaaaaccatggtcgagtgacttgttgaaaccatggtcgagtaacctagttgaaaccatggtcgagtgacttgttgaaaccatggtcgagtgatcttcatgaaaacatgactcagtgacttgttgaaaccatggtcgagtgaccttcatgaaaccatggccgagtgaccttcattaaactatgcatggcaaaccgtctgtagagaatcattgattgatttgattaaaataatagataatttataacatatctatatattgtatacagagcgttctataaaattaggagtgcaattttgagtctatagtgagtcatgggaaattaataagttaggaaatttatttattaaatttcaaatctacttattaggagcttgattttaatggcctatggtcccagcagtatttaggataatgtttaacagtaggttacaataattgaatttttaatcaattaaaattcacattattgattttatcaattttgatatttttactaagttggtgaaattttaaaaacaagaaaataaaggtttatctactaataaagacattttgttgtcataattaatgataatatttaaattttattttttatttaataattatctagatatatttatttaaataaaataatattaaatgtttaattaaatatagcaaaaatgaaaagatgacataattttaagtgcattgggctttaagtgagaaaagaaaaagttcaagcccaatatccacttacttggatggcaatgcaaggaaggaggctactttctatttgtattttgttttatttttatttaattaattagagaaaataattttttcaagaggaaggttatgggggagcattctactatacattaattttcaatttcagattttctgaccaaaaaaaaaaaataaactctctcccttctctttagaattagtcgcttgttgaagttctctctttctctctctcaaattttgtgagccacatagtgatgtaacaattgctcacacagttctgttacaacatctagatcactaaggaagactacgtagaaattggtgctttgattcaggttttatggaaattcgaattctataattgataatactctgcgacgaaaaagaacaaatgttagaacattaaacgaaagaagtcatattttgttgtgctacaaccactataagtattttgaaattcatatataattccaaaattttagtaaacatgttataaataattattatttatgttaaataataatttacataaaaataataaaatattgtaattctatcctcaacactaccctctaattcaaatattgttaagttagttttcccgatgcggcttggaactcagttgcttatgtgtaagatattttctaaaggcggcatgttttgttatgtgtcttgtctttggtatgttatgtctcttctcataaaggattgtttggaatggattaatactagcaagagaatgataatgtgaaatattatcttgtttattttgagaatataacattgtatggtgcccataaataacataacgaacaaaaatatataatatagtgataaaatatataaaaatatctatttcaattaataatcaataaaatttaaatttatttattaataaatatattgttttaatgcataattatttattttatgtataactaacattaaacagatataataaaaaatattttcattttaattttttaaaataatatatagaatttctgtactcaaccaaacaacataattcaattaacggaaatatgatacctatcaccctacacaaccaaacacagtttacacatttccctacaattatattttactttataatattctctataatcaaattattttgaatacttcactccaaacgctccctaatggtttgttctataggagtaatgttgttatttggtttttgctcctcctttataatcagtgggtttttttttttaatggaaaatcatcattttattaaccaataacttcagctatcaaaaaaggtagcaaatcaactgggacagaccccatattgaaattgcaatgacgatagaataaagaggctctagcaaagttataagtggtagcaaatcataattttttttttgtttttgctcctccttcataatcagtgattgtttgtttagttgcctgacctgtatagaacttggaccctttaaaacctttgaatgaatattctcctttcaataactataataatattttatttttaagaaagaaaaaaactaacccaaacatgcttaattgtagaatctagtgcattagtactaatatgatggcacatttgtaaaataaagaaaaaattacataataaactaaaaatt

SEQ ID NO: 386110 - DNA, 1328 bp, Cannabis indica
tatttacatattaaattagttaaatacgaaagacaaaattgccctttgaaagtagatattttcaatcagttcgttgggctgttaagggccaatttgcaggtagcttactgtctttgttttaggctatacatagagtcttgaaaagttaatcctagatacccataggcctagaaaggaggtctaaccagccatgcacttcaggatatggtctggccgaccatgctcttgtttggacctagcaagtcatgtgtctgctaggatcctgtaggtcactatagctttaccaagaggaggccagtcattagatgtggaggccaacctttttcaactggaggatagctttgtacactattgtcttgtagagggcaagttgccttggccgaatggaagctcccttaatttggaagtcactttttagccggccagcttgtgcccagattctggccggcctatatgctaaccctggctggcctataggcttccttgggcggccagggatgttagtacaactccttaagggctcgcttcactccatttggttgctacttgatagttatgctatattttcgatggagatcctgttctgctactagtagggttgtgctacacctatactctatctttggcttacgtggacatgtcacgtcaggtggacaaaatttaggataatagttcacatgattattttcatgattatatgtttattatataaattctattaaatttcgaccatatagttattcataattttaatgatgtcatcatagttgaaaatgattgtgattatatgtttcaaagtacttagtcccatgattaattagtgcactggatatacaataacgtaataatcagtgataaattttacttacagagtgttatgtgaaatttcttttccaggacattagtaaaatatactagtatcggatgtattgggtgtacatcgaactggaccaatattaatagtggaaaagatgtcataaacttactgttatatctttctaagtcaatattacttagttaatcttaggttaatagatctcaatcctaagatggttaggttttggcttaaatgaattatttgtgttctatgaattgttcgttaaagctgacgaaatggattggcccaatacttatatctggagaacatggtagtgcaattgagttagagcactaatcatagatatagaagctataacttcaataaatattagaatcgaaatgatgatttccattgagctttgcttaacgcgataaatgattgagctatcatttcagtaattatattagtttactaaaatatcatttacagatagctaagtgttttaagg

SEQ ID NO: 386111 - DNA, 1189 bp, Cannabis indica
tcaaacaccttcatttcaatcgctccgaactgaccaaaaaacgtttcgacattattaaacctccatggctagacctcaacagcggtatagaggcgttcgtcaaagacattggggctcttgggtctccgaaattcgtcaccctttactgtaataattctctatctaattcccattacaattttttttcgaaacgtttctttttcgttcacgtttttcttaccgttttttttggtttttggtgtaggaaaacgagaatttggctagggacgttcgaaacggcagaggacgcagcaagagcatatgaccaagcggctaggatcatgtgtggcgcaaaagcacgtacaaattttccttacaatcccaatgagccactttcttcaaactcagccaataagcttctttcagatactttaagagccaagcttcaaaagtgcaacgtggcatctcttcaaatgaccaaacaacccttaatttcaaagacacccacgtggcacaatccacatccaccaccaccaactctgcttcaatcaccaccggaggctccctcggcattgccggaaccagcggcggcgcgtggcccgagcagaacagctgggtaggatcagctggtcaaatgggctctactagtaatagtcaagtacaatttattcaaccacttgaagatgaccacattgagcaaatgatagaagaattgcttgattatggctacatggaactctgtcctgatattaattaagagtaaaagtaaaattactgtccttaattattattattattatgaacaatattatttagctattttgtttggtttatatatatatcatcaagcttgaacttgcgtgaccatgtttgtttttggtccaatattcataaatagctgatgatatattttctcaatatatatagctttttattaattagtatataatttagtagtagaattacttgtttttattcaaagctcataactttgattcaaataaatgtgagagtgagtagtctcgtgatcagtaaggagaaacaccgggtaagctgtccaatcctacatcgcctggggaagatcaagtaggatgattctgagactgtgtaggtatgagactgcatagttgaagagagcttaaatggattgattggtactacctatatcaataaggtgcatcttatttttcggtagcccatcatgaaaaaa

SEQ ID NO: 386112 - DNA, 1547 bp, Cannabis indica
gactttgaattttcgcactgatacttaccttcagcgatgagttattactgatgacttttttaatgaggacatgtcaccattgatagtcatcacttataaaaaaagacacccttcactaatgaaatttgtcctcattgaagctctatttttcttttactagtgatataccatattttaagatttattttaagtttttaagactttacagaatgtcttaagtaattacaatatataccttcttataaaaattgagattactatttaaatattaaaaatacaaagaaagtgcattggtgcacccatttttcgagggtccaccgttaaaacacccatatatatgtagtgtttttgacataaatctataagtgccaaatgtcactctcggatttttcatgtttaaatgacagttaagttagttggttttggggggaaattgttcaagctataaataacaactcttggcccttggttttgagaattgaagtgagatcaccctaaacagattcgagagagataagatagagtgagacagagtgattggggagggtcaagagcaagccttctttgtatttgatctttctggtttagctcaatcatcttgtaatcacaattgcttccattaataaagatttaaatgttgattgtttccttgggatatagacacaagttactctaacttgttgtttgaacctcgttaaagaaggtgtcaactttacttttctgttggttactattaaagttcaagtttataattcatgcttgattgattatcattgctgcttttaagtttacattttcagtacgagtgtgagttaatgatctttgttttcatgttcttgaagaaagtgaattgtgattcaccacaaatggtatcagagctcgataaagaaaaggattagcatataagaactggttaaagattcaaagaaatcaatctgaaaatgtcatcagcaagattggaagtagataagttcactactaatgactaattaattctatggcgaatcaagatcaaagcattacttgttcatcagggcatttcagaagtagttgctcatattcaacttgcaaaaattacagatgaaaagatcaagagggatactgaattaaaggctcacaatgccattttgttgagtcttggagatgaagtcttgagagtggtctcagatgaaaccactgcttcaagtttatagatcaaacttgcctccatttacttaaagaaatcattggctaataaattgtatttgaagaagaaactctatgccatgaagatggatgaaagtaaggaattgagaagtcacttggatgaatttaacagaattgttcttgacttgaataacatatatgtgtcaagatagaggaagaagatcaagccatcaccttgctaagttctctaccaaaaacctatgaacattttgtagatacgattctctatggaaaagatacattaatcatgtaagaggtaaaagttgcactcaattcaaaagagatccaaaagaaaatagaggatagaggggactcaagtggtggtggtctgtacatatatt

SEQ ID NO: 386113 - DNA, 1280 bp, Cannabis indica
aagctcaagtttatgagcattgtatggtttgagatgaggaaagcaactacatctaaataatttctaaatgttatacttaggttgtttctttaacaaacattcataaggactcatgttcctaataacaggtgttaggagtctataaatggcgaacacagcaaaggacatagcatgcaaccaatactccatccttaaacttgcttgagccaacaaggctagataagtttcaataatatgtttgtatttacgctcaactcgaccattttgttcacttgttctttgacaagggtgttgaaaatgaattccttggtcagccaaaaatcgagcaaaaggtcaatattttttaccccaatctccttgagcacttttaatgggaaaatcaaataatttttctacaaggcttttaaatttgatgaatatatcaaatgtttggttctttaaggatagtggaaatatccaacaatatctactaaaatcatcaaggaaatgcacataatacttaaagccatctttagatgtgatgtgagaaggacttgaaagatctatgtgtattagtgtaagaggttgtgtagccttggtagtagaattagaaaaaagggagtttgtgactttttcttagtgataggctttgcaaaattgcagggctctaaatgaccccatatatgatatgtgaggaagaatttttgtgatggtgttatgagcaggatggccaagtttgcaatgacaattatttaagtcattgcttttggaaatagacaacttgactagaagtaataagaaaagaattagaatttcttttattgatattttcaacagtacaagattcaattgacaattttgaatgacaattacaagtacaaaagcaagattcatcagaatctttcaaaaatgttgttaggttacagtgaattgaggagttgaaagcttcactaagttgataaagaccatcctcagccttccctttgagtagctcaatccctgttagtttatcattaacaaaacaacacaatttataaaatttaagaaaaatatgattgtcactggtaagttgagatacactagcaaagttttttgttgaaggcacatttagaactaaatttaagtgaattggctgagagggtatggatgagggaatgcatgtgtgaccaatatgagagatgagtaatttcttaccattttcaatgattatagtctcattactattgtaatgcccggaattaagaaaaggattagcaaaaccctaattagataattatgagttaattgaggaattatattat

SEQ ID NO: 386114 - DNA, 1038 bp, Cannabis indica
aaaaaagaaaaggagggaggcacttgtaacttgacttgtgggctaaagaaatttagtccttattttgtttcataagtatcaacatttgctctaattggtttattatgatgagtttctttttaaaatttgatatttattcattgtattttgtttatcatgaatgattttttctatctcatttggtctatttttggaaagaatcttggtttattcttgtttcgctttgtctattttttttttaaaaaaatatataataaaaagagtgggacggttttctctttgttagagggcatgtcaatttattttttgtttactgttcaaattggtttcctttttgctcctcattcacatctttatttaaaccaattcttttgtcatttaatctcaccatcttctcttcgacccaatccctcttctcattggtatcttgtctctttgtctttctttttctttctcaaaaattcatggctaagacaaaaaacttagggcatccaagcaagatggttgaaacagaaactgctccctcaaatgcttcacctgtgccttcaaaatcgcctcctactgttgcaactgcttcaactccaagtgattcatcacctcctcggtgtgaatcaaagaatgtggctgtctagaaaacttcttcttccattcccacttccagtaaaagggctctcaaaacactggctcaaaaatcagtgagaccgtccgattgcccaaatcttctaggtctgattcgaagtctttatcatcgactactaaggcatctccttctcatgcctctgagtctcccctactgcaactattgttgcttctgtagcatcaactccaaagggcccttcctctcagaccagtgcctaacaagcttctcttgagaaggaagctcgcaccaaaaggcgtcatggccagcccattcttgctgccaaaaggcttaaaccaaatcctccctcggcctcctcaagttctgatggagaagaagagcccatggaagtgtcatctgacgactacgagaccaaaactgagtctttttcctctaaaaaa

SEQ ID NO: 386115 - DNA, 580 bp, Cannabis indica
aaatataaaaaattaaataaaaattcattcaatgaaagatgttaaagtcacaactcataaaacaaattaaaccaaatcaaaaattttaaactttgcaacaaattcaagacctaaataatctcataactaaaaaaaatctagaaactgaataaaaacactagctactttctactttctttgtctcaaaatttaaagtataaatataattatacacataaatatataatatggaatgagtcatggaaccacctcaattattgtccttcgtcgcactgttgtttaagcgcgacttgcgtcgacggttggttgcaatggcgactagtgtcaaggctgcttgtagggctgttcatataaactgggaaaccgcagtttaaattcagaccactacaatccgaaccattgtaaactgtaaccgggaaaaccgtttttagtggtttggtcaatccggaccgtttacgtcgtaatggttcggttgcggtttgtaatatataacggttaaatcggaccggaccgtttataataaataattaatttatatatttttttatatatgactatatgtataatttagaattttttt

SEQ ID NO: 386116 - DNA, 643 bp, Cannabis indica
cgttacatatatattcatacgtatatatacatatatttacacatatacacgtatataaatagatttaaaataaaaataaaatagttaaaattaaaacttaattatatctatacatatatatacccaagaatatgtccacattttataaaaatacaaatattggtgttatgaaaaatatctagaattcggtggtggacggtgatggtgcggtggtggatgatagtggtgcaatgagactgaaaacagagagagagaagagtgtacggtatggtgctgggtgaaaattcagagacagaggaagaaagaaagaagaagaagaaaaaaaagaaatggttggaggcttcggccccattatttatatagattttttccgacgcatttcgttgtgctggaaaaagttataaaacttaccctatattgaaacacagcgtttggaaaaacttttatcggtgcacatttgtgccactaaaagtattctcacctaccatatttttatgcgagaattttctcacattttttagaccttaatttcccccctaaaaaccaatttttttttcctgatagatgtcgtgataaatccaacacgcaagtatacgtatcgttttagcaagtaatactccggtaagtgagatcgttcctacga

SEQ ID NO: 386117 - DNA, 844 bp, Cannabis indica
aatgccctaactttgatgaaaggtcaaaatgttaccctactagtatggtactccattaataagatcatgactcgtattttgacttttgatgaaatatgaatgatactccttactatggtaagatgggagaaagatttatctacatattgtaaggtcttgagttgtgtgggataagtcttttttatatatgtgactttaattttagattttagatgttttttatattattgcagtgaggtggtttggattttcacggttagttgggtctttctgatgttctctgtggtaaggcgactgcgtgttacttaactatggagaaagcaaagaatcaagcttacaagtttatcatagtgaaaagcgattctaaaatagtaattaatactttgaacgaaaagaattttagatgagaaattatgaatatgaactattcttctttttgtaaaaggatctctcatttttttgttggtcgtttattttcttgtatctcatatattgtaattttacagtctataatgtaataaagtgggtctttacccacaattagtattatctttctatttcttctttgccaacaaacttattttgtaataaccacgagatctagtcttttttattcaaaatgatttccttttaaaagaaaaatgtacgtttatgctttggttgctcttttacgggaggaaattcaaatattattaactttttgataccattaaaaaatgttactttaaatgataacttttttagtcataatataatatttttttgactaaatataatttttagtcaaaacaaaaattacttatgattaaaacataatacatagatacaaattgtcactaatata

SEQ ID NO: 386118 - DNA, 1101 bp, Cannabis indica
acatcagaagtatatatcttttttgcactgatagcacttctcacaacagatcacaaacgggtttttagaccgatgacactttgggctcacaacggatcacaagtggctctgataccatgttagaatttggatgagatgaatgagattctatctcaaaatcaattggcaatggaaggagtagtccattcatcttatatatgacaatttattttcactcattagcaatgtgatagtaactctaatatttttagaaaagtactatgggttttcatacttttgtataaaatatgatttttttttcaaaaatgtcatttataagaaaactaaagaaaaagtacaaaaaataatgaaaaaaaatcaaataaaggtaacaaggtattcttatgataatgaaggataattagttatacaataaaaggataaccgggtacttaatactattttttccatataaaataaattttagagaaaaaaaatcatattttataaacttaaattttaaaaatcataataataattttttttttaaaaaaatgaattctttaatcaacaaccaaataattaaaagaaaaaataaaaacaattcaatctcaaccagatgagaaggagagaaggccccattccaattagaagaagctttaacatcaaaataataagagaaaactacataatatacctacttcattttatttgtttttatttttacttctatttttatattatttaatatatacccacttttaaaaataatatcctcattaaaccctttggttaatgcaaatttacgctagacttaagtaaagagtcactacaacaaaagggactttttatcccactttttacatttgaaaaaataaaaagtgggataaaaacttttgatcccacttttacatttggaaccttaaataaaagataggaacaagggccttgtttggcaatcgcacaaaaaaaggtgttggaaaggaaatttttatgcatttgccaaacgcaaccttagcattttaagtgagactttttatcccggtttttatgtaaaaaccgggataaaaagtcccaccctatttttttttatagctgcgcatatataaagaacatttaggt

SEQ ID NO: 386119 - DNA, 4589 bp, Cannabis indica
atgtgtatgcatgtgtatacataatttatatgtgaattattctagtagatatataaacaatatatatcggtatcacacaagtgcaagagaagatcccttgaaatacttcatcatacgtaccgtacgtgtcctagtgtttaccaatattttttaagaatgcatggtttcatatgtatatatattattatataaataagtttaagtgctaaattactgcaaaccagtaaaataaaatgacacgcactaacgtttttttatttatatatacacataaatatatgtatatatatatatatatatatcgttcaggaagtactattgttaattaagcacgtatatccgctaagattaagagttttataagtctaattaattataatagaaactgcaaaataataataataatttcatcggggatttggatccgatttttattccacaaactctccaattgtgtcattaaaagatgcaaattcattcatgtattataaataacgtacggttggaaactaaagctaaatttagtaagttatcattttgagtacatgttacaacctatcaaaaaaaaacatccacccattctttctcaacatcattggtttttaacaacctattcttctttcgatcataggactaataatggaaaaaccaaagacaaaacatgcaaaacaaagacaaccattcatacaaaactaaaaaagataaataaataaaacatcacaattttttctcctctctttcttgcctggtctggtctcttgatccaggtaaggctctgtaaatgaaagttcaagttgctttcagtagtaagctagagagaacttagttatcatatcccctataataaaagatcatataacatatagcaaaagaagccaaaaaagccaaattgatattggggcgtacaggaagactttcccaaagatacaccttttatttctgtctttatcagggcatttcgttttcctgtacgccattttcatggtcgacctctgtttatgtcttccttcattctgtttaaccatgaatatcaaaacccacaaattgtctttccttgttttcctttctgttctcttcaactccttccatggctccatctctgagtcagattcattgatattgggatgtggcactgaaaatgcagccaaagatgcagatgggagaaactgggagcctgatactaaattcatcaatggagaaaatacagtttccgttagagcacagtaccaagacccttctcttctttctgaaactccatacatgacagcaaggatcttcacctccaaggtaacttataagttccctatcaaaccccaaaaaaggtattggcttagactccatttttacccttcagtttacggtagcaacaatgccgaggagtcttatttcaatgtcattgcgaatgatttaactctattgaaaaacttcagcgcttctctcacgtgtaagtctcttacacaagcttatataatgagagaatacacattagctccatctgcctctgattttctgagtctcacctttgagccagctgttggttttgcttttgtgaatggtattgagctaattatggtacctgaattgttcgacactgtttcagtcatgggattttcagaccagaccttagatgccaagaccacaaatatgcagactatgtatagattaaatgttggtggtcagtatatttctccaaccaatgactcaggtttaaccaggacatggtatgatgattacccttatttgtatggagctcaatctggggtgtcaattgaggccagcccaaatgtaaagattaattataaaaaagtacctacctttgcagccccaactgatgtttacaggacagctagatcaatgggaggcacaaaagaaatgaacctgaattacaatctcacttgggttttccagcaaattgatccaaactatatgtaccttgtgagattacacttctgtgattttaaatacgctaaacccaatgagattgttttcaatatctttctcaacaaccaaacagctcaatcgggagctgatgtcgttggttggtctggaggaaaggctgtgcctacttataaagattatgttgtgtatgttactgatgggaagggagatgaagagctttgggtagctgtgaaccctgccactgaaacaaagccagaatactatgatgcaatagttaatggcattgagatattcaagatggaagctaagaaaaacttggcgggtccaaacccaaagccttctgagatgttggctaagaatgagcaacaacaaaaggcctttcaaagtaagacaaatcatgcccaagtcattggtggagctgctggaggagctgcagccgtcggtataatggctgcattgtgcattgcagtttaccaaaggaagaagaggtatactggtacagattcacacacttcaagttggcttcctatatatggaaactcccatactactgccagcaaatcagcaatctctggcaagagcactgccagtagccacctctcagctactgctcaaggtcgttgcaggcgtttctcttttatggaaatgaagaaggccaccaagagttttgatgaggctaatgtcattggtgttggagggtttggaaaggtctacaagggaattatagatgcagggaccaaagttgccattaagagatcaaacccatcttcagaacaaggagttcatgagtttcagaccgaaattgagatgctttcagagttaagacacaagcatttggtctctctaattggcttctgtgaggaagataatgaaatgtgcttggtttatgactacatggctcttggcacactcagggaacatctgtacaagggtaacaaacctcacctttcatggaagcgtaggcttgaactttgcattggagcagcgaaaggtcttcactatcttcacacaggagccaaatggactatcattcatagggatgtcaaaacaacaaacattctcttggatgagcattgggttgctaaggtttctgattttggcctctccaaaactggaccagatatgagcactggccatgttagcacagtggtaaagggaagctttggatacttggatcctgaatattttcgaagacaacaactgactgaaaagtcagatgtttactcatttggggttgtcctgtttgaggtgttatgtgcaagaccagctttgaatccaagcttaccaaaggaacaagttagtcttgctgattgggctctacactgccaaaagaaagggactctggaagacattgttgatcctactttgaagggaaaaatccaccctgaaagtatgaagaaatttgcagatacagctgagaagtgcttgtctgaccatggaatggaccgtcccactttaaatgacatattgtggaacctcgagtttgcccttcaattgcaagaaaatatggacggttcaagccattcttcaaagcgtggcggcgagaccatctctgaggatggtagtctaagacatcagaatatggcaatgcattatagcaacttgagccttggaagtgacagcgagctaggaagtgatgacacttctgggcaaaattctactgcagtcttttctcagattgttaatccaagaggacgatagagtatgttgttgatggtgattgctatgctactaaagaaggattaatcaaagaaaataaaaaaaaaatcagatgcatagattacttgctcgttgtttgcaatatttcttttgattttcttccttttttttttcttcatttttttggtattttgtcatttatttcattttagcatcatctattggataggataaacataaatagcactacaaattcatgtttattctgcctggtgtttctaaatgataaaactaatatttatatatatatatatgtatgccaactagggttgaaaacgggtcgaaacttggttataacaggttcacatgttacaacttgagtctcacaggtacgagttttcatggggcaagtctaacgggtacgggtttcgatttttgcttttttttttgtaccaattgtcgagtgagtgtatggatctggtcattgcaaaccataaatctgatggtagttacacactaatatatatcttacttattatataatatttcttacattttgacaggatttgttgtgtatattaacataatatactttttttataatagaaattaacattaaaactaacagatccatttgaaaaaataactacaaccagaatcttatatcgcactttgttatatatttaatctatcgtatatatatgtgagtgaaatatttgtttatccaatcgaatgacttattctcaccgaccctgcatcagcgcatctaatcaggattcctcctttcctattaattagtgatatagaataaacctaaatatataagagatttgagtaactgagtgagggagaggttgtggtatgagaaagaaagagatgagatttagtagggctgctcatcaaactgctcaaaactgcaaaaaaaatacggtttgaaattctttccggtgtggtcgcggttttaattttggagaattaccctttttttaacttttttttttttctaaatttacggtttgagtttctaaagt

SEQ ID NO: 386120 - DNA, 2451 bp, Cannabis indica
tttccttccttgtgttgttgaacagagaccgcatcacggccccattttgagttgcggatttggcttttacattggttgattcgttggcgaaaattcccggttatatctctaccccacttcccaagcatctccccacattttgaaattttctcttgaatgttggtacagcccgtccctgaccagcagctctcaatgatctgcttgcataatggttcacggatccatgcgttttcaaagcggaaggagtgatgataagttgttgggaaattacctttaagaagtaagagtagtgggcagtggtcggaagaagagaactccaagttgtacaagatagactgaggaaaaagagccagccattcgttattgatcagtgctttgtccaggcgttcttctatccagtcggtggtattcctacctttttcccaagtaaacgggtacccctcaagagccatgtcggtcaggttacagtcattcagagcattgttgaagccgattatcaactgttctggatagtttcttccacctttcttttccaattgcgagcccaagttattcatgtctcccataaggcaccacgggagattattttcttcctttaaagaacggaacaggttccaagtttgaaaacgcagctctctcctcggctctccgtaaattccagtgaaacgccaagatggattccccaccttctgaaccatggcgtcaatgtgatgagtagagaaaccttgaattatcacttcattttcttctttccacaacaaggccaaacccccactatgcccatgggcttctactacaaaacaaccttcatagcccaagtgggctctaatactttccatccttgtcttattgcatagagtttcacaaagaaaaagtaaaatgggcttcttttggaatacaagatccgataagaattgtttagcccgtgggttcccaagcccacggcaattccaactcaaacaactcataattctgggcgggcctggaaaccagaacccgccaaaagcccattttttgaaaaccccccaccatcttgttccatttcttcagcattaccagcattgaccgtagcttgtgggcccatggacacacccacatttgaatcaggtcttcttctttttgagtcagtgattgtagtgattgtggaatcaaaaaaattcccattattattgacatttaaagtcaaatcttcttcattgactcccatgattttatccccatattgatgcctctcattcggccaattattattgatatcatatcccataatgttgccagccgatcccactaattgctcctgaatcccaggagacaaattgacacctctttccccactgccaccatgagaagcttgactcgactcgccccttaccgccgcccccgaacggagccattgtgccccaaaggtggagtgtcttctctgtgtcgacgcccgcagctccaggttgtaaggcttttcttgcaagtgcaatggtttcagaaaaagcctcgggcaaaacttctctgcgtggcctatttttccacatatgaaacaaaaagttggaagcttctcatatttgaaattgacccagtaccaggaggaatcatcgttgctcactttcattcttctcttgattggtttgtcgacatttacccgaactcggactctaaggaaatctctccaaacacccacaaagttattaggatccgactctatgaaagtaccaataaaattccctagcgccgtaacaacactaagggtcatgttgcccggttgaaggttatggagttgaacccacatgtccatatggttgatctccaccagccttggattgtccccttcctttaatcttgtaaaaataagaggtttgcggtcataagtccaggggcttccgtctataactctttgtatgtcgatctcatggtagaattggaaaagaaaaagatttgggttgagttcttttacgtacattcccatccccggttgccacaagaacgccatcatattctggaagacgttaaaatccgagactctccctgtcaacagtttacccaccaagcaccaccttgtatcgatcacgatctcttcggtcctactcaccggaagctttaacacctcttcctcttcctcatccaatctaacaactccttctgtattctccattccctctgtatatttctgaacgagaccaaaactaacaaaagcaaagaactggacaaactctcaaggttgagagacagcaaaacgtatcaacagatacgacttataaaattatagtttttatatatatacaaaggattctcttttactaatccctttcatttaataattagctaaaaatataaaataataataacaataatacaaaagtgaatataaaatttaataataaaataataataattatgaaagtcattattaaatgagcatgctaactaaactttaataataaaatattaaaaatagcataa

SEQ ID NO: 386121 - DNA, 1630 bp, Cannabis indica
cgttttagtgacatttagtaaaaaaaaatatagtaagaaactatagcatggaggacataaatagaacttacagtatctagtaaaaatttaataacaaagaagactaaaaacctaaatagaaacagtttaaaaatcaataatgaaataggtgacaataaaaagagaaactatcaagaaaacataaaagtacaatttttgataaacttaataaaaaatttatcaatagaaaagagaaataaactaaaccttaataaggattgtagcttctacatataactcttgtgcaatccttccaactccatcctcaaatacgtacgatccatcattactgcaatcgcatcatcatacccatatcaaaagcaaattttcacaagaaattcgatatcaagaatatttataaagtaaagagaacgaccgttttctaaggaagctaaagctcaccactgaaaaaatttacagaatatttatgaaagtaaagaaaactaccattttcgatagaagctaaacaaagacgctcattaccgtttgtccccaccattgcacttactcgtcgttcagagatcacctctcgttcagccacaactattgttgcggctataatcgactgcacgtcgtgcatttgcacccaaattgatcgcattttttgatcaagcttttgggaacattcaagatcgctacattttgggttggaatttcatgggtagggcatgcgggtgtgagaaccaatcatgggactgggaaacctagatgaggaaatccaggaattgatcgagaaaacaaggaaaaaatataataagtgcttgcttaaaaaatatgaacgacccataaaacctagatgaggaaacccaaacacgactcgggtcttctgtggatgatatggacgatgaaattatagatgaagataaattgagaatttaaaagttaacgaagatgttaatctcatgttagtttttattaaaacaaaagggcacgttaaataaataagccttaaaacaagaattctgttacatagccaaactttatataaagaagatatagattttttcctttttttttttttaaaaaaaaagaaaatagatagccaaattaaattttaataaaaaaatagaaaaaatgagagaattaatgaatgaataaatagaagtatttagagtgattttagatgtcaccactttatatctctcctttaaagatgtatatagatactagtaaaaaactacgtgcgaggcacgtatactaaattttatgttaggtattttttattttatttaaaattgatacaattaaaaattaaagaaaaatattattagttattaagtgagattattattatgtatatttaaataatataatttataattttgacaattaaaagtaaatactggatgcaatatattagtgtttaagaaaacttgataatttaatgttcaaaaacttaaggaaacacaaattaaatgtgtgtaagataaaaaaaaaattaaaaatcaatctctaaattgttgataattgaagataacatctgtctaaaaattgtagataagaaaaataatcatactcatgggtggattctaatcttcctttgtttcgacagagataatagagtaatttttgtttaatagccacaagtata

SEQ ID NO: 386122 - DNA, 3169 bp, Cannabis indica
cagggtttatttatcatttaatataatagaggccagatctttaatcgctaacttttgtaaaatacaaaatttaaaataatattaattctacaatatatagtactccaaaataaataattactcattgaaaataatagcaaatataatacataaggaactttattatttctctaattagcttatattttcaatgagctttcaaaaaaattgaattcataataggtcgagctttgcacattgcttctaatggcacaagtttaggcattacaacagctttgctttcagtcatgtctattttttcttcaccaattcttttccattcaaaacactgaatcaatgaacccaaagtcaagcccaacacacgttgggctaaaccagatccaggacaagctcttcttcctaatccaaatggcatcaagtacttgtcgttgttgttcctctcaaatctttcaggcttaaaacttgtatgatcatcccataacttgggatctctatgtatagcccacgcattaaccataactattgtatcgcgtggaatatcatatccttcaatagtacaatcttctgatgaaaagtgaggtatgagcatgggagccgatgggaacaagcgtaaagtctctaagatgatgttgttaagatatggtaattttgaaatatcatcttcatccatcaattgttcaccaattttttcgtcaatttcagctttagccttttctaaaatttctggatagttaagtagatttgataatgcccattctaatgtcactgatgacgtatctgtcccggcccgtattaaaatctgaaataccgaaaataaaatacaacttttatctttagattacatatatcttgatatataaatataaataaaaataaatatttagaaagtaagtatacttaaaattaacataattttattggtataatctaatttgcaaaatgcttaaaactgtcctcctttattttgttgctcaaaaccaaggagaatatgtgcaaggtagaatcattggccacaatattatgatttgccaagtcctcatccataactatggaaggaaatcaagaaaagcaagttgtatgtttaaattggaccttcaaaaagcttatgacaccattgaatgagactttaatgaggagatgcttcatgcatttcagtttcctccgaaattcatcaagctaattatgatttgtgtgagaactcctaagttctctttaatgttcaacagttctctacatggcttttttgaatctaagtgaggtctgagacaaagagacctcatgtctcctcttctttttgttctgggcatggaatacctctctcgtatcatgcagaaggttggggagagggatgactttatttttcatgagagatgtgtagatctgagactgaaccacttgagtttcgtggatgacgtcttactttttgcaatggggatttcaacagtatttacctcatgcttcaagggcttaaacttttttcacaaacttcaggtttgttcccaaatccatctaaatttgctttctattgtaataacatgaatgattacgagattcagagagttcttgatattttggacttcaagaaacatgatttgccattcaaatacttaggcatttcaatatgtcctaagagaatctcaacggctgaatgtggcatattagttgaaaaaatagtggcaaggataaggagttggagttttcaaaacctttcctttgctgctagagagatgcttatcaattcagtattgatggccatccaattctattggtgccaaattatgattttgcttagaaaagttattcaagaaatagaatttatctgtagaagtttcttgtagactggtactcatgttctcacaggttcagctgcaattgcttagaacactatttgtgatactaaatttgcaggtagtttgggatttagaaatattcctgactagaacttggcatccatgtttaagtatgtttgggccatagcaaagaaagaggacaatctttgggtaaagtggattcataatgtgtacataaaggaggaaaactaatggtcttacaagaccacacatgctgccagctggtattggcgaaagctggtagctataaaggagagagcaaaagaagtgtttgagattaatgtcctaaatgacagatataaggtggttgcgggctttcaatcactagcgcctcctatttgtagagttgagtggagctctattgtatggagccgaatgaacttgcccaagtatagtttcatttttcggctcacgatgctcaatcggcttaagacaaaggacaggattcaagtgtataacacggttgaagacactaagtgtctattttgctagaccgaagaggagtcaatgcaacacttgttttttgagtgtcctttctcatttgattatttaaggaggatcaaagagtggctttcttggaggatggcttccaacacccttcatcgaattgtcaggtggatccgaaaagctaagattagcaaggttaaaaagatgattttagctgctgccttggcagcactcgtgtataccttatggcgagctggaaatgaaattttgtggcaaaactccattccaagtatagatagcatagtttggaaagtaaaagatgtatcaaaaaatagaataacttgtacatagccaaagaaagcatccattagtgacaaagaatggttagataccttgtaaagtttatttttacttagattcttcttattggagaatgctatttgtttgtacaaattaaaaaggcttgagcaatgaaattcacttgattcatcaaaaaaatctaatattatcatattcatcatatatactttatgttggagtttgactcaagttatttatttctttatttgtttatctatatttgttaagtttacaattttttttgggtaattattaattgtgggttaaaggaaaagtcttgggtggctaagttttgatgagtcttcttaaagaaagctttggaaatgtttgggccccaagttaccttaatcctaatatctaaataaggtccccaaggttccacaagtctttgatggctaatatgggttggctaataatgtgtgtgtgtgtgtgtgtgtgtgtgtgtgtgtgtgtgtgtgtgtgtgtgttgtgtgtgtgtgtgtgtgtgtgtgtgtgtgtgtgtgtgtgtgtgt

SEQ ID NO: 386123 - DNA, 780 bp, Cannabis indica
ggagtttggcaaggttaattatgaactatatgaaagtcgcagaacgattacaagaacaaaatttaaaaaaaaaaaaaaaattgatgataattaagactaattacataacagcttttctttattttttttcttttttatctatatatcaaaataatctaaatatacataaaaaaaaattaatatgttattattaggtacgtaccttgggaagctgcagtgacgacatcttctttagaatctctaatattgagaatcaatcttgtcttaaaattgggatgagagccataaaaatctgagagacccaattcaatacaacttaaccaaatcttaccaatctgagtttccatgtccaaaatgacaccaactttcactggaatagtgtcgttttgagccatgcaactacaacttattattgcaactaatatcaagattaataaaggattataattctttctcctcatcatggtcttaataattcgattattttcaatactactgctaattcttttcattctatatatgtctatatatatatatacatatattataggtgtacatgcatgtgggtcctgaattaatttgtatatatgcaatgcaacaacgtttcatgctttatgtaaataaatatatataattgaatacatatcttaattattaattgatatgataatataattatattttacgtacaatgtcaacgtatatatagtcgtcttatgtaggaaggaagaagatataaaaatagaaaatttgaggaatattaattaatattttcttcct

SEQ ID NO: 386124 - DNA, 2815 bp, Cannabis indica
catcctgaagcattgcttcatacgcttgatacgatcccaactactgttacatcagctatgaatgattcattgattaaacctttcacaagtgaggaaattttcagtgctctcaaaacaatcaatcctgataaaagcccgggtagtgatggaatgtcagcaatgttttatcacaagtattggacaattgtaggagatgttgttaccaaagtggttttgggtgttttgaatgatggtaatagtatggaaactattaatcattcactcatcacacttattccaaaaaccaaaactcctactggtatgggtgattttcgaccgattagcctttgcaatgtaatttataagatcatctcaaagactttggctctaaggtttaaagatgtactcccagcagttatctcagaaacacaaagtgcttttctctcaaatcggcttatcacggataatatccttgtggcttttgaattaattcatcacttgaagcataagacaaggggtggtagaagctattcggccctcaaactagacatgagtaaagcttttgacagagtcgagtggatatatatccaagaagttatgttaaaaatgggtttccatcaaaaatgggttgatttgatcatgagttgtcttacttctacaaaattctcttttatgcttaatggtgaagaagtgggacatgttcaaccaaccagaggcctacggcaaggagaccctttatcaccatacctattcttgatttgttctgaagggctatcaaggctattgcagaatgaagagcacattcagaatcttaaaggtctgcgcttaacacgtcattcaccatcgatttctcacttattatttgcggatgatagtcttctcttctgtgaagctacacaaagttcggcaagggcgatcaagaaagttctggatatctaccaccaagcatcaggtcaactcttgaatactacaaaatctgttatgtcattctcccctaataccactcaagcagctcaggatttctttcacaacactttgggcatgcctattagtgaatgtcatgagcgttatcttggattaccagccttctcggagcgagataaaaaggaaatgttcagtgatgtcaaagaacgaatatggcaaaagcttcatgcttggaatgagaaattattttctgttgggggaaaagaggtacttttgaaggcagttgtgcaatcaattcctacttatgccatgagttgttttcgtctgccttcgactttctgtagccaattagaatctatgatggctaatttttggtggggatctaataaagatggttccaagatacattggagaagttggaaattattatgtaaatcaaaatttgaagggggtatggggtttcgatcctttgttcatttcaacaaagctctccttgcaaagcaagcttggcgaatctttaacatgcccaattctttgctaagccgattgttaaagcatagatatttttccaataacagtttcttggatgcaaggctcggtcactctccatctctcacttggcaagccattcattgggggagggaattgctaatacaaggtttgcgttttaagattggtagtggtttcaatgtcctagctggctcagataaatggattcctggacataacgatttcaaagctattagttatcgaggtccatctaatctgccagtggccaattttataacagaacaaagagaatggaacattgctcttttggagcaatactttctgcctatagatgtggatagaattgtgaccattccactcagttttttcccatcaaatgattgtctcatttggcaccacactacaacaggctgctacacggtgaattcaggttttcatttggcagaaaatttggcagaggaacgagaaactagtgcctctaactcacataccaattggtggaaaactttttggagtttgaacttaccttcaaaggttaagattttcgcatggagggttatgcagaatgctctgccggttgctactggtttatgcagaagaaaagtaattgattcggctatatgttcactatgtagcaatgcttgggaatctattggacatgccttatttaattgtaacaaagctaaggaggtttggaagcttaccaagtacaccatagaccatacacatgcttataatatgtataatggtgattacataatccatttatccactctacattctagacaggattttgaatctattgtgtgtaccatgtgggcaatttggcatgaaagaaatcgggttatacatggtggtgtctctaaaaacagccaagctattgtggattttgctgttcagtatttggacaagtatatgcgatcaaagcttcgaaaccagaagcaaaatcctgtctgcaccaatatcaataattcagctcctgtgcaagcaccagttcagcatccaaaaccaccaattccatggactccaccgacttttgcaggcttcaaattaaatgtggatgctgctgtcaaccatgacctcaagatcctgggtgttggtgctgttcttcgagaccatacaggtaccgtagttgctgcactttctaaaccagttcaaggttgctttcgttcggatgaaatggaggccaaagctttgtttcacagtctcaattgggccttgcagttgcaattacaaattactcatatcgaaactgatgcactgcgagtttccactgccattaattttccttctcagaatctttctagttttaatgatttaataatggatgtttgttatcttttatcctttttctcgggagtaactgtttctcatgttttgagaaatgctaaccaagctgcac

SEQ ID NO: 386125 - DNA, 1361 bp, Cannabis indica
cagaagaggtgaaatgaatcttccatgtccgaagagcacataggacattcggtgtccctaatggagaacattgagttgagtttactccgagtgaggagattgttagatagaatcctccaccataacatcttaagtctactatggatgttggccccccaaataattctccacttagcatcattggtatcgttggcattcacgtttttaactactctataagcagatttgatagagaatataccattacgctctgggagccaaatccacgagtcaggggacgggatgttaggaagggtaatgtttaggattcttttggcgtcatcatgatcaaaccaccttcggatcaaatcttcgttccactggttgtgtcctatgaaattttccactaagctgataccaaccgtggcatccaaacggggttggggctggagaatgccattgggaacccacgggtggaaccaaattgaagtggtcttaccatcaccgattttacgacacatccctttggataagagatttctcgtatttaagattgctttccatagagtagaatccgtagtgctagcttgaatgtccatgaaatcacggttatgaatgtatttgtcattgaccaccttactccacagactggtactgtcagtaagagctttccaagcctatttcataaggaaggcagtgttaatggattccgttgagcgaaatcctaatccaccacaaaccttagggcggcatagcacatcccatgcaatcgatgcatcgatctcgtttcctggcatatctccccaccataaatcacgaagagatttatcgattttcctggcattgtgtaaaggaaggacatccgaagcaacaacatagttggagattgctgaaccgaccgatttaatgagacaggacttcccagcagatgataacagtcttgttttccaaccttggaccctcttcagcactttttcaataatgaactcggtgtctttggttcgtttggttgacttgaagagtgggatccccaagtacgaagtatcaggcgccatttttttcatcgctaggaattgggagatagcatgcgtcctagcccgtggaactcccctagtgaatgtaacggatgatttcaggaggtttattgattggccagaccagttgcaatactcgttgagacaatccataaacgctttggcttccttcagagtagcttgtccaaacaggatgatgtcatccgcaaacataaggtgggtaaccgaatctccttgtcttcccattctaaagcccttaatccggttcttattctccatttcaaagaatagtctcgaaagtgtttctgccgccaagataaaaagggtgggagatagcggatccccttg

SEQ ID NO: 386126 - DNA, 967 bp, Cannabis indica
tttgagcttgggaaactccgtgagtcgtttcgattatggtgttgaatattgaatttttattcgtttcataaaaaacatacttcgttcttacatagttttgatgggaaaatataatgtatttttgaattatttgcgtatttatttgttgcgcagttacaattagttttatccaatacggaaatttaactaaatcttttgtaataaatttgaaaaatggtttatttattatactgagaatataagagctccactccacaggtcgtgcttgacttggacgagactctagtgtgtgcatatgagacatcaagcttacctgttggtatcaggaaccaagctactgaagctgggttgaagtggtttgagcttgaatgtttctcttctgataaggtgattttgcttattatgataagaattatttgtagtgtgttcattttgattggtattagttcaaatgatcaaacttgtacttacttgagcgtattgggattttaaggaatgtgaaggaaggcctaaagtcaattatgtaacagtttttgagcgtcctggattgcatgaattcttgaaacaactaggcacatttgctgatcttgtgctgtttactgctggtcttgaaggtctgcttattatcactattattgttttgggcgtttaaggggtgcatccttctcttaatttgatcccccatttttttgttaacatgaacacaggttatgccagacctcttgttgatagaatagacgaggagaatcttttctgtcgtagactttatcgaccttctactacaagcacgtaagtactgtttggtatattctttatagctgttgatactgaaatggggaaccatttttgttgagcggtgtactcgtgtttgtgtgtctttgttgtgcatgtcaaccaagtagtacattagtgcacgggtctcatctaatgatgcttggtttatgggaggccacagcttatgacgttt

SEQ ID NO: 386127 - DNA, 1552 bp, Cannabis indica
ggatttgattttgggtacatcaattctatatatatataatgtactcactactcagtccaacgtcccacctcgtggcctcagaaagggacaataataataattaaataattaagatgttatgggtggtactgttttgtgtaaatatttttatatatgtaatggactatatgtactcatttttatttgggtgagttttatttgggttagctcttggacgttttcctgctctgcaaagacggcgggattgtgttggattatcaggttatatataagtgtggtttctgaaacagaaactactgcccaaaacaacaccaaaaacaaaaatgactttggttcagttccttcagttgtttcttaacacgtacagactctgtttggtattttatattttcatctctagacatgttatatatatgtgttcattatatgttaaattgatctgattggattccttttgccctcttcatgcaataaatgtatataagctagactatatagtagagtacaatacatctgtctataaggcataataagaaactataacgttataattaagggtatgatgggaaaatgatgatgctagcttgatgagttgtaaatgtcttatttattggaatttaaaccccaaatattactataaataataaaataaaagatatatatatataaaaaaagaaaagcaagaaaaaatctcgttatttttacgtttttaaagtttcccatggagatggagaaaaagaaaagaggaaagctgagaatatttttcaacaaacaggaaagcagtccacagccacacataattttgggtcactgtttcggttagctttttcctctgataacttttgttcacaactcaaaagtcaaagggttcagtgagttgttcaatctctaatctcagctcaaagatttgatccagatggttttaataattctttagtcaaagattttttttgtccttttattgtaaactagcataagttgggtttttaatgcattttcagttgtaatttattaccttaacatgaaaactatttagtttttctttcttttcttttccattttttttttaaagaaattagggttcaatgagaatattgagtgacgatatactccatttgaaaactatacgaatttttttttttttttgaaaggggaaattatcaagtttagaaggtgtttaccgtgcaggcggtgagggttttggcctattttttttttaaatcaaagtgcatatgtattttttgtaatttctcaaaccgcactacaagaacttaaaaaaatttatgtattatggtgcagatagtttgtgtggtgtgggcactttgatacaaccctagtttaaattaacatgaacaagtattataaaaatatttgtgtgtgtttgtctcacaatattcatttgtattgtggtatttatattacacttagtatttttcaagtcttgatcccatgacagaattataataattgaataaatactaaaaaaaaaaaagaaaacaatcactaataagttttttacttcgagtcaagagggacccataagtaacaatgt

SEQ ID NO: 386128 - DNA, 1018 bp, Cannabis indica
cttcataaaaaatcaatatgactcttgtatgcacattgttttgtgcaagaaaggtcactaggggtacgacacgtcttcaaccctccttcctagaagagaaggactgcttgaagcttgtcacacactcagtgtctcaccctttggccttttctaagcatggtcattgttcaaatttttgtgcagctttagactttccctgtgaaagccaaagtttgccactgcgaaatttaacatgagtcacgcttattggagcagaccttagcataagttaattgctcacgcaaggacataggcccaactttcccactgagaaactaaaagcatgccattctttgaaaacttatgctttcccttacgaggcctatatcagagcaaatgacatattataaacacttggatggaaatatggaaggacccgtttggagccagccatccaacttggtttccacctacaatcccacgacttttcctcgcataagcgaggagattaccgccaaacttccagaattcccctataagtagtcatagagaagaaagacccagcttggataaataatgtaaataacacttctcggagcaaaagttgggcaaaacagaactgtggccgaacctccttctcgaagactggaaagggatacaagttggagttcaagaaaatgattgagaatttggaagagaccaaatctcttagctcatttaagggtaatgcctgcaccgaacaattggttagtgcagcttccatcaacatagagtttccatgtcagttgttcaggtttttactgctgctctttctcttgcttcctctttggcttttgcttttttcctaaatcttgagagatttcaagagatgagtttatgcactcagcgatgaagtctacaagggcttaaccctttatggtcagtcttggttgatatgtgatgtcaaactggccaagttcaatggcccacttgagtagtcggcctaatgcgtcaagtttttgtaaaacctaccgcaatggttgatcggtgtacaccttta

SEQ ID NO: 386129 - DNA, 3388 bp, Cannabis indica
ttttgattagcaaaggagtgcactataaaaaaaagtcactgtagcgtgcctaatcattaaggtgttacaattttggtatcaaagccgccaggtttttattgaagatcgtcaagacatgtccaatcatcatcaaagataagctcgattcactgttcagtaaccctttacttgtttagtaagttaggtgattgggaaatcatgatagtaatatgttacttattggaatgcattacctaaaaatccataagtgcggtatttagaatatatttgatcgttgtctgacttacctgacttatgggtttgcaagctacgtcctatactatggatgcccaacaaaacacgagaagttagtgtaatatggtcgagaccgaaggaagtcagggaggtcaacatcctcaaaattcccgtggacgcggcaggatccgtggaagatttcaaggggcggtcatgaaaatccaccagaagctccttcagattgggagcaatgggttgcaaaattgcaagcatgaatataccagcaagatgaggagatccagaggctgagacaatagggtcctcctgcaatgcctcctcagcaattgccagctaccttggttccagtagtgccagcagaacaacctgttgttggaaaccgaatgaagcctttgtatgaaaggtttctcaagtaggagcctccaatttttctgggaggtataaatgtcatgaaggtcaaatagtggctcatagtaattgaaagaattttgaatttcatgggtttcatcaagaatgaccgagtgatttgtgccacttttcagttccaagaagacacactcgtgtggtgggaggtggtatcccacacccgagacgtcactactatgaacttggaagaattttgggatttatttaatgtcaagtattataatgagactgtttgcagtgctaaaaggactgaattggtttagagagaggccatgtcagtgacaaagtatacaacaaagtttgatcgacttgccaagctggcttcaggtatagtgcccaaagactttagcaaaaagaaaaatacttggcgtgattaaatgccaaaattagacatgatttggtgatacaataaatgacataacaacctacaccgaagtggttcaaaaggctctccaagctaaggacgtggtggaatttcttcatgagccccgatagactccaagtattagtgggaccaccacccttcctgcttctagttatggtagggatggtggtgatagcaatgttaattacaagaggaagaattttccaacatctagttgttcaggacagagtaagaggttttaagggaaccaaggtagaggtggacgtcagggttattcttatcctgagtgccctcactgcaagaaatatcatcttggagaatatactcaaaaggcatgcttttagtctggcatggtcaggaatttaaagaaagactacatgaaaaaggaagagcaaaaataggagacgaaaaccgtacctactcgggtgtttgccattacgcaagcatatgctgcaaccagtcctttggtggtaacaagttagatttttgttaatgacactaatatactgtactatttcactctggggctacacattcatatgtggcgtctagaacaattaataaatttgggtgtactttgtgattttaatgagatagggtttggaatcctactacctagcggagagttggttatctctaaatgctggattaggtctataccagttagaattgaaaatagggagttgagtgttgacctcgtggagttggaattaacaaagtttgatattatacatgggatggactttttgtccaagtattcaggcagtattgactgtaaactaaagatggtaacttttcaggcggagggtgaagatccatttgtttatgtcgggtccgttcagggttctcagatcctgattatttcatttttaaaggctaaagatttattacacagtggatatttaggatttttagtagttgtgactgactgtagtagatccaaaacaattcggcctaaggttttcagggtagtaagagaatttctagatgtttttcttgaggagttactagggttgccgccacattgagagatagacttcataattgagttggcaccaagggcagagcctgttttgaaggcaccatataggattgctctagcagaactcaaggagctaaagatacaacttcaaggaatgatggatctaggttttacccatcctagtgtattgccttggggagctccagtttttttttgtgaaaaggaaagatggatccctccgaatgtgtattgattaccaggaattgaataagctaacgatcaagagcaagtatccattgccttgaattgatgattttttcgatctgcttcagggtaagatggtattctctaagattaatttgcgtttgtgttaccatcaattgagaatttgcgaggaagacatcccaaagactgcattttggaccaggtgtggtcactatgaattttaagtaatgtctttcaggttaacaaacactctactaacctttatggatcttatgaactgagtgttcaaggatttcctcgataactgtgttatagtatttatcaatgccatccttgtatactctcagacagaagcggagcatgagcaacatcttcgaatggttttgcaacgacttagggatcataagctatgtgcaaagtttaaaaagtgcaaattctggttatcaaaagtgccctttcaagggcatattgtcaggaaagacaaaattatggttgattcgaggaagaataagtcagttaacaattggccaaggccaagaacagttacttaggtttgaagttttctcagattggcagggtattatcgatgttttgtagaaggattttctaagacttcaatgccattgacgaaattgactaagaagaaccaacagtttgtatggatcgataagtgtgaaacgagcttccaaaagtttaaatagtggctgatcacatcactagtgttagctttacaatcagaccaagaaaagtttgttgtttattgtgttcttatgcaagctgagaaggtcattgcctatgtttcccgttagttgaaggaatatgagtagcgttattcgacacatgatttagaacttgctactgttgtgtttgccctaaagatatggaaatattactaatacggggagaagtgtgagatctatatagaccacaagagtttataatacttctttacttagaaatatttaaatatgagacagagatgatggttagaactagtcaaagattgtaattttgtaattttatatcatcgtggaaaagccaataaagtatagagctttgtcatttgctttctgccaacgctcatacttttctttcacagctttggatgcattatcccc

SEQ ID NO: 386130 - DNA, 1408 bp, Cannabis indica
ttattatttaatattttatttgtagattaataatttttttttttacaatttcgaagttttgagcgttcgggagctgaggcccacgcctgactcgcttacccttaaggtcgataacacctcacgattgattaactatgttatttttttaaattatatgagacttaatatttaattggttcaatgataatataataccaaaaaaaagtaatatggaccaataatatctttgagtaattctaatatttatattatgagagcatcacgtgtcttaatttgtgcgtatacctaatttaatattgcattattctctcctaatcttctcgacggtaccgcgcgctttattaattgcattgattgtttttgttcaaaagttgacacattattgattatatgtcgagatatgttgaatttaattcgatagctaaacttttttagaatgttaattatagctttgttttcggttattttggattttatatattttcggttattttcgattttatatattttaatttcatttagtttgatgagagaataaattaaccttccttttaccacccttttattttgggttattagagcatctctgacactcattaaaggtttattgggatattgtattgtgttggattgtattgtattggattgtgttagattatattatattctattaatattatttaatacaatactatgtttgatattacttgtaataataatttgtgtaaattattatttttaatacactcgaccccaacaccaactacggttcgggtccgggtccgggttcaggtccgggtccgggttcggatcccgggttacggtctgagtctgaatttgggtctaagtctgggttcgggtccaggtccaggtctcgagtttggatctggatcggggtccgtgacggagattggtgttgacccccaatcttttgtaaatattataatacaagctaatacagaccatttgttatgtattaaataatgcaacatacattgtattaaaaattttggtcgtaataattaatacaatacattactttatccaaacatagtgttatttattatttaatacaatatgatccttatacggcgtaccaaacgagtcataagagtgttaaaacttaatatatcaataaagaatataatattttattttattcctcttgcatatatttttgacatttttatattaaaatattccgataataaatatttctaaaattattaaaataatattatattattattttatatatattaaatggttaattttttttataataaaggataatcatatttaggcatcattacttaacattttttaagaaaaatttacataatagaccaaaaattacaaaatatatcaacaaggaaaattttttatttttacatttttaagttttttt

SEQ ID NO: 386131 - DNA, 736 bp, Cannabis indica
aaataaataaaaaaaataaatcataagattactgatttccattatattttcccttataaaattttttttttggaaaattcaaggtttaaacaaggtctaagaaaaaaatattatcccacaacattgaagagaagaaatagcagaagaagaacccctatgagcctccttcaacctcccgcgcgcctccctattcactctctcgcctatattttacccaaatcttgacctctcgcccattcacaaaccctcaactctctcttctttttacaaacacaaaatctctctcatatttgcaaatagggatgaagccagatttatatgagagggtgggctaactattaattaaagtaccaaacaaaaaaaaagatcagagtcaaaattaaatgagaggggacatcaacatgcatttaacattaagtactaaacaatatatttcaaagattactttcactgataatttgttaaaatcccaaagcttcttttttgcacataatttattaataatgattaatatcttatcttattgggtatagtttacagataattattacaatgtaaagaatatcaaagcttacattattgaaagatgaaacagagtacttatacaagcaactcacgagcagttatttacaactaaaactagagtaacagtcataacaactaagagtaacaaccatataactaacataacgaactaaaataacagacttcttaataacctctaatactccccctc

SEQ ID NO: 386132 - DNA, 1682 bp, Cannabis indica
ttttagcaataaccgaatactttataagagggtcggctagggttccatgacccagccaagaaccgaccaagagtcccaggcccaggcataggccaaccagccttctaaggtgcacccctatggtcgacaagctcccatgagaagaccatacgtccgaccaggtcttaaacaagacccctatggccgaccagggtttatgatgaatcaaaatgtgtttttcaaaaactcaaacatgttcatcatgactcaaagagtcaagaatcacaatgaaggtcaaaattgaatccttttcctcaggaaaccacacattatgcattctaaaactctcatgcagatcaaaataccaaaaagattacaatctatcgtgggaatctaaagatgtttaaagcaaagaaaagcttcaaaacaaccatggcacatccatatgaacaagtgaagaacgagatttgaaagcttacccactagtagaaaccgttgaggaatattgtggaaagcttgaatcgtcgaaatagcacaaaaatctcggtagatggaggacaaggggtgtcagcctcaagggaaatgaagagctttccaaacttgatttttgaagagagagaatgaaatgtgaaaaatgagaagtgagttactcctatgagcttatatagcttcagtggaaccctctctcacttgccaagcatcgtgcatcaaaaaacatgtagaaatgtaatgttattaatttactgccaaggaatgtgattagacaagcaagagcgaatattttaaaggctaaatatattgtaagatctacccagttaaggctacaaaactccaaactaagctagaaagtccctatccgtacaaacatttgcacagggacttagagggcaaatattatcccaatttttttccacttgacgtggcatgtccatgtggccaagatcaatgccacgtgagagtacaactcgtcaacaagaaggccaagccatctaatcaaaacttttactaacggggggtccgagtacatatgagggacgattaaatgacaaaccagccaatttccaagcattgtgtggccagctagcctgcacctggcaagtgcatggacgaccagcctttattggcaggcctttggtgtgtagccttcatctgtggacatcaagctaagcagcgaattgggccttgaaaacccacaaaaataacgggaaaatatctataacttccatattctcgagagataattaacttatttaaagtttatttaattatgtaaatatagattttacattttttaagagatattagtggttattcttgatgtaagctctactatataaaaggcattagtaaaaccctaattccctaagtcttaagctctcaagctctaagtctaaaattcatgtctctctcacacgccgtaggcatactctctccttcacttgagattttccaattcaattctcttattgtaatttaaagagagccacttcaaattccacaacacttgtgatctgtctggtattatctctagtatttgtactaaaattctgtattttaatattcccagatttattatttaattaaatgcagaataataaaactggtactgaaacagtttttctgtagctacagtaaaacactctgtaactccagaagaaaccaaaaaaacaaacagtgcagaaaagtaaaaacacacaaggttt

SEQ ID NO: 386133 - DNA, 1270 bp, Cannabis indica
ttctccgtctgcgacgcctctgctgcgctgactcgtgactctataaatattatatgagttggctcttaagggctacttcgcagttcgcaccgtcggattcttgcgtgcgtatgaatctcatggcccaaattggatgcggggtgggcttacaacaatttgttttaagggaaatatggtatttttaagaaaaactttgataaatatgttattttcttaatgtttttgtattgactaaatatggtacttttaagaaaagctttgataaatatagcattctgtggtatagttcctgttgctgaaggaattttaacaacaccaaattaaataatataacaataatataagaagaatatatgcgaggactcaacctagagtggcgagtattcaaaatactgaatagaaactggaaatataaggaacacaagagagtatagtggttcagtcagatcacggtctgcttagtccactgttgcaaggatttttgtcttgtttcatttcacgttggatcactcctttatatacaaagcaagtgtcctttgatttacacacggattgaattcattatcaatccgtttatatattgaattacaataattaaactaaaatacgtaaacataataaatgaaggacagtttcagcttaatttattaaatacaacaacatatacgacttctatagtgcaagttggttgttcatattcttgcataagctcgcaggcttaagatgcattcgagactagttcagtctaagatgtctgcgtcctgttcaagtcgcttatacgaacatcttgtagtaagtcggtaacctgaggcgtgcgagtccttatcgggttatcgaggttattgggtcatctggaccagctcgtagagtaatgaatcgatctctacaattcgcaggaggatctcgggaatactcgcatatatcttagtatatacgagtcttggactattccttggtcctaccctatgcgagcagtacgaatgcgactagactttgtcatggctgcatcatctcgttgaatctagtccaggcgaggttcatactcgaggagtcactcaatgacatctcatctttccgcgaggagagcgagtacacatgtcattttcataggagtccggtctcgagtttctaggtgagaaaatctcactataacacatgcccctagtttcgtgactgacagatcaggtcatgagggaaactataagcgagaggtaggcgaaggggtgtcacgaggtggtgacctttggttgtcccatcgagggtttcaaaa

SEQ ID NO: 386134 - DNA, 1875 bp, Cannabis indica
tcaattattacctgatcaagacctgaattccagcctctccaaacaccatcactatgctgaagttggacaatttgattatttcgtttacgagatcttgcggtggcatgaaaatatttgatatttttgtcccctccatttaaccaaaattgttttgatcgttcttccaatagagttcttgctgagctaaaatctcaaaataattacattgctcattcaaaaagtcttcatatgagtccgaattgtcacgagacttgaggcttgatagttttttcttactattagacagccgcttcttgaagtgcccagtaagatcacggccccaatcaagtaaagtttcaagacaaagcttagttttatcagcaagagggagatgagcattaacctcccaccaatttcggacaatttggctacataaagtttcacggccccaagcattttcataacgaaaaataacaaccagtttactcataacaacatgtgcgggttcaagaaaataggagtatgatcggaggacaaaaaatcaaaatttgacaaacgagcctcattaaaaatagttagccaagactgagtagcaaaagctttgtctaaccttatttcaatgtgattttgggtcccttttccacgctcccatgtgtatttgtgaccacgcaactgtagttcacacaattggcagtcatgaagagctgtattgaagccattgattagtgattcaggataaagccagccacccttcttatcgtcatgagtggcgatgttgttgaagtctccaagaatgcaccatggcaaggttgaagcatcgaccagctcacgcaaaagctcccacgttgtatggcatggtgagcggtttggttctccatagaacccagtaagacgccagtgaacaaagccaggaacatgaacttccaagtcaatatggtgggccgaaaacttaagcaaatgagcatcagtagaaattttccataaaaaagctagtccaccttttctaccttgcgtcggcacagtaaagctattttcaaagcccaaccgaaccttgagcctatccacaatgtcattgttgcataaagtttcacaaaggaatataaaattgggcttcttttgaacacagatgcaacaaggaattgaatggcccgtgggttcccaagcccacgacaattccagctaataacattcataatgattggtgggcctgaacaccaagacccacctgttccccgttttttggaagcccaataatatcattaccatgaaaactatttggctcagaaatacaaatcacatcatcttccactatcttagccgaccctttagggagagtatcaattcttttcttcttcaagtcataaagattcatatcatcctctgacataaatgctgattcattctcatgaatattcaaagttgcctcacttgggttttccaaaattgaatgacccgtatgcctagaatcaaggagagatttttggaaattaacatttgagacagggagttgattttgttgcctggttggactcacggtttcgacctgggattgaggcttcgcattgaaggtggcatattgtgttggattgctactgccagcagtggcaggttcaagctttccggtacgaagccagggagaagttgtgaggaagctttgccgctttgaaggagcacgcatgtcattactgtatggttttttgattgcctccggaggagtatcataaagttggctgcaaaatctctccgaatgtccgatgatgtcgcagataaaacagaaggtgggaactctctcgtacttgaaattggcatagaacacctctccatttttcttcttgaacttcatacgcctctttaatggtttttcaatattcagtcggacacgaacacgtaaatatt

SEQ ID NO: 386135 - DNA, 1267 bp, Cannabis indica
attttggactctaaccctaatctagaccttagggcccagagtccggctccggccccagtcccgaactcggactacagttccgaccccagacccgaacctgaaccctacttaaaaaataaaaatgaaaaataaaattatagaacacacttttattttctatttataaaattaaaaaacaaaagttgttatagaacacatgcccaaaaagtccttccaccaagacttaaactctgttttttgcccagctaactatatcactaaagaacgaaacgaacatgatcgtgcaaatgagcatcccaccacaacataaaaagttgtttcaacactattattacacataggaaagatagcactaacagcaacatgtttaatcacaagttgatcacaagatggtaagacattagacactgatcgcctaaggaagttctacattgccaaaagctagcatcttcatttgatgtccacccatttctcaaatcatccagatgcctacatgcacttttaactgtatagatacccaaacctttaatgtaccaaaaccagggatcatcatggatagaagagcttaattcaatagaaaaagttagatcttggtcatgctcatcaaaaagatcacaaataatctcagaatcccatgcacgagtctccatcattaagatgcacccatcttgaacatttcttctttggttcaagccatcccaaatattaccattacatgggggcccattctgtgaaataaaaaatccttgtgtcttgggttagaacgggttcgagcaatctagggtggaacatcattgttgtgcccagtattttgagttcttcggttagtgcattcaccatttaggtgactggtggcactattcttattacgattggggtaagactccccattgtgagacctaccctagtcttgcattgatgggacatttcccttctctcctcatttctaggcaggccttgaaactagtcagtcctaccatatgctcttttaggaataatttgactgtcattaggctgataggatgatagccttatttggacacagtttgtccccagggccgtgaggttttctcatgatccctggggcactaagtttccttcgacatatagggacttttcccctgaaagggattccttatgaggggtggctcttcaacttgagattaaaccctctcgttgaaccgtctgattagatcgttagcctccctatttcggcagttcagctttgcctaatgggcttggaggattgcagcctaccaatctattc

SEQ ID NO: 386136 - DNA, 1408 bp, Cannabis indica
ttcttgtctaatcgaacataaatgttaatagttattgtatgtgaaattttcagttagagtctgtttgcggtcataaactttctattttatattcaaaatactggcttgaaagcttgagagaattatttattatcttcttttattattttttctatgggatttttacgctattgttgttaatgattgattcttcgataacagccagcagttattttggttgttatgtttagtgtgattaaatttatcaagaataaaaaaaattaaaataaaagaataattagtaaattaagttagtattttttaaaggtgtttttttttttgagaataaatgctattatattaaaactagagtcaaaatacaatagccatcaggggaggaagcatttcctccaatcaagagcaaatagagtccaccgaaagagcatattttgcttaaacatgaacagtagtatttgtagatctattaacatgagagatttgcactccaaggaaattagacgccaagtgagaaatatttcaacccttttaccactagtagagaaatgatttcaatataatgtacttgtacgtgatgatctttaagccattgtagaccatatattaaagccaaagtttctataacttccggtttaaaacagccaggtagaggcctggatattgtagcaacaacgtcaccattgttatcatgtagtatcgcaccaaagcagaaagtttgatttagtttgttaacaactgcatttgtgtttaatttcattctgcccgatgaatgattcagccatggttgattttttggggtagtagctgagcgttggatagctgttgcaacagacggtttagcaacagcctgtgccaagtgatattcctccaagtaattcaaagcaaaatagagtaaaacctgatatggctttggttttgtgccatgaatttctttgtttctctcattccaaacacaccaaagagttgtaatgaattgctccaattgtaaatcattccacatattagaaacattgagcaataattcttttaagctcttttggcttgaaaataaattattaagagagaaaggtgaatgtttccaaacttttctgggtcgttggcaaaaaaatagtgcatggttggttgtttctttatcatagcgacacaaagaacagttgggagaattagcaatatgtcttttatggagaattgcaactactaggaagcaatcatgaattgcctccatataaaaattcgcacctttgatgggatagaaaggaccagaattttttctagaattttgaagtttgagaaccactaaccgtagggttttgatcttccaagtgagaagctagaaagtatcccgatttgaccgtgtatattgttgggttttatgccctaaataaaactctttacaatctgattagttatc

SEQ ID NO: 386137 - DNA, 1104 bp, Cannabis indica
aaaaggaagcatccccgaagaggaaagggggtccatgtttcgtcaattacaccgagttgtctgctcctcgcgaccacatctatgtaatagaggagaaaaatggcatttttaggaagccacctccaatccggggtaatcgcgactagagagataccaagaaattttgtaagtaccacaaagatattggccatacaactttggagtgctgatttctctaggacgagactgaagaattgatcagacgaggaaaattcaaccaatataggaagaatggagaaaatcatccccgagcggatgatagcaataatacgaatgatgcgagtggatctcgagcccctcgtaatattctaactattataggaggaccgcatgtcggtggagagtcctggaaagcgcaagagcgctatgcaaaataggcaaaagaaaaaccccttactaatgtaaataatttgagtgaatgactagaaaagctaattaaataagaatgcgatgacataactttcatggaaagcgacacgaggtgggtacatcatccacatgccgatgccctagtggtagtcgctaagatcggaggagataatgtacatcgtgtcttagttgataatggaagttccgtcaacctcctaaatttataggcttttaaacaaatggggttgcatggaaaggacttgtgaccagtgacctcgagtatttatggtttcattaaagatacaatcacattgaagggaatgataaagttaccaataactctagggactgcacccatcactaccaaatcaatagctaattttgcagtaattgatcaacattctacctataatgcagtgataggtcatcctattcttaaagaaatgaagataatcaagtccatctattatctcaccatgaaattccccacccatgcgtgtgtgggatcagtgcgaggagtccaggcagactcgagagaatgttataatccgcgttgaaaattgcaaaaaagaaaaagtcggtaaaattcatctatttgctcgaggctcctctgttgggttttatgccctaaataaaactcatttcaatataaacagatttacttattaatatagatcagaaataacatttaatgtt

SEQ ID NO: 386138 - DNA, 787 bp, Cannabis indica
tctctctctctctcttcaaacttgaaaaacacttcttaaatcacaccattttgcaaatgataaatatatattgtggtatttattaataaaggaatatatggatcccaaagtcggtggttgcaatagttaagttattaagtcaattacgacttaacaaacttaacaaattcctcgtaaaaataactccacctcaacttaagttaaagcttttccagatgagagacatccttaaaagacaatacaaataataaatattttaaaaaagttatttctctacaagttttaaaataaaagcatatttacttatatagtgctataatttggagtcattttctataattttccatcttttatatgtatgaaataagtattttttttttattttgaacaaagtaactaaatattattaaaatatatacaattattttgaaataaagtctttttttttttaaaaaaaaaaagtaagtatttgatatcttatttgtatcaatagcaatgaaatgtggttttttaaaacccagaaaataaaaaaattcgagaaacaaggagcatgtttggtattgttttatgtttttcattttcaaaaaattatttttagaaatgagaacagaaaatagtttttgaagtttttaaaaacaagtcatgtttgattagtgttttttaaaaacaatattgactaaaagtaaattagtttttaaaacagaaaacaacattttgttgttttcaaaatttttattttttgtaactttgttttctgaaaactgttttcaaaaaacaaggccaaaca

SEQ ID NO: 386139 - DNA, 906 bp, Cannabis indica
ctaaaaatataattaatatatatcagtttttaatatttttattgtataaataaatataaataattttttaatacacataaatgtaatttgattggatcggtttaacagatccaatccaattagaattcaacttttaatatccaattcaatccaattgtaattggatatccaatttttttgcaattggagtgtttggattggttcggtttaatttgattggaatggatgttacccacccttaagtacggattttattttcaatttattaaagaaagaatttgaagtaattcatactatatattttcgtcttgacttgatgatttagaatctggatcatatatgtgccttgtttacttacaaaatttaacgaaaatgacaatttacaaatattatgtacgtatgccactaaaaaataatcattgagtttatatcacttacaaatttaaaatcttaggtacttatgaaaccatttacccattacaagaatatggtttttaaatttcttatgtatttgttctgtaatattctttttgggattatttcataaatatacaaaattagtaaaaaatttatatttttacggtccattagtagattttctagcactaacgcaagtctagaaacctgatttggtgtagtctaagaatattaaaatactacccttatcgactaacatatagttcctctttttgatcttaagattcactgattttcttccaatgttcctttcctggattaatctgatacctactcatcactcccacacagcaggtgtctggtctaatgcatttcaaagcatacctaagacctctcactattgatcctaaggaattatttatcatgactttatcttttctggaatagttgacactttttcttagataaataaaatctatgtctagaagt

SEQ ID NO: 386140 - DNA, 1071 bp, Cannabis indica
tgtacaagagtgcaaacttttataatcttctttcaataatattattatttatcatgttaaaagatctactaataaactagtggctcttgttaatgtaaaatttagtgtatcattagaatgaaatagtgtaaaaattctacaccaatttgataaaatggtgtcccaaacaatgtttaaattagcctaaataaaattgttgggcatgtaagaacaaaacccattcaaactcgctttaaaaaaaaccgaatcttgctcccattttcactctcagaaaaaaaaacttaccaggatctgcttttttttctttttttttccaattattattcttccataaaatttgcctaaaacccgccattaacgacggagagaatttccagtgccggcaagagagagatagtgacaatgggaactagattacggtacggcgtagtttgtgcaaaggtggcgttaggcgaggaggttggtgatgatgatcagaccctcaaatgggatagtgttaaaattaagaacaaccacttttccatctaagttatcaacgatgtcgtctttacaaattcggaataaatagtggcagtatcaaagcaacgattacgtgctttcgacgataaatattactgatctggtgtagttggtggttttgcggtggtgtgatgatggtggtcgacagaggttgtgcactttgtggtggttgcggtgtatcctccggtgactttaatctctgtcgatttgcgacagttattttattttaaattattatttatttatttttattttttaaatattttttttttcagtttttgttgcttaattttaacaagacagttagtaatattactatttattattttatttaatttttgagcatttattttgttttattatattatttcattacttgtttttttttgatggaataatgcaattatctttgcattttttgaatactttttatgttgggtgatttttctgagataagtatgggtagttattaaggtatatatattattttggatagcattttttatttcttattaatttattattttcaaattttgttatttttttttagtt

SEQ ID NO: 386141 - DNA, 830 bp, Cannabis indica
gagattcagaggctgagatagcagatcctccagcagtgcctttacagcaagccaatcgttatggtttcaacggtgccagcaaaacaacttgttgttggcactcgtatgaagtcgttgtatgagagattttacaagcaggcaactctaatttttttgggaggaccggatgttatgaaggtcgagtagtgtctcactattatagtgagaatcttgaatttcatgtgtgtcactaggaataattgggtgacttgcgctacgtttcagttctaggagaacgctcttgtgtggtgggggtttgtatccctcacctgagatgtgaccaccatgacctgagacgagttttaggaaatattcaatgccaagtattataatgagacagttcgcaatgctaagcaaaaagaattcactgattttgttcatggagaaggcatgtcagtaacagaatatacaatgaagttcgcccattaagccaagttggcttcaagtatagtacccacaaacttcagtaagaaagagaaatgtttggcaggtttaaatgccaagattaaacatgatctggtaattactacaagtgaaacaacgacttatattgagatggttgagaaggttctgcgagccgagggagcaataaaatttcttcagaagccccgagaaactccaagtgttggtgggaccatcgctcttcctacttctggatatggtagggatggtggtgattaggacagaacaaaaggttccaagggaaccaaggtagagatggacgccagggttattcttaccctgagtgcccacgttgtaagaaacactatctcggtgagtgcaattggaaa

SEQ ID NO: 386142 - DNA, 4002 bp, Cannabis indica
cctgcaattcatacttctcgactccatccttcttctcagcaggaggtggagtctcaaacactaactggtttcaaaacaatcagcacaaacacaacttttttcatagtgagaaaaaacattatcttttgtctccaacttttcaaatacaaaacatgaaaacgaaaaaggcttgttaatgtcagtaatagaattagaaaatcattggcactattcatagcaaaacgaacatcttaaaaatgttaaacaatattactaaaaactaaaacaggaatgatattatcgaatgaaattattagattgagtcacggactaggtcgttctctttagaatgttcgcagcactctccaagaatgtacaagcagttggaaattgccagttgtccctaggataaaatagctcagttgaaataccactatatcgaagctctactacacaataaagaattgtcgaaataccacacccaaaaactattgcttggactacttatgtaatataatcaaaaataataaattgtaagtgatttttaaagtgtgagaaatatgtatttctcttgttggttctaatatattatacagggaatacacagaaggtagtaacgggaagaaagacattgatcatgggaacgttaagtgagatcgtggaaatgatactaagaataaggaggataacacatctctctctctttaccaattaagtaaacacatttaaaaacttttttaatcaactaaataaaaataataatttaataaataaattttctccaaaaaataaagtgtcacaccacaccagccagctcgacgcggttggatggacggacgatgcacacacatgtggggtgggttaagtgtgtgtgtcttcactcattgggtttcaaaaagtagtggatcgtttattagtgttgttgttatttccaacaacaagcacctcttctttccggtcttgctttcgagctttttcctcaatgcgaaggcgagtgatcagactttctaatgaaaattcttttgtgttgtgcctgaaagtattcttaaaatctttccacgaagggagtaatttatcaatcataataacaacttgaaatcgttcctcaatagtaataccttcagacaaaattttgtgagctattttttctgaagctcgtgagactgggcttcgattgatttatcatcggtcatttaaaacttcaagtagcggttcacgatatttttttttgtttctgcctcctcggtatcatattttttctgtaatactttacatatttccttagtagatttatcagaattatagtaatcatacaaattatcaaacaaaccattcaaaataaaattcttccacaaaaaaattattctctacccaagagtcccttctttaatctgcaattcatacttctcgactacatccttcttctcggcaggaagtggagtctcaaacacaactggtttcaaaatagtcagcacttgggatagggccctaaggggtacccagttttgtgtgaatgtgtgaagacccacacacttgacccaccatacacacgcggcgttgtccgtctgtccaactgtgctgagctggcttgtgtggtatgacacttcattttttggagaaaaatatttattaaattattatttttatttaattgataaaacagtttttaaacgtgtttaataaattggtaaagagagagatgtgttcttctctttatttttagtatcatttccacgatcccacttaatgttcccatgatcaatgtctttcttcccgtcactaccttctgtgcattttctgtataatgtatcagaaccaacaagagaaatacatttttctcacactttaaaaatcacttacagtttattatttacgattatattatataagtagtccaagtagtagtttttggttgtggtgttttgacgattctattatgcagtagagctccgatatagtggtattttgactgggctgtttatcctaaggacaaccggtaatttctaactgcttctacattcttagacagtgctgcgaacgtcttaaagagaacaaccaaatccgtgactcaacctagaaatttcattcggtaatatcgttcctgttttatttttcagtaacagtgtgtataactactttcaggcgtttgttttactgtgaatagtgccaacgtttttctatgaatagagccaataattttttggttctattgttgacattaacaagccttttcattttgatgttttgtattttaaaagttagagacaaaagatgttattttttctgactatgaaaaaagttgtgtttgtgctggctgttttgaaaccagttgtatttgagactccacctcctgccgtgaagaaggatgaagtcgagaagtatgaattgcaggttaaggaaagagactcttgggtagggccccaaggggtacccagttttatgcaaataggtgaggacacacacacttataaaatacaaaacatcaatacgaaaaggcttgttaatgtcagcaatagaaccagaaaatcatctgcactattcacatcaaaacgaacatcttaaagttgttatatagaatgtaactgaaaaataaaacatgaatgatattaccaaatgaaatttttcgctcaagtcacggactaggtcgttctctttaagacattcgcaacactgtctaagaatgtacaagcagttagaaattgccggttgtccttaggataaaacaccccagtcaaaataccattatatcgaagctctactgcgcaataaagaactgtcgtaaaacaccacacccaaaaactactgcttggactacttatataatataatcggaaataataaactgcaagtgatttttaaagtgtgagaaagatgtatttctctcgttagttctgatacattatacataaaatgcacagaagttagtaacgtgaagaaagacattcatcatgggaacattaagtgggatcgtggaaacgatgctgaaaataaggaaaagaacacatctttgtctttaccaattaattaaatctgtttaaaaacagttttaatcaattaaataaaaataataatttaacaaataatttttctccaaaaaataaagtttcataccacacgagccagctcaacacagttggatagacggacgatgcacgcgtgtgtatggtgggttaagtgtatgcgtcctcacccattcgcacaaaactaggtacaccttggggccctatcccaagtgccaaagttgcactttatatactcctgtaaataagggctcatatcccatgtgggactcattctattacacacactaggacactctctcattttgttaaaattcattaactttgagaaaaagttctaactattgagatagttggtattaaggaggctttaagtttgataaaaaaaaaaagattaataagatgttcagcttgagtcaagtgcttagttctatttttatgctttctctttttggataattggctagtgattgtcgtcttatattaaaattttaaagactgttaggatttgttttgttaaacgttctgttaaaaaaagatgcctattgtgttgctcgtggctttgtttctatctagatcatgttttagtgagagtactgctccatttgaacttttatctattataatggcggaggctttttgttaataaaaagagtaatttacactataatacttaagtttaactcccagttgcaaataaatacctaagtttaatttttggcgataataatacctaaattataattttggaacttttgtaggtatctgacttaaatgttaagtaaattactacgtggcaattcttaattggtccaagtcattaaatttttaaaaaattaatttaaatatatcaataagaaaatgacacgtggataatgacttaatatttaatattcaagtacctaccgacttttaaaaatataacttgtttattattattacagctaaaaattaaacttatgtatttatttgcgttaaatttggacaaattactctaataaaa

SEQ ID NO: 386143 - DNA, 723 bp, Cannabis indica
caaaaataactaatttagggagtatacaatagaattacccattatcctttattctcattgggttctttttttctttcttagaattttttttttttaaataacctatagggtaattctatagtacacctcctaaaatggtcgttttgttacacttcctattgatttggacatagcgtcgagtttcttagtctattctttttatgatcgtgtatattgtagttatttaaaagaatctttaaattttaaaaaaaaaaattaaaaagtttacattgccgaaaataaggttcaaataatttgttgcacgtatatgactatattttcttgtatggttgctaagctactgtttgaattttatttttgatatagtaaattatttaaagtttttgaatatttacaggaagtcttaaaaaatagcaaagtacacgatcgttaaaaaaaatagattaaaaaattatcttgaacactgaaacatatggagaatgttctaaaataatccttttgagaggtgtattataatttttttactattcttcaactaacaaaaaaaactaccataatcttttcgtaaatacaataaaaattaggaaatattgataaatagtgcagtgaaaagtaaaaattacatgaaatatgagatttgataaaaaaaaagttacaaaaatgtgatactttaaatttgccaatctcctatggtatttttttacatttaagattttttatggt

SEQ ID NO: 386144 - DNA, 1235 bp, Cannabis indica
gagctcgttgatgtgtactgatacgaaagaatgagattaatatattattaaagatctttttaacgagcgtgatcaacaacatattttggcatttctattgagtctgaatgtagctaaggatcattttttcaggtctaaggagcatcatggtttctacttggtgcgtagtgcatacaagttgatacaagctcataaaggaaattgaattgcagttgattcttctaggttttggcgcaagctctagaatttgaaggtaccattgaaatttctcgatttggtatgttgagttacttcaaattatttgcctaccttgactaaattaagtggtaagagagtccaagttcaaatcatgtgtccgatttgttaaaaatgtgagaaaactatttttcatgcgaatatttcctatttattcactactcaatgctggcagaggcttttggctagggttaggccgattattgctgctgatttttgcaactggtttgatcaaatttttcaaaggtgcactaaggacaagtgtggggagattcttatgttatgttggggactatggaaggctcgaaacgattcgatttggaactaaaagtatgttacggtagatggtattcttatctcatttatgagttgtcttgtgcaatggaagtcgatccaaaatagaggtttagaggcttcttttttagtttttgaagttgatggtggagttgaattttgggttaaagtaagagaatacaatcaaggtagttgttgatgccgcattttccatgatcgagctgcatttggttatggcatggtcgctcgagagtctcaaagggaattagtgatggctaagttgggcagttttactagtatagatgctctgcatttggctaaagcaattggtataaagaaagcactaagctggattaaagctcaaccataacggaaaatggagctagagtgagattgtttggtagcagtacaagctattagaattcattacctatgctttcttcttttgaaattattctgtcgtaaacttcttgcatctttaaataatattttcttgttttttgttaaacgatctactaacatggttgctcatagttttgctggaacatcttgttctttttcaaatcgagtgttcaacatgaatgatgttcttgttaagatacaatcttatcttttgactgatttaacaaattaattaaacttctataattactttaaacatatattttagttgttattgaatatca

SEQ ID NO: 386145 - DNA, 1106 bp, Cannabis indica
taaaataatttccaacagattgttgaagaggcaaaaaacatgtgatcaaagaacaggctgctaaggatgtcgtcacaacctcaaaccctagtgttggtggtagtgtaagtaaagggactgacaatggcaacccagaccacaagcggaaggctgaagctttcgaaacaccgggaaataatagaaagttttgtgggaacaaaggcgaccgtcatggtcgtgggtcttcatttatggaaattatgacttcatggaactatttttgagtagctatgggactaatttcgatatttacttgttgaaaatcaagtttggaactttttatagcttaagtccaaacattaatagtattttttgtttaagggattgattttaatttctgttacataaggattttttttatttatttatggtatacatgtgtcctgagaagtttggaatgatttggatagattttggtggtattttagagagtataaaatttggaactttcgacccctactacgaaccggtccaccgtttggtgcaaccggtcaaccggtttgtgttaggaaacggttttctgtttctagaaatttcaaggaaatcaaaaattgtatttctgtcataacttttcacttgggtgtccgttttggatgtatatactgtttcaaagcttgcaatgagctctacaatatggtgtatgttttagagccaaaatataaattttattttagtgtacttataccacgagatttggtagaaaaccctagattatcctttacaaatattaagtagcattttaggataaacacttattggtttaccgttgttgtgacataatgctgaatggtgtagtgtgacaatgtcttttcaggttacatttatttacattttagaaaaagacttattgtcatcgtgcaatattttattgcatacactatcagagacttatgctcgaaaccttacaagaaaaggtatataaaatttgaaaaaaatagtgtgtaagtatcatatatgttgactgatgatgttttcttatatgcctcgattgttgtggatactatttggagggtgcgcaatgagaaggtccataataactattctcctgacataaaaaagtgtattga

SEQ ID NO: 386146 - DNA, 1310 bp, Cannabis indica
taaaatatattaaaagtaatgagttaattttttatttcgtacatgtagtcattaactataaagataacaaatacataacttaaaaattaatggtcacaacacaatatacatgacgaagtatattaaggctactatatatgaaaaatactaacatcactttgtacctattataatttgggtcatcacaaactaatccacctttgaatagtagaaaatttccaacttttgactatatttgttttaataatatcaactcaaagaaaaaattgttctaattaactaaatttgaaacaaaaaatattatttgaattaattaaaaataaataataaatttattaaagagtaagataagaactccaaactatatataatgaaatcgaattcaaatattcgttttatataattcatatggtaaagacaaattgaaaaaaaaaaacttaataaataaaataatattgatatttatatatttataaagcaaatagtactacaatatttgttaaatttaacggaatatttttttatttttaaagtatatttttgttaaactaataaaaataattagatagtcattatatataaagatatatatacagggccagccctgaggtgagacaaaggaggcggccgccttaggccccccaccgctcagggccccatttcgaaaaaaaaaaaagtatagttagtaataaaataaattataatacttttaatgctaaatatgtgttatagcctagtggtaatttgattagcataacaactaaaaggttgagggttcaaatctcaatagccaaattaacataggaccggcctgtatatatacatatatactggggtcatggcttctataaggtatagtaaacattcgcttttgttatagtaaacgtgtcattagcttcttataacaatatttctactaggcatttggcataaaaaatttaaaataatttaattaattagaatattaaaacaaataaaatttgaggctttaatgaaattattttcctaagaaaatgaatattataattatatttagttgtacatgtgtatataagaatatttatttaaattaccatagatttaattaaattgtttggttgaacataagattaatcaaaatattagtttaaaatttaaatataatttttttagggttaagattatttattcatttttgaaaaaaaaaaatcagagtctaaaataaatataattctctatgtaaaagatttaacaccatgccttgtaattatgtagtcactgtgatgataagctaattgcatacatttatggcacgtttaatatacagtatt

SEQ ID NO: 386147 - DNA, 2526 bp, Cannabis indica
gcttccattgaggtccatgatcataatggaaagatggtgacgtgttatcgaacctgctttcattgcagaagcaatatgatggaaatgctatcatcaaccggtaaaaaaatcaatgctgggggaaaattttgcgcgccttggagtccttgccaacctggatgttattgtgttggaccgggtactggagcttgcgttggaccctaccaaaataaaactacgtagtttaactatctatggattgactatttttatatataaatatatatatgaaatattattaataaagtcaatcttttaagtaattgtaatgaataataataatgttatacacgtacttaatatgcatacatgcgtgtatgtgtgtttgtttaagtctgttatatctttataaattaaaaatggttattaattaacgttagttcttatatttaatggtattttaatatttttgccgttaagtttaacagaatttaattaacatatatagttgttagtttaatttattaatattgttttattgtttatttaaattaatcaattaaaattttattaattttcataaataaataatattaataaattaaactagggttcctaaacgttattgtgcatagttttcttggtaggttattttattttattacatgaaaaaaaaaaaatcttttgagcttgttgtattggtcttaagatctgctttataaatttagctttcgtaggttatgaaaatggcagaaatcaggattactgatccaccactacaaaaacctgctatttttagtgataatattttagtaaccaacataaattttttgtgactaaatatgacttttaatcacaacaaaaaattatttgtgactaaaacatagcatttagacacaagttgttactaatttagttttagtcacaacatgtattgttgataaaaatgcatttagtcacaataaattgtaatttttgtgactaatacctttagccacgaaccttttagtcacaacataagaataataatttataattagtcataacttttttacttttattcacaagttttgttgcgactaaaagtaagattttttgcagtgcacattttgctcaagctatttctagcaaaataatattattgttggataaatctccatactaactatcccatggaaaataccttaaacaaggttataataaggaaataaagtaagatcttttacaagcctcaacagaccattataactcttaaagtagtcggttctgtttcataggcttaaatcttattagctctttacaataataacaactactcaagaaataaataacaatattcaagactccaacaaactttcagcaactcaaggaaaaaacaataacgtctttctcaactcaaagcacaacatcacatgcatacaacagcaacaatataaaagggagtacaacctgcccttttttgaagtgtgtttttcggctcagccaaggagagttgcaacaaccattttgatgagaaaaatcctcactcacaagagaaaaaaacacagagagagttagagtgttttttgttgtaaaccaaaccagaaaatagagtgaagaaaagagagaaaacttgagattacctgttgaagtttatggctaggaatctccaacaccttgtaatcgatattgacatggatagtgaagcattaagcatctttgagggaagcttgacggagatgtacccttgattttgaggggaactccaaaatcaaattattgtggtcttccctttatttttcctgctatttttttttttgggtctttctttatataaccaacaaacaatatcattttagatctttgttgttactagtttctggttgtttatttctatgtgtaggttcggccataggaagctcttgtagagctagaaggagaagaatagaagggctgaaagaggagagaagaaaggttgagtattgttcggatgcaaggttttcatcaagaaggaaggagaagaagagaagggggcttcagctaggtttagaggatgtaatgaaaatgggttgctagggtttgcatctgaaaagaaaggttttatactaccataaaaggcagggtttttagggggaaaagcttcttggtccgcagaagaagcaaaggtgaagtttgaccttggtttttgtgactttgcggtgttggtgtagagcatattgggtagtgcttaatttcctacagttataaacacctaatcaatagcttacaatcaaaagatgttctaaggattcatcaccacctggttctttgtcgcatctccgattaattgagttagtgaagattatgtaggacaacgcctctgtctcatattcaagtctttctgagtaaagaagtatttgagacttttgtggtcggtataaatttcaaacctttctccataaaggtaatgccgccagatcttcaaagcaaatactactgcggccaattctaagtcatgtgtcgggtatcgatgttcataatctttcaactgacgggaggcataagtgataactcggtcggcttgcatca

SEQ ID NO: 386148 - DNA, 710 bp, Cannabis indica
aatttatagtaataaagtgtgtaaaaaggatttttcatgtaaaaatttctaaaaattaaaaatataactaaataaggtaaaattagtgtaacaataataacttgtgatctaaaggcacgtaccccaataactatagtatatatataattgattgagatgcattgatagtgaggtgtgtgtgatttgctttggaaaatttgagtttataattagaaaaataaaataaagaaaaaaccatttcctatatttttttttttgtatagctgtttcctttatatgtttgtaacaaaaatactgcacacataatttttcctaaatctctttctaacacaaattctctctctccgaacaaccagaaatcccaaccccgatatcttacctcccccaccaggaacccaccgccagtccctaccctatctccgccggtaacctacggcaccctagagaccgagaaccttcgtagtccgtgcccagagacccacgcacaggcggtgcctacgacccgaatctctgcccaatctcttcaccacactccggtctgatctggtcttccctctcgcgctcttcaatattttattctctgagtttgtcaatagtctgtgttctaagttcttcaatatttcattacttgatatgggacatctctctctttgaaggtgagtttttttttcaaagctttgatttagtttgttagggtttttttttttttt

SEQ ID NO: 386149 - DNA, 701 bp, Cannabis indica
cttaattttttgtatcataatttcaaattaaattcctttaattcaaagtatttgaatagatcgtatctctttctatatacatataatttatgattcatgtagttatttatttatttctcaaatagattttaactaataagtttaaatatttattcaattcgagaattctaattaaatattattatttctactataaatttcctaatgaatctatgattatactagattgggtttgaatctctaattatagtttgaataagtattcaaaagtttcaattaaattttatttaattagtaagtctgaaaatagatttaaactattttaattcaattaaatttcagtgtagaaaaattttataaatcaatagaacaaacttataatcattatttgttaagaataaataattaaacatttaatgttttgactttagaattatactatgagtattgagtaaaaattaactttggacatatgaattgaattaactatgtatttaaataaaatgtattataaataaatttgcaactacgtattaaataatcaatcatcaatatcaatcaatcaatatcaatatctatatatctatatttatatctttatatattaaaagtgcttatctaacggcaattcttggtttaaagaatattctgtaacgatgttaatatttgatctcccgttaacaaataaacccaataattaa

SEQ ID NO: 386150 - DNA, 1528 bp, Cannabis indica
ttttttaaaggttctatcaaatatgatccttgtctaaattttttttatgtgtatatttgatgccgcaaatctataagtgagataaaatgtctcaatatgccttttatccttatttttttttttatttttgttaacttaaaaaatggaataaaaagtcctatttcttgtagtgacattattacttaaatggatattaattattgatagttattaaataaatttaactataaattttaattctaaaatattaaactattagatactacaaaaaaagactacttttaatgataattttttagttataacataaattttctgtgactaacggtgacttttactgacaataaaaaattacttgtgactaatacatagcatttagatacaagttgtcactaatttagttttaatcacaacaagtattgtgattaaaaactcatttagtcacaacaaattataatttttgtgactaatctatatcttgtgaaaatactataaagttttaccttcacatttaatacaactttaactatctttagagaaaattgtcacaactgctctaagcaataatctcaatttactaacaactataaataaataaattaattatccccgcgtaattaatatcttaaaaaacaattaaatattattttaatctgaatattaaatcaattcatcataaataatttttcttattttctttattgaattagtaataagattatataaaaatattatacttaggacataaaaccaaaaatataataacactttttttttggatcgggacttggatccagaattaggatccgactcagatccggactagaccccaaatcccgaacctttgaccctaaactccgactctagactcgaacccacccagagtcgagtttattaaaaacatattataactttacaatttattaatacaaatcaataccaaacatattattgtattaaataatattaatacaatacaatataacacaataatataatatggcgtaccaaacgagcctgatcagtaatgtacagccgagtttgttcattcgttttcgtcaaaatatatagttggcaagcatgttgtcgttttttcaaatttatgtaatgttatttttatattattgtcgtttttcataatttctgtaagatttcatcatgtattaattttgtttttcttaatttacgtatagtctttcaccgttttatgtcgtcttgccaaatttgtgtttttcaagttcactacgttttatgtaatttgatttttaaaaaaatatgtcgtttttcttatttcatgtcgttctttcaagttttatgccaacttctccaatatataattctccatttttttttattatttttatgtaatttgatttctcgaaatattgtcatttttcttattttatgtacataattgaattttaattaaaaggaattgtttcatatatctattctatataaagtatgcttatataactgaaattcttggtttatgagaaattcatgggtgacttttatttttatttaa

SEQ ID NO: 386151 - DNA, 1663 bp, Cannabis indica
atatgaccaataactataattccgaattgattctaattaaaaataaactattatgattaattaacttaatattttagacaagatctgaacatcatttagttatcaaattacatttagtacagaataaattaataaataaataaaaaagtcagataacagaattatgtgccctgatgggtctgttgccgttatgctccaactgtttttctcttttcatctgatcaattacaactgctacttcaccggacttttttgaaattctgcctctgtaactactcccgcccaccacctcttatcgattccttccacaacaaccactcctcacggtgtcttcctcccactccctttcttccctaccttctccgtcaccatggaacctctctcaactgatctcaactccacactttcactcactgaggaagaaagttccattgttaacctgcctgatttcccttctcatcaacccacatcacgatcccctcatgttctcctagcccgtgttctaaccggaaaaaccatctacaagccccatttctatgaacaaatgtctggccattggaaaggaagattccctgccattataacagactacaactctgatatttttcacatctccttcggctgtgaaggtgacaaacgcagggtactcaataaagagccatggcattttcagaatcaccttatcattctgtatacaccaggtgttctgcaaaatgtcacaaaggaagatatgatattcacaagcttttgggttcaaatatatcgcctcccttttctcagtaaaaccaaggcgttggctgaagcgcttggtaacataattggggaatttatcgaagtttttgaagactcaactaatgaaggatgggggccctttttgcgtgtccgagttaaactttctgttgctaaaccattaccaagaggacaaatgattaaattcccaaaagtgaaggatgaattttggattgactatcgctacgaacgaattcctgaattttgttttgaatgcgggtgtctcggccatccttttgagcaatgcatagcgtttatggaacgcatcgatagcggaaatgatgatgatttgccatatggcccgtggcttaagggtgcaagacttcctgcgaataactacgatcgctaccgaacggactttagcaaaggcaatgtctggcctcttactactaggcttgctcgacgggcactcaccaccactttgcctacactcccctctcgctcttcacctgcccctgccattctttttgaaggagaatcatccacccctatgcagcctttgcaaagatcatctcactcccctgctagtccgaatctcatctcaccatctacaaatcccactatcatctcacatagtgcatctccaactactactcacccattaaactcccccactatcacccctgtgcatagccggcctgcctcctccaatgtaatacataatccaactccacaaactacttctaaattgccaccatcaacttccaaccctgcacctgactcttttaatcaatctaacccaactgttacagacttatcccatgtatacataccttttgcgggtcctactcctttggcccctagtctctttgcaacttacccccctgccataaattcccagaccatgattccacctacaacaccacttacttcc

SEQ ID NO: 386152 - DNA, 1532 bp, Cannabis indica
tatcttttgaatacagagtataactttcagaataataaatagtagaattttaactttattttttgctgtccctttttctatagattctgtccctatttataggtatataggttgacaattattttcattaggattgatttatttacaactgttgatgaaacgtgaacattccccatgcgtttcatttatttacacatgggataatatctaataactacctaactgctccttgtctttatcctttagacggttatgctgactaagaatgttgcatctcgttgaatatgagttatccttcttatctatcttaataggaaaaaatgctaagtgtaaaagtacttcatctcgctatacccctttatttgtattgatgatcgagatgactactacgttgtgtaaaatgcgaggcgattgaatgttgttattttcacattgctcgtgtaggagagtcaacgattcacgagatcttttgatatctcgtctagctcgtatatttttactactctgtttatcccaaggcggacatatgtcttgtaaataaatttaatagttattattcttatctcgcataagacttaagagtcagcgagtttgaacatttctaccaaatttgtaattaattggaacgagttattttatttgcatttaaagatgtcattattatatccctctagttgattcatattctttctgtaggacaaacttctagtacatagctgaatttcgggtataataattatcctcgtgaattgttattttgatagtgtcacgcgaggtaattacatatcttaaccatagtttatctcgaggctgaacatttatttattcttcgcatttattattcacttcattcttttagacttgtatgataagtgtcatgtccatatttttatgctcgaattatgggcataacatgtacaataggcaacctaataccatatgttagaaaatcaaataactcaagatacaaattggcatataattaatttagaaaagtccacacttatgctttaattagactttacacacaaagatgataagcccattacctattgataactaagaatatggattaatccggtaaagaactatctaatcaacccaaattttattaaaatcaacaaaagttaatgtaagcccaaaaaagtctaacaatagagagttcaagaactatttgaagcacaagcaaaagaaaatgagtgttgaagatctcattctcaaatttcgtgttgaagaggataaccaaggtaatgagaagcaagccttgaatcctaatgctgccaaggctaacttgatggagagcatgataaaagctaaaaggggaagaatcctatattagaatattttctttctatggaataaaattaatgctgcgaaggctaacttgaggtaaataaatattttatattcattgaatttagaaacaattaattggttgttattttatatatcgctagattttaatatttattactcaatttaattttctaaattaattattaaaatattctgacaattaatgtggcacagat

SEQ ID NO: 386153 - DNA, 4405 bp, Cannabis indica
aaaaattaaaattataactaagtatatatgtaatgcacgtaacaataacctaatattcctaatacacctatatacagatagatagtacgtagtactatattctatatagctgaaatattattaattaaagttaaaaatatttattgttatattagtgcaggcatattttttcttgagatatatatatttcttaaatatatatttttttgtttaagaaatctcttttatattaaatgtaactatttaatgagaattattggttgaggtttctttttattttcttgtaaaagttaattaacagttaaaactaacaccgttaaatcaatcaacataagctattaataaaatatgtgtagctaaaagtattagtcacaaaaattaaaattttttgtcgctaaatgtgtttttattagccaccacacttgctgtgactaaaattcaattagtgacaatttatctctaaatactattttttagtaaccagcagttgttgttgtgactaaaaataatatttagtcacaaaaaatctatattgtaactaaaaaaattatcactaaaagtcgtagcattttcggtggtaacatggattaaatataaatatattcttttttttttgtgaaaaaagtattcatatattagataaaagatagtagacctcgcggtcattacaaaaaaaagtgtttaggaatcgaggtaaaaggtatatctccagatctctggtgggagaacgctcacctagccacattatgagcaacaaaatacaatttctactaatattagaaaaaatacaactaataaaagagggagaggacttaatactaaaagagacatagttctcaagctccacctgaactcagtcctgttaaaagcattgataactatcctcgaatcactctcaactataataaacttcaagccaagattcttcgctacatccagcgcagagcagcaagccgccgcttctacacattgagcatcaacaaacactactctggaagtataaacccatatcaccttgtcaagatgatcccttgcagcaacaacagtacacatagtgtctaaccctactttaacatcataattcagctttatccagtcttgcgggagaggatgccaatcaaccatcaagcacggaggagaacaagggaacaaaaaagcatggtgaactgtaaaagaagaacgaatattatcaatacaattagttacatcaaaaagacagttattatgtaccttatcgtacctgatccgccagatggtctcaacagttaacgatgcataaaggaagacttcattagaattgatgcctatatttttaaggtcctagatgaatttgacccagtcccacatctggatgccagtatcacacacaagaaaaatgccccagggaaaggacctccacaagtggaaagccacattacaagataagaacaaatgttcaatattttcattctatgtcccacacaaagggcacaacacctcctcaataggaaattttctacagatcacagaacgcactggaagagccctggccagtatccacaaccaaagagtcttcagtctttcagaaattttactaatctagagtttgttctaaagagacggggcaacctcacaaaagaggcgctctgtcaagagcttgggcaagatatgccgatttgctcgagaaccgcccattaccttccaacgtccaaattcatttattgtttcctagactagacgaattacccccttttaagatatcagatgtagtttccttgtcgaaaagactgtttaacaatgggatattccatccttcattatctaacataaggtctgcaactttgtttaccccaaacgtggaggagctgttagtatgagggaagaaatcttttctatgagctaaccaagggtcatcccgaatattaatatccttcccgtccaccaccaacttacatgctccttttttttaagatagagttggatttaaccacatttttctgaaaccacgaatcaaaattcttggatgtacaattaagaaaaggctttccttttagctatttcgcttccaggatccgacagcaaaggattggttaccatttaaaaggttctaccacccatttagtcaagaaggcgaggttcatttctctagttttatagaaaccaagcccccctaatgacttaggaaggcaaagcttatcccaagcttttagatacaaaccatgttacccttttcagacccccaccagaaatccgaaccattccatcaatcttagccacaaggcagtttgagagtttagtcgtttgcatggcatacataggtaaggataggcctatgaaatttatgagtgtggcacgacccgctttagacagagacttagctttcaaccctgaagtttagacatgaggtttttgatgatgaaattgaagtcggtgtctttttgtctggagtgaaagaggaaccctaagtatttgatgttaccttctggggacccaattgctagcaccgacttgatacctcgtttcatgtcattggaagtatttttcgaggttttgagttattgacttgctggcctgaccaatcgcaaaacctctcaatgcattgccaataacttttaacttctttcaaattcactctcccaaccaagattaaatcatctgctaagaaaatgtgggagagtatagggccacccctgctaagtctaataccctttatagaacctttacattgtgcgtcgatcaagaatctaaacaaattttttgccgcccaaatgaacaagtaaggagacaaggggtcaccctgttgaaggctgcatgagagcgtgatgttaccaaactgaccaacattaaggaaaatattgagagaggtggtagtgatacattgggaaatatccaacctcaaaacttttgcagtgcaccaaacccagcaagcacatggtcaataaaattccagctcagtttgtcataggctttcataaggtcaatttttatggcaaatcaaccttctttgccttttttcctgttgaaggagtggataatttcttgaatgatcacattgttatcttgaatattcttccccgaaacaaaagcagcttgggtaggacaaatcagagagggcagcagtggcttaattctattagcaatgattttagaaattaccttgtacataacattacacggcgaaataggcctataatggtttaatcttttcgggtttcggaccttggggataaggactatatttgtatcgctgacgcctttatgcataatgcccgtccgaaaaaaatctgagactacatcacagaagtcctcacccacattcccccaatagtgcttgaagaaaagaatagacatcccatccggtcttggggctttattgttacccatgacaaagagagtactacagatttcttcattggtaggccctttcacaagatctgcatggtcatcgacaaatatcatatcctgaataaggtagtcgtagtttaaatcctgaccactgaccgtaccaaagaaaattccttgaaagaggtcaatgaattccttcccaatcaagtcacgtctagaaatccaaacattatctttgtttaagatactttcaatagcattccgtcttcctctgatagctgccgagaggaagaagaacatcgtgtatttatccccatccaatagccaattaaccctagccctttgcttccaatataactcctttctttaccaggcttcattgagagcacctcagatttcacattcagaaccccagtctctagaactcgcaggcctattctagatgaaattgagtttaccttactctttaatcaaggtgtcaattttaccaaattgagttctattccagtgcaaaagagcgacccgggtcgcccttatttttttaaagactctggcaggagcccaagagtgaataaccgagtttcaggcacaatcaaccaccaacttcctccatatcatctcgaataatcgagttccaggcacaatcaacctagttttctattttatacatcatacacaaattttctatttttgacactgttaggctaaaattagtctaagattcgggtcatatttcggttagttttcactctttgtttctagttttagggctatattacgcttgattctcttgtttcaggtcctcgggcatttaaagaaagtatgtacaagaattgaggcgaaatggtgaaagaatcgagaagaaaatccaaaattggtgtcgctgccagttccagtcgcgactaggaatttgccagtcgcgacgggaattggcagagacatccccaagaattcaaactgtactccagtcgcgactgggactctgccagtcgcgacgggaactggcagaaagtttcaaaaaaattcgaagtgaactcccgtcgcgacgggggctttgccagtcgcgacggggacccttatg

SEQ ID NO: 386154 - DNA, 825 bp, Cannabis indica
acaaaattacagactttaataaacaggtcgatatatttttttttgttgttttataatttatttatatttatcatgagtttaatcttctagttatttttagttgttttataatttattgacaaatgtaattgttgtatagttgatttctctttgtttttaatagtttcctcactttttggtgataaaattgtatttttgtaaaatatttttttttgagagttgtaattttcaattaaataagaagtacaaccaaattacaacttagaaatttggcacacaaccattccataccatctctctatccagccttaaagccttttctaatcctatgtgctaaaatattagcctgcctaggacaataagagacttctacatccgagaaaaaggataaagagtaaattatgcctttgattacatcaaataaagtggaaaaattattataattatgcaagactttatcaactaagttcttacaatcagattcaacatttgttaatggcaactctattattctacggagaaataaagaatgcctcaaagataaagcttcaaggcaactctaatggtaaaatttatatttagtgttaaattaacactaaaattgtactattttaacgctaattttttttagattccaaccacaatactacaaaatatagtattgattattatataattttattaatataatataaaatttttgattataaataaattatttaattatttgttttattgtataaagtgattattaaattattaaaaagtaaaaaaaatattgcactggtgtacagactgtagacagtgacggattcagaattttta

SEQ ID NO: 386155 - DNA, 1036 bp, Cannabis indica
atgaggatgcagtgaagaatgacaatggaacgacactctcgccaagattgaacgagactctctcgtaatggctttgtgtgatgaagaaggcagaggcgactacgaaataaggtgaactttttgttccaactgcttttttaattgtgaatgtagaatatgaagctgggattggggattctgataacactaaaattagaagtagtgctgctgatattagggaatgttagagttaatgatgatcatatagaagaggacgtactctgctatggtctggtatgtctttcgatttatgtatttattttatacatgagttgttagttagctgttcaaaataatactaattaaacttattgtccaaaaatccaaacagtctatatatatgtatatttctattgctaataagatgtttcaggtcaagttgaggtttagaacctattttatgaattttattggaataaaatctagacaggtaagaagaaatggttcttaacattcccctatttctctctctatttttagtttcatcaaaacctatcactttaacttcttcttcttattttacttgtaccaatatgattattgatgaagctgagtttagtaaaccaattgaaatcgacaggaatttagctgaattagacaacaaaaagagttataatattgatttgattttgttattctagcatataatatttatctatagtggctataaaaggaataagttatgactgtagtttcatgaataataactacttattttgctcttaatctccatgtacaatgatgttatggtttatatatttgcacatgtatttaccacacacatttgcttaatgcaatgaaatgctattatagtggggtctatcagatttattattatataggtttataatagagtcctttgtacaggtttacaaagttgtaagaatcatgatttgagttgattttataatttttttgaacatataaatgagtaactttgaagcttgaagtatatctcagcttttgttttctttgattgagcaatatacatgacagg

SEQ ID NO: 386156 - DNA, 4801 bp, Cannabis indica
gatatagtaggtcccctgccaacggtgcccgcccagaaaaagttcatgctggccctcaccgactacttctcaaagtggatcgaagccgactcattcgctcaaataaaagacagggaagtagaacggtttgtctagaagaacatagtatgcaggttcagactacctcaggagatcgtggcggataacggttcccaattcatcagccacaagttcaggaatttctgtgagcagtggaaaattaaactcgtattctcgacaccacgttatccgcaaagcaatgggcaagcggagtcatcaaataaagtcatcataaataatattaagaagcgacttgagaacgctaaaggaagatgggccctgcctggggtgttatgggccaaccgaaccacaccgcgcaccagcacgggtgaaaccccatactcgctggtatacgggatggaagcagttatcccgacggaaatgcaagtacccacttcgcgaaccgaactaaggaacgaagacaacactttcctcagactacaagcagccgacaatgtcaaagaaagaagggaatgaactttatccaggatgcagaactactgttctgtggtagcaaggcaatacaataaaagagttaaacctaggaacttcctcccaggagaactagttctaagaaaagttttccagaataccgaagaagcccgagcagggaagctatccaccaattgggaaggaccatactgtgtagtaggctcgacggggaaaggagcgtacagactatcctctacggatggtgccgagatgacaagaagctggaacgtgaggtacctcaaacttttttatgtataataattatgagccagaaactctaaacctcactatagctgtcgccacactttcacctttaaataatgaaagaagaatatatcataaaaaagtaagtcggaaacaaatgggattaagaccttctgcaaaaggcagcactaagaccttccacagaaggcaagagcagagactataatcgttcaaagaccttccacggaaggcgagagcagggactttaaagacctttcaggaaaggcaaaactgtaaaatagcctaagacctttcacgaaaggcaaaactatgaacgatcaaagaccttccacggaaggcaaagagaagacctttcacgaaaggcaaaaccataatcgttctaagaccttttacaaaaggcaaagtcagtgatacctaagacctttcacgaaaggcatacataaataagaccttttataaaaggcattcaatatgagaatacgcaaaccacgaaaagcataaggcgataagcagcaagtaaagtgtacaaatcttacgatgatagaacttcgtgcaaagtttaaacccatgaataaacaagtacacgccaaaatatcaaaaaaacaagtaaaattaacattaataagaggagttaaaatacacaaaaagacgactactgcctccttacacaaaaaaactaattagagtattatgaaaagagtactcactctatttcaaaaaattgggggagtagtggcctatgcaaaatacggcgccaccgcgaacttacaaaatatacatataaaataagcgccaacgtaagcttacaaagtatataaatataaaactaaaaaaagccccccatacaaaaactttcaggccccctatacagagaaactttccctctgctgaaatgtcccccgcattgcgagccaccctcgacggttggaggaagaaggagggcgtataatctcggaaaccacccgaggtaattcctgaggaaaggaagaagcgaatatacaaaaaactgagggcgaagcgtcagcaggaacagggacctctttgaaattctcagactgagcagtagactcaaacgggataataagccgccgtcgtttgagttgagctctcctctgacaccttgggctcatccttaaccgcctcaaccggtgccaacacaggaggaaaaatagcgaaggggcacattgccataggtggctcagcttcgactcgagaagcagcataagtccctaaacccagcacaacctgctcgaaacatggacaactgtagacctcagagaaatgtaataggggaagcgtaatgggttcgaagtggcgaaaacttgaaaaaggattcagggaaaggaaagcaggatccaggggctgtaagcctgaaaaaatgttggaagaggaagggtcttttgagtgaggtatctggtctttgagtagagaagccataatgcaaaaaggataaacgaaaagtggaaaagcttacccagaaaaatgtcgaaaggattcttaaaggagaaaagctcaaactaaaagcttatttatacactaaaaattgcatggagttaatgaagatgccacgaaaacggaaacaaaacgtcacttttgcattaaaacacgtgtcaagcaaacacgtacactcgaattacgagaagcggctccaagagtatatatgtctttccactttccaaagcaccccactcaaaaggaaataaatacgtataaatatatgtataaaaatgataagtaataaatacacttaacagagccacagtttcccccgaccttatatgaagcaatgcaaaacatagaaagggacaccaaaagtaatagaagattacaacccaagcataggttacaaaataaagatataataaacaagcaattgcgtacaaataagagccatgcataaagaaacagcaaacagcaaacaaaacctaaactcggggattagaagtgctcgcggtcgggatggtgccagcaaagaatgcatagagaacccggaattacaatagaaccccgaaccaccctcctcgagcaccgacgacaacctgtagggaaaccaggagggtagaaaggagccccctatctcaaacattcctccattcgcctctcgttagctaaatgctccctctccaggtccgcatcccaagcccgccggttccgggcttacatgcgacggtaatcacaacgacgctctgcgcgtaagcgaagggcatggaatttaccatggacccttgtggcagctgaaacgttacgtccctcattctcgaagaagttctgaagccattcctcatcgaaagacgaagacgcatcgtcacgcctagccctgtaggccctcatcatcctcccaacaatagcttcgccactaggccggtagtagcgagagaatatcgcaaggctaggaggggatcgatccccaacatcagaatgaaacttatctccactcgaagactcaggaagaggagaacttggagggtttgacatttctaaagtagagggaagaaaagcaagaaatatatgcgtaaggagggaacttagaaacttcgcaaagatggcaccattaacaaaggaggaggcatgtataaatagacttaaaaaataactaagagaagataaaaggaagacagaagggtaagtccaccaacatataaggcattaaatgccagtaaatacgcacccccaagtgtcggaacgcctcgagaaaagccatacacgtatgattaactatagtaagggtaataaattaaaaataccagttaaacgaaaaatccttacagatccataaaaatattaaaaaataataaaatacaataataatgaactattctttaaacttgttccacgcatgcaaataaaagatatagaaacttaaaataaaaatagggtaaaattcctttccagctcctcaggccctgtcggcatcctcatcatcactagcttcatccgactccgtagaagaatacacgagatccttgtcctttttgaactcggaatacttcttgaaaaactcgtccaagtcccaggtagcagatttgccctctctaaactcggagtacaacttaaaggccgactaataactcccactaaggaacgccttattaacttgactcgtcagaaccttgatctccttagtcagggacccattttcgtcggccaaagccttttcggcttgctccgtcaccttttcagcctacaattttccactcaaggaagagagtttgtccttcatcgcctcagcctccgagcggaaggtgttgcgctcttgcaacaaggtggccttctccagattcaccgcaaacaaactagtctccagggaagcgaccttgtcacttagagcctttttttatgatttcaaggctgaatgagtaagatcccagcccctcttctctgactcaagactgtcggccttactcttcaaaagcttgatgtcaacttctgaggcactgactttagtaagagcaaccgccttagcggcagcgactgcctcataattcttcttataatgagaatagcccttagccaagctttccctctccctatcagtttgcggggcgaatttcatagcatgggcgcacctcagagccgtctaacagaaaataatatatatataagtaagacagtgacaaacgaaacagtaactgaaataaattaagatacaagtaaggggcagattaccttatccccgagatggcagtatcctttaaaatagagtcatgcccttgggagatataaaaatcatcgtcaggttttctgacggcttccaggagagacttgaagtaattttcagccgactcctcaaacgggacttctttcttgatcctgaaagcagggatctcgttccatccagtcggggtcctgggggatggctggatagaggcggggagcctcggtcgggagaaaaggttgagggatgtgccaaaataagagaaagggcgagatgcgaagtcgacgacgctccaaggagagaagcagaagtctgagcaggagaggtggctcggatgcttgcttctcaaag

SEQ ID NO: 386157 - DNA, 1831 bp, Cannabis indica
aaaaaaataataattattgtgtgccaaatttatgataatgttcagtatgtatcaaatttagtctaattttaaatatgtgccaaatttagtacaacaaacttcaatggaatatgtaaaatttatgctatatttgatacagaaaatgtatttgtgatatatttatatcagattttaaaatattactctaatatataattgcaaaatttaatgtgtaattaatatttttattaaaaatattgaaagtaataactttatcattaataaaaaaaattaaaataaatgtaaatagtttataatttaatgcaatacaaattttgcatttgctatattgggatctaaatttaaatcaacttttgacatactattagagcaactttttgtaaaatgaactatattttagcaatagattaccaaatttaatctccattagggatactcaaagcacaaaaacaaccccttaattgagcttttttttttatatatatagtagtaaaaatttaaaaatataatattttggaaacataattgaatattttatcttgataaaatattaaatgtattattttaaaaaataaaagctactaaggctagcttagtggcgagggaggaataggaaaaaagaagagatcatgggatcaaacctcggacttttgagctattaagttattatttgattataaaaatactattactctacactcaaaaaaattttaaaaataaactaggtatttttttagaaaatagttatattttttaataaataaaagttaaaatacaaaatatggtatttttaaaaattaatttataatcttttcattaaatattttttttagccttgagcgtgggtcttgggcaggtcctgctgccccacgcttgagccggccctgatagcactccaattagtaaatttttttactaaaataatattaaaatatagcaatagactacatatttaacactcaattaaaaaatattatatatcaaatcaaatgatgagaatgaatggatcagttactaagttaagctgaaaatgacttaactcaaatcaaaatttaactgttcaaaaacagtactagaatgtttttaggtagcaaagccaaatagcttggagacaaaacaaaaagaaaactctaattgcttttcaaagtttcaatgatttttcaccaatagcttgaataagataggtctattctaattaaggtggtcataatagtagttcttacatcttttcatcaactcacaaaaaacacttcaaagtttcaactgtcggcagcactaataagaagtgaagagaagagtgttttgtatgagtgtgtattggtagtggaagcaacctgtcaatgggcaaaaaccattgtgttgtgttttgtggggtcttctagtttggtatgacttatctcatttaagccatgactcacatgatatgttcatttcatcaacaaaaacactctcttgtttctctaaattgacctctaaagactttatagactctagtctagtcactaagattgagtatgagaattcctttgtatactcttttctttaagattccatttacataattaatatttgagagagacaacataagaaatacaaaatagaattattactactcttccctttaattgttaaggtaaatcactttaaatttgaaaaattataactcaaattgtacacattgtagttataacaaacattttacttgtttatgaaatatttgaaataatttatttgttttgcgaatagggttcaaatattcagttgcataagtttttttttttttttgaatcttaattatcaatttttctccccgaattttgatatataccaa

SEQ ID NO: 386158 - DNA, 997 bp, Cannabis indica
ttgactttgggcctggtaggtgaagcccatttgaaggataatcgttgtctgtacaacgcagtacatatgatgttgacagttgtccatacaccacctatcgtatacaataaatgtcagagtaatgagcgttggacaaaaggtatattattttttttttgctgagcgcctttcttaggtttgacattggggacaaatccctacttttgtggcattttgtgttagaggtgtgccatgtcagatcgatcgcgaaggatcgacctccgtgacaccccttagactgccttttctgggacattcagggagcatccgtttatgccttctcggacatttagtagttttgttcgaattagtcctccgaatcctttggtctggctttgcccacactaaagtcttaatcgaatctggaccacctgtccaagttccttcgtgggtcgggttgctacctatttgggcccttagaataggcttgtaaattgatttggagacagtggatgcataaatgtcacctatccgaaaacacgaataataattactaaaaaaaaaaaaaaaaaaaaaaaaaatactatgctcaaatgtgacctagaaaccaagatatcccctaattttgcatcatcaccaaattatactcatgtttccttaacttctcaaaatgcctctgctataacattacctaacatctaactttattcaatttctttgctctctttctctctttcttctcttccttctctctatgctatctaaattttttcttacctagaatgcaccaataaacacataaaactggctatattttgttattaacacccactctcaccctttcttgcaagatcttaaatgatatagtccaagtttattaattttgagtgcttggagggaaaatttcttatgtatgtagatttctctaacatttattgtttggtgtttatttttacatgtttacgagtatttttgaacagatttgtgtctttgtttgtctgttgtgttgaattttttg

SEQ ID NO: 386159 - DNA, 1919 bp, Cannabis indica
acgatagagaaccgtcgaaatactaaaccgaaaaatcgtactagtactgctcagaatatatatgtaatataatcgtatatatgtatatatcgtatatgtttttcagtgagaaaaaaagaaatgtgtttctcccgttgattttgatgtattatataagcaatacacagaaggtagtaatgagaagaaagacgttattgaagggaacgttagaatataagattgtgagaacgatgctaaaaatcagttaccacttaattaaactcattttagaaaaaactgttttaattaataataattcaataaataaattttttctaaaaagtaaagtgacaccacacccgcttgccagctcaactcggcacggtcggtcgggtggacgaagacaacacgtgtgtgtggtgatacgatgtgtgagtcatcacccatgtgcacaaaattaagtattcccaacctaagtaccaaatttgtacattatatacacttttaataaagtgtttctatcccatgtggaactccattcacacacacttcactttatcaaatttcacaatgttacaacatatattagttatattcatatgtgactttggcacgtacccgttacaatattgaaaaaaaaaacatgaactaattttattagaaattaaataattagaattcaatttttatataaaaaaatttaaatatataataataaaaattgtaaataatatagtttgagagttattgtataaggtaaatactattttggaccctgtgttttacaaaagttattaattagactctctattttgttaaatgataaaatagatcctatatatttcaaaattgtacaaataacaccctgaactgattttttgtcaaaataaaacttaataataatctaatttagaaatattatgacaaaactggttacattttctgtatctattcgtgttagaaattgtcttaaagttgattatattaaaaaataaaattattaaaaattatgcttagagtgctatttttactattttagaaaatataaggtctattttgtcatttaacaaaacagaaggtccaattagtaatttttacaaaacacaatgtccaaaatggtatttatatttattaattattaaataattattttcattagtatctataactttagttaagaattattatatgggtaattacataaaacacttattttttgtaaaatttttacatttttaggttcaaagttttttttttaatatttttacggtattctataaaaacataagaaaactacataaaattaacaagaaaacatcaaaacaacaacaaaataaaaacaaaacaacatgaaaaataatatacaaataataaaaaatcaacaacaaaatatcaagaatacaatataaaaataaatcaaaagaacgtattttatgtaaacaaaatttaaaatatcgtgaaaatattaaaaattccataaaaactgtatttttataatttagatgtgtgtcgtatgtatcaaatttactattatttttatttcaatacttttaattattttagtataaaaataattacggactaatcccacaaggactatttataaaataatttaatagttaatgatagtaattagaaaggggattttgagttgcaatagcataaaaagaaaataaataacgaatgacaattaaaattttaaaaataattaagaattattctctacctccaacaatcaatcaagaataatattatattttatattataattagactattaatcctgtagataatcgtttatgtaacgttcccgcttcaagcctccattgggcccttacacccacggaaataatggctcttatacacgagtatgtcactctggctgcatcatgggctgatgactgaccctacagaccaacacgagtgtttccagcgtgctt

SEQ ID NO: 386160 - DNA, 1110 bp, Cannabis indica
gtgatgatgagggttgttgaagatcatcatgttaaggtttttaattttagaagaatacttttggtacaaaataatgaattcttgttacccttttataaagtgtgtcaaaattataagaatctaatctcaattttgagtttattatataattaatagagagtgccaaatgttttgataatgaatttggtgaaaccacataattgtattttctttttcagaaattttaaattatttgaaaagaactttctttatttattttttatatgacatgaaaaaagaaaggttctttttcggacattttttaataggcttttacaatttcaagaaaataattgaaacatttcattaaaattaattatggattaaatggtatgtaaaattggtggcattttttggaagtaaataaattaataaatttattaggaaagtatagggaaaagtaattccagtcaaacatttcttatatattggaagagtaattaattaggtcaacattgcttgtgaattcacactatatatttttgttgttattttatagaatcaaaattattgttattttctataaatatgtatcatcatttatatattttatattttcacattctatgtataatatatatgatatagttgcaattggcaatcttatcttccaatgtatccttaattattccagatagagtttgtgaaaccctagtatattcttagtacatataatccttatttgctagagactatttatagtcaattagtaaaatattaattgtatgatagtgattatctgtcaactgtaattgtaacttctttacaccttccatatgttcaaaaatatacatgatgtttttagtgaaataaaactacatatgtttggtgaatttttaatcgtttttgtcttgtattgtgaaaattattaaattggtactcctcaaaatttaattattataaaattataatttagagaaagaaaataaagaaaaaatgagaattttcttaatatcttatttcaatgagtaatttcatatttaaacacatatgagagtcaaaaattaggaattaagaaaaaaatgaatattaataacaattaatagtaataaataaaaaatttagacatcc

SEQ ID NO: 386161 - DNA, 2886 bp, Cannabis indica
gactttttcggttcgaaccatagggctcttaaaatggttttttgaggcaaccctatgatatttcgacgtgactctacttttcatttcaaaaaccattggtttcttgaatctgatttttctgatcttgttaaacataactggactatggatgctctttcggataaatctgattcccctctccaagatttttctctcaaaacagcataattgcattgcttcaatgatttcttggggtagaaataaaataactttgctcgagaaatcaaacgcatccaatctgatattgagcctcttttggctggcccagttatttcaccctctgaagttcaaaaagctaatgctcttcaacgtactctcgacaatatcttgcttaaggaagaggtttttctggaaacaacgttccagggccaactggctcaaagctggtgataagaataccaaatatttccatagtaaggcctctactagaaagcgcaataatttcattaagtcccttactttagatgataactccagtgtctccagcttaagtggtataactaattcttttgttcagtttcactttgaccttttctcttcgcaaggtacggatcctgatgccattgccattaccctccaagggatttctaaaaggatcactgctactcagcagacttttcttgccacccaatttgactttgcggaggttaaaaaagccctttttcagcttgttggggataaagctcttggcccggatggcttgaaaccctagcttttaccagaaaaattgggacaccgtgggcattgatctctgtcgtgctgccttacatgctcttaataccaacgttgaccttgctcctgtcaacgatatgactttggttatcacccctaaggtcaagaatgcttcccgtatcaaggactatcgacctattagtctttgctctaccttttataaggttgtgtccaaaattatcgctaaccgtctcaaatccatccttcctgatcttatttctcataatcaaggagctttcctcagtgatcgaataatctttgataacatcattattgctaatgaagttattcatgccatcactaattgtaagcatgggaaagttggttgggcggctttaaagcttgatatggaaaaggcttttgacaaagttgaatgggcgcttattcgagacatccttcaccaacttggttttccttcccacttcatttctctcatccttcggtgcatctcttctgtttccttccgtcttcctataaataattgtctttcttctcaaatctttccttcctgtggaattcgacagggtgaccctctctcgccatatctctccctccttgtcgctgaaggcctttttgggattattaattataaatctcggtcgaactctttccatggtatttctatctgtcgctccgcccctcccatctcccatcttctgtttgctgatgactgtttacttttcaccaaagtttctgcctcctcttgttctgaaatcaaagacattttgctcatctatcagaaggctactggtcaatcggtcaatcttcataagtcttccattcttttctctcctaattccaactctcttgaccgagatttctttcgtaattccttgaatatggataacaagcctttcattgataagtatcttggagttcctcagtgtttttctagatccaaaaagtcttctttcctttttcttctgcaaaaagcaagctccaaattatcaggatggaaccaaaaccttttctcgagagctgataaggagattcttctcaaatcagttattcaggctatcccttcttacgctatgtcttgttttcggattcctgtctccagttgtaagaatttcagtgggcttatggctaaattctggtggggctctcttggtaacaaacacaagattcactggaaaagcttggacaacttgtacaagtcaaaactttttgggggattgggtttcgtaacatttttcatcacaaccaggccatgttagctaagcaagcttggagaattttcacatttcccgattctttggttgcttcacttttgaaagctaaatactttaaacacaatgattttctgcatgctgctattggtcactctccctctttctgttggcgtagtatcctttggagtagggagcttctcattaaaggactaatttagaaaattagggatggcacctctgttagcatcactgaatccaattggcttcctcactggaatagtgttactttcaaacctggcctttctcccccttcctcaactgtttcttttttcattactgaggacaaacattgggatattagcaagctccaacattactttgatgagggggtgtttaattccattctcagtgttcctattgatccttgccataatgactgccttatttggaattaccacccttctggctgcttcaccgtcaactctgcttaccacttggctaattctttttcttctgctcctggttcctctaatccagctgcttataaatcatggtggttttctgtttggtcagctaatatacctcctaaaattaaacattttgtgtggaaagcttttaatcatgtccttccttctaatcttaaccttttccatcgtaagtctaggtcttcttccttttgttctatttgtctttctcatcctgacaccaacactcattccccagtaacgtgttccagagcaggtaagtattggaagaaatcttcattttctcagttttattttactaataataattgtgacattaaggaatttttgcatcgtggttttgaacattttgacaaggaaacgtttgcttgttttttggatttgttatgggcaatatggaatagcaggaataaggccattttcaatgctcaccactatcttgatttgaatttggaagc

SEQ ID NO: 386162 - DNA, 793 bp, Cannabis indica
taattaggcaatggccttctctttggctcagcctaaagatcagatcagatcagaaatctactaacaaaacaaaagtcaaaagcaaaccccccccaaaaaaacccaaattacctccgttagggttttcaacagcagcacaattccgaagctcacccaatacaactcgctattgctaataaaagaggagtcttcatcgtcagagaatgaattggcttccgccgcagacctcttcttagataaacgagtgatgcaaacgcactgagacatggcagtaattaatctgatctaaaatggatctctctctctctctctctctctgttgttgggtttgaagaaagagaaggaaagagatagatggagatggaattgggaaatggtggatttgtagaggtatgaaaatggagggagggagggagttttttgaaagtgaaactcaaagaaagcgccatttttttttgttttgtgtttggtttttcggttcggaaagtgggcgatcatccatatgtcatcgttctttatgccttcaatcgtcaactccaacagaggagatagaatcgaatgacctccaatagaattttaccaaaaggaaagttgttttcaatggtcgactccaactgagagtgagaaaacgattaaacgaaaaaggaaagtttaaaaggaaagttaacggcgttaaaaggaaagttttaaaaaaatggtagatggttttttggggttaaatttaacagaatattcttttatttgtaaaatatattctgttaaaccgagaaatgtcgttagatagacactttta

SEQ ID NO: 386163 - DNA, 3447 bp, Cannabis indica
taaaaactcttagattctgtgaaccatgtaaaatgggaaaaggccataaactaccttattctatgtcaaattctcgagcttctcagccacttgagttgtttcacactaatctttggggcccctcccatattacttcacttgaaggacacaagtattacatcatctttgttgatgatttcagtaggttcacctggatttttcctttcatagtaaaatcccaagctttttccatattcctagagttcaaaaagcttgttgagaaacagtttaatctccccataaaaactgtccaatcagactggggaggtgagtacaggatctttgctaagtttcttactcagcatggaattgcttttcaacacccctgtccccatgaccatgagcaaaatggaggggtcgaaagaaagcatcaacatatcacagaaaccggactcactttgcttgctgaatctggtcttgacttagaatactggtggctagcctttcaacatactgtctttgttatcaacaagcttcctacacctattcctggtgatctctcaccatatgaatgcctctttcacaagcatcttgattacagctttctcaagccttttggatgctcttgctatcctcatttatggccatatcaatctcacaaactagagattcgatcagacaaatgcacatttgtgggatattctatgcagcacaaaggctatttgtgcagaagccaaacagggagagcatatattgctcgaaatgtcatctttaatgagcaagaatttccagcaaaatgtacatcaccacatcaacaggtacaatcctcaccctctacactatttccaacaactacactctttactactcctatggaaaatattttatctaactcaaatcctactattgttgacacacctgctgctggtgctatttctacaagcccaacatctctccctactgatccccagcctgttgaacatccaccagatgcaccaacccgtgagccagtaattccacccatgcttgccaccacaaatcctatatctcatgcaccagtaccatcaccagacaccaatcaaaacacaaataccaatcaaactacccaaatcctaacccctggtcagttaccagttagtcaaccacctagaaattcccttccaatgacaacaagatccaaaaatggagtccataaaccaaaggcatacttttccaccaatcaccctttacccgaatctttaaccccaactgaacccaaaacacttaaacaagccttggccgatcctaaatggtttaaagccatccaagatagcactaaaaaaaatggaacatggaccctggttccatatgattcatcaatgactttagtagacaacaaatgggtgcatcggataaagctaaattctgatggttcagtaaataagctcaagtctaggcttgtagcaaaaggctatcttcatactccagggatagatttcacagacacattcagtctggttatcaaaccagcaacaattcgattgctactcaccattgctgtaacaaaaaattggcccataaagcagcatgatgtctcgaatgcattcttaaatggctcactccaagaaactgtgtacatgcctcagccccttggctttatagatgctgagaaaccagctcatgtatgcaaacttcacaaagccttgtctggtctaaagcaagcaccacgtgcttggaatgatacactgaaacagactttatttaaaaagatttttctgcatctcgatcagatacatctttgtttatccgaggctctgcaaatgacttagttatgcttctcgtatatgtagatgatatcataatcacagggccaaacaacacaatcatcaacagtcttattgatgatttgaatcaagttttttccatcaataatcttggaccattacactattttttaggggtggaaattgctcgaaatgccactggaatgtacttatcacaaaccaaatatgtctctgacttgctggtcaaactccatatggagggtgctaagccttctccaaatcccacaagctctacacacgaactatcactatccgagggagaaccatttatgtatcaaacactgtacataagcacattgggggccttacaatacttgactttaactaggccagatgttgcattcattatcaacaagttaagtcaattcattcaagctccaacgacagtccattgggaggcatgtaaaaggttattcaggtaccttaaaggcacaattcatgagggacttctcatcaaaccagcaccacaactctgtctttaagcatactcagatgcagattgggcaagttgcccagatgaccgacgatccacaggtggctaagtaattttatttaaggtaaacctagtgtgttggtctgcaaaaaagcaatctgttgttgctagatcgagtacagaaagtgaatttagggccctcacaaacgcagcagcagaattaaggtggctctgctctgttctaagtgaactcaaagtccctcttcccacaacaccaatgatctgggtcgacaactttcacgctcttccctaactgcaaatcctatctttcaagctctatcaaagcatatcgaaatggacctacacttcatttgagaccaaatcttagcaaaacaggtcgaagttcgatatgttccctcctgtgaccaaactgcagatattctaacgaagccattgtccactgatcgatttcatcatctcaaacaaaagcttcaagtgtgtccaaacccctttcgcttgaggggggatgatacaactactactctacctaaactaactgtttaattagttagttagttaaaaacagttacaactgtttctttgtaacaacttttctgttgctttaattcttgtttcttctctgtattctctcctatataaatgaaatcatttcataagactagttagcttttgctagtcttgaagtgcaatctcatagattggattctgttagatttttagcatagataagctctttcacctcgaaagaaagacttgcaatggcgtcaactcttataccccacgggctgttaaaccacaaacttctggtaaagtgatagtcctcaaagagatgagtaaccgtttccaactcctcccacacaaccagcattgttgatccattctaggcgagaaacatcgccattggagcggtaagcatcaagatagtatcttccaaattagcagagtttgtctaggatggattctctgttgggttttataccctaaataaaactccatttcaatgtaatctttattattcaactatcaataaagagacagaagtattttcatgtgtgatttggttcatgttatcatttatatgtttatttgatttataaattcatccaaacccttatcacatttatgttcttgtttattgtgtcgtcagcacagtggaaagtaatcaagattgtgtgattaaatatatattcc

SEQ ID NO: 386164 - DNA, 2969 bp, Cannabis indica
tgtacaaaacatttggtaaagaaaaaaaagaacacagttggacaatgattataaataagggatgaaattcattaagaataacaaagcattcacacccaggattaaaggctacccggtcagccagttgttcgaaaaatgaaagatattccaagtttaaagaccgcttggttggtcaccttgtctcaaaagaaggcctattggccgaatagacatataaaaaagatagtaaaaagatggaaattaaacagcaggaggatcaggtaggtctgaagaggctggaggatcatcagtctggacagaaggagcctcgacattctgctcggtcggagaagtggaagtggttgcctcaggattctcattggccgcctgagtggtgcagtagtcgagaaacatgtttttggaagccccaaggtattcaaaattttccttgggattgggcttccaaaagtcataaataatctcgagaccagtagtctctaaggtgtccactttcttcctaagctgctccacctcagatttctggctcttaacctcagcctcaagttcctcctccctggtctttttttccttaagctcatcttccaacctgcgaagaagagactggagaccttctcttttgtcttggagacgagtaccatcctgagataaagaagcattatctaccttaagttgcttagttgacggcacctcctgcagttccctagtcagctcggcaactctagtctcagcaacaagaatttttttattgacctttccaagtttcgttcgcacagtctcaatccgggcctgcgcatctttggcgtcctttttggccatgtctactttccttcgcattgtgttggaagtggcaaggttcttgacatcagccgatttagctcgggaagaggcataagccatcttcaaactagtatctgcgaaagagaaaaggattaaaattcaaactagtgtctgcgaaagagaaaaggattaaaatccaaactagccaaagagaaccaaaagaaaaagtgttagggccccaactaactgttcattcaccgccgggactaaccgggtcacatagtggttaagcatgtctttgcctctcttggtcaccgtgcacaataccaatggtggggtaggggcccaaacttgctcatatcctcccctgaccagctcggatccaatctttgcctgctcaggtccatctaaactctctctccgggaacctttggacttggcaaccttcaaggtggaaggatccagagcaggttgccctcgaaaagatcaatgacctcttcaactggtgccttctctttggatggggtctcgccgcctttagacttctcgactggaggggacaagcacgatctccccctcttcagagcctcaatcatcttccgagacatttctgcacagaaaaaacaatacagttagaagaagacataaaatatatggaggcataaaaattaagaaaaataagtgcaatttaaagtattttacacgctggcaagagcatctgcccaaacaagcacaaatggagcgtcatcatccgaagagtcttcctactcctccaggacggcctttccctttccctctacaggggttgatggccgagcagctaaaccaggctccctgattcagatagtatgttctactggcctctgctcggtctagagggttttcttcatcttgagtggcctcttctgctctaaatattcttgagcctccttctcttgctcagaacctgagcatacttcttgggtccagcatcacccttcaacttagcctcacgcttaagttgaatgagctcctttcttgctcagctccctcagcccgaccaaacctggacttctttttcctccccttcagaggctggggtataaactttgctggataagcttgtatttcacaaagttttccactgaggtcaacaaagttatattctgagcagcatccgacagctggagaattttctaggccctttccctatgtgccaatgtgaagggtggacgacaatacacatggatctattgaaactgagtataggtgcctccatgccttccacaaagtaatactcatcaacaaaacccccaatcttgctaaccaccgtgtccacggtgcccgtcagccacatgcagtccgactgagagaaatagaaggaccccgacttgctctgcttaggggtagacttcagatcaaaaagccagttgatgtcgtgcgaggacgacacaccccatccttaagtggcgtacaggacgaactggcgtacaggacgaacagggcagataagtacttgatgcccttggttgtgaaatgggtcagacagaggcggaactaatccgcacccctcttgaagtacgagtgcaaaggtagcatcgccccttgctgagtgtgggcacccgaccaggcacagtaccctttctttgggttagtcgctcggtgattcgaagaagggagataacactctagttcgcctagatacctagccttattcaactccctcatttggccttcagttatgttggacggaggacatacacatcttgcccctaaggcaattttcctcctgtgggggaccgcctcggtaaactcctcggtgacatagtctgccccttcaaccaagacgtcaccttgctcgaatactggctccctggcctcattatatcctccaaagtgtggaagcccgaccactccttcctcctcagcttcagaagggctatcatgatggacatcatccttctcctctatctcttggacctcaatgtccccctcataatcctcttcctccacagcgggcaggtcctgctcgacacttggcagcgtggcgtgttgggccacatgagggttggatgcattaactttcttcagcgtttgctttgtgcgggccatcatctttctcttggacgaatattggtttgtatgccgcacaatagtaacaacagggaaaactattggaatgcaaaagttaccaatgttgggttttatgccct

SEQ ID NO: 386165 - DNA, 982 bp, Cannabis indica
agcttctacctgaaatagataaataaataatgagtcacacagacccacattaattcacacttgctaagataactgaattaattattttgaaacaagcagagaaatgagaaaacaggagacgacctcggtgatctgaagaacgacttcatctctcttgagaaattttccgagcaatcgtggggcaaggtctagggaatcaatttggaagaaggaaaagggcaatatcggtaatttatgaagggatagctgaggtgggttggcgtcggcttctaatctctgagacgaccgaatctggtcggcggtggggatgggaatggatttctaggtttgggtgaaactgcaactcgcttgaattgccgacttcttttcatgtcgccgatcaaaccaaaaagggagtcagtatcataccaagtaatgttcgatcaagttttttttttttttttttttttgcctttgaaagggagtccgatcaagtttccacaacaacaataaacaactaaagagtagagttactaattggattaattatgtgtcatcacaaaatttatcgaaaacaataataaagaagaaaaatattataggtattatattttttttgttggcgtagaactttgacataaacagaaattttaaaatccttaaaaatattttttaactaattttatttttaacgatcttaaatctaacaatctcaataatagaagtatttttaatcaacttaaaagtttaagggtgacaaaattttttttaaaaaaaatataaaggtgcatttaattttgtgggataaaaaaaattccctagtattaaagctatttgatggaattagttagattattttattaaatactagttaacgaagctgcacttcgtgcggtatgtataataattttaaaattttttacattacaatataattttttttgttaggatatcaaaatactttttttattatagataagaaataataaaattataaattaat

SEQ ID NO: 386166 - DNA, 1023 bp, Cannabis indica
atgttgaaaaatttctcaataatatgtaagtttgatgatgaatttattgatgttttcttgtttatgcaatactaaaagcttgatagcattttttttttttcgaaatgttctgcttctttcactcctaagtggtatacgttttgcctcttttacaacagtccgattgattctcagggttacattgtcctggaggaggttttttccctcttattttgctactacgatcacaacttttaggggattaatgctcaatatattggttgtgataaggattaggagaaaacaaagaactgatgaagaagaatagttcttcatctttcctgtgagttttttttttcttatactaattgatttagtgttggctatacacatatagatatagagatatcctatgaattttatcaggaagtggtccccaaattaaaataatcaaaggccttctttgagatatgagttcaagaaactggaaatgtacaataaatgtacttgtggttcttgttcggtttttcttttcaacaaaacttacatgtgtcatttaagcttgttgatgccaaaagtaatgtgagtgtttgtattagttctctttctttttctttttctttaaaacatatactaaaaaaataaatgttttcaggtctatacttgggaggaaagaagcatggtgaaccagaagctaacaaaaaaattcaacataaatttctagtcaacatgttaggaaggtttgtttcgttgacctctttctctaccaactaataaattatattaagctgagctgagtcttttttttttttgttgctttgcactatatatggtaaagaatgatgggggcattatgacttgctttgtataaaaatatgatatacttaagtgagtaagtctgttgttgtcaaaattgatgtttacctggtagtttcaagagaaacatgctaagttcacgtcattaagtcaacctcacacaagtgtaaagttaacttggggggtaaatatttatacaaaaagtagccttgatgatgtggacatcaa

SEQ ID NO: 386167 - DNA, 1226 bp, Cannabis indica
aatttttatgaagcaagctttgagtttcgctaaggaaggctaaacttgcttaaaaattagagcaataacttcacttgaaaagatcaaagggtgaaagcatcacgggcaataagatagacttcaggcagtccttccattctgttaacgcagattttcgttaactaaatttgagcctcacagtcgtgatttcacaaagaaaagataaaagctgtaaaaataaagatatgaacacaagattttttacgtggttttgcaattaattaattcagctacctgcagcttatgctgaaatgcgtgggaatcagttggacatgctatgtttagttgtaaacatgctaaatctgtttggcgttcatcagactacacctttgattttcaagcagcgagtaggatgcaggagagtgattttcttattcatttgtcaactgcacataccaaatttgatttgaaaaaggttatatgcacaatgtggtccatttggtctgacaggaataatattatccataacaaatctcccccgaaacctattgaaatagatgttaaatcaatggcatatctctgtaatttttagtagaaccatttgcactaactctgctccttatgtgtgttcttcggtagctaatcgtgtgccatggtagcctcatcatcaaggttgatttaaactgaacattgatgcatctattgactcttcatgaaacaaaattgggttgggagctgttattcgggactctcaagggcaagtgttgactgcactttaaaaaccaattttaggaaactttcgtccacaagaaatggaagcaaaacctttgtttcatagactacaatgggcaagataattgaatgttaaaatggatttggttgtcaaggggaagtgttggctgcactttaaaaaccaattttaggaaactttcgtccacaagaaatggaagcaaaacctttgtttcatagactacagtgggcaagataattgaatgttaaaatggatttggttgaaacagattctttgtttcttgtcaattctctcaatggtttaacatcaacatgtttatcttttcaggatttaatttttgatgttaggaatcaattacccatctccttaatatttgtgtttttcatgttcatagagatgctaaccaagccgctcatggtttgaccaagcaagctttttgttggatattttattttaccaggatcttagatctactcacaagtatgttgtttaaaca

SEQ ID NO: 386168 - DNA, 2456 bp, Cannabis indica
tttgataattttttagttattgcggttacattagtgtgccatttagatgtgattatacacatatttattatatatgtacaacaaaactcaagtgagatatcttatgaatcgttatgtatccaattgagtagaattgtctaatataaaattattttaagtactttaaatttaaatttcttaatataaaatacgaaatttgtggcataaatacctattttcttttacttgttgctaataaacaccgagtgttaaaatttgcagtaaaaatacctaaagcccaatttctatttttatgtaggttcatctattaataattttgttaattaattctaaaagagcacatgtcattctctatctagaatggagggagagagtattaaaagaaattgttagttttatttttttaattttaaatttaattttctaaatttatataattagttgtttatttaaatatattttaataatttttcaaaattagaccgtagagaaaatgacacatgtcattttaggagtaattaacacaaatatctatataatttttacctacataatttatatctttaaatatatatgtaatattgtaaaataaataaagaatatcctgttaagtaataggatattcttttaaagttaacctaagtattctattacataacgaatagataataggataatattctgtgaaagttaacgtaagaaacaaaaaaatatcgttaaaccaagaattaattgtgttacatagccacattttatataaaatagatatataaatattatataatctagaaaattcatacataacactatttaaagatcaggtactcttttatgtgtgtatataaatttatgttatcaatagagaatcaaatggaaatagtggaaaaataaaaagaaaataagtaacactctctaatatacgataataaatgaaacaaaaataaaagaaataactaattgatacttagtccatttataagttctcgcaattttgaagatgttattttgtagaaataggagactcaaaactcttcattttcaagtatgttagaaatgagaaatgcaattgtaaattcaattcctctgacttcataaatcattgtatacgtgaaaaactagacgaacggtcgaaacgacatcagattcggacaagcagaacccagcgtaccaagccatttgttgacttgggcagtagatcctttcaatagagctcccgagattttatttttgatactttcaaggcttctaaacttgaggatagggtctcctcccccatttttgatcatgtcggattcaatggtcccatcgaatttggtatttgagcaattaataacggcaacgtcctaggttgattgtcaacctgtttgggccctatttttagggactcgggtttgtggttcaaagctgttttcacattatatttacatcagatggtattgatacataagcagtacagtaggttatttacaaggttccctgtacaatttcgtctcaggttaatcaagcactcactcgaccttacacaactacagatgtttttgtaagcactaacttccatgatagtctgatggtagtccagggacttgacggcatgtcagttatgttttactcgaaccactggcatgttgttggtgatctagttaccgggggagatccttcaagcttcaaccaaatagtgattaccttgattcctaaggtaaaaagccaagctcaatgactcaattgagaccaatcagcaattgtaacgtgctttacaaattggtttctaaattaactgttcttcggttgaaaccatatcttggtctggctatctctgattcccaaagtgcatttctaccttctccacttataacagataatgtgttagcggcttttgaattactacattctctaaagcacttaaagagtggaaaggaaggttatgctgccatgaagcttgatatgagtaaggcatttgatagagtctaatgacatttttgaaaaagtatgatgttatcaatggggtttgatgcttctgtggtggatcttattctacactgtattcaaagtgtttcctattcttttttgataaatggcactgtcaaaggaaaagttattccaagcagcgggattcgacaaggggatcctcttttgccatatttattcatcatatgtgttgaaggtctttctagactttttcaagcagaagaaataagtggtttaaaggtttcatgaggcactctgtcagtttctcatttatttttcacagatgatagtttggtcctctgctgtgctaattcacgttcagccactgccttcgaaaactcattggattgctactgtcacgcttcaggacaaaaattgaatgttgaaaaatttgtgtggtccttctgttgggttttatgccctaaataaaactcatttcatatataatcagatttacttattaataaagatcagaaataacattttatgtt

SEQ ID NO: 386169 - DNA, 963 bp, Cannabis indica
tttctttggtggagtatcctatcgaatgctttgcctgtccgtggtctcctggcaagaagaatctcgattgatgatgacctatgcccgttgtgtggggagatgcaggaatctatggaacacttgttcttttattgcaactttgcttaccatctctggagatcctccccttgggaggtgttcccgagccctgactctggaggccgagtttgggattaggttaaatttctttggaacttgaagatggatggggtggactctgacaagctgttcctttatgcttcaatcgtctttgatacaatatggaaagccagaaatgacaagattatgtttcctgcttacttcccccgaaaactttggtggcttctccaacttggaaccccccgcatgaagattgggtcaagatcaactgtgatgctaaggttggtggagattcaatgtgtattgcggctctggctagggatcactttggtaccgttctgtgggctgctgttaccaagctcaactttagagatcccctgattggtgaggcggcggcgtgtcacctcgctttggactcggctggactcaagaaccttaactatattttggtggagagtgattctgaattggttatcaaagcactgaaaggtcttcaatctatttggaatattgataattatgtttatttacgtaaccaactctctaaaaactttttatcttgtaattttacgtttgtttctcgtcgttgtaattttgccgcccataatgtggctaattgggcgtttgcccagaacatttcaagttttgtggagccctcctcaatttcgatactatcctatgtaataaccgagaggtctaattctcatatatatcaatcgccttattttcaaaaaaaaaaactaacacttcaaattttttttaaaaaaacaaacataaaacatttttaccaaaaaaaaaacataaaacaactattatatgttaaaa

SEQ ID NO: 386170 - DNA, 1653 bp, Cannabis indica
cattagaaggtttaatcacagtggatcttttggattttttttttttggattattttcttggtgctctatcaataaaatttcatttaattaatcctttttgcacatttttttttaattgctctattcttctccaatgctaaacctgaaaatattaataacccaaagcgtaaaattgcacaaaatataactaaaactaattaaaaacactttaaaatcctaattaaaagtcaaactatttaagtcctaacaccaagtacttggaaagaaaatccatcctaactaactataatgtcaactcagttaagtccacctccattagataagcccttaactgcttatcctcaattctaattagcatagacctaacccaccttttggagataaccaattctccgctaggtaagaggttccaaaccctatctcaataaaatcatagggcctacccaatttattaattactcttgacaccacatatgaatgtatagctctagagtcaaactgtacagagtaatatgagtcgtagacaggaagctgacatgttattacagaaggattggttgcagcatccgcttgtgtaatcgcaaatacctgtggtggtgtaggtttcgcctcctactttgaatcttcatttcttaacagagggcagtctttcttgaagtgtccgaccaaaccacactagctagaagaatgtttttatgttgcactcatcgggatgatgcttcttgcatcgaagacattcgggatacatatggatctggcaaccacctctgccttggttcccatagaacctcttactctgatttgagctaattggtgtcagaaaagtcttcatctttcaatcaatattagaatcaccaccatccctaccataaacagaagtaggaagggtgatggtcccaccaacactagtatttcctcgcggctcttgcagaaactcaattgcaccttcagctcgaggagccttcttaaccatatcagcatatgtagtggtgtcatttgtagtaatgaccaaattgtacctaatcttgacattcaaactcgccaaatatttttttttcttactaaaatccgtagccagcttagcaagtcaatcaaactttatggtatactttgtcactaacatagtctctctctgaaccaactcagtgaactcttttcttttaatattgcagactgcctcattatagtatttggtattgtgaaccaactcagtgaactcttttcttttagtattgcggactgcctcatcatagtatttggcattatgaaccaactcagcgaactcttttcttttagtattgcggactgtctcattatagtatttggcattatatagatcctgaaactttcccaggtcattttagtgatgtcccgagtaaagggcaatatttcccaccacacgagggtatcctcctggaactgaaacgtgacacaggtcacccgatcattactgttgactcccataaaattcacagttaagtgtcacggtggactgcctacgtgtacacaagattactcgtggcaaaattttagtagtccaaataattttaattttaaatataataaaaataatttaaaaaaataatttatatagaaaaaaattatgaatttttttccttttttttctttttcttttcttctttttttctttct

SEQ ID NO: 386171 - DNA, 1501 bp, Cannabis indica
acaatttattcaagaactaacaacagaggaatccgtacgcctcaaacccgcacccaagttgtaccccaatctggccgcccataacaggcccgtacgcaccgtaaggagctccaccactaccacctgaaaatccccaactcctcccacgacccacgccacccacaccacaccccaacccccacgaataaccccaccaaacccagcgaaccctcttcccagcgtgaccgcagcatcaaccgataacacgaactcacccatcaccggcggataccaacgagtcgcgcataccaaactgccccctctcccagcccgtcccaacaccccaccagcaaccccgtcacccaccctagaaaaacaaccacgagggccacctaaaacccaaacattagaacgccccctccccctgaaactcctccaacgcatcctttgctaactcgaatatcagatcttgtcttgattgttccttcccaaacaaaacggagtttctatcataccacacctaccaccaaatcatggccaacagctcaaaattactctgctcaatcaccgcaaaataagcaaaccagcagctccgccaacgaaccattcctacaccgatttaactgactccaaacccgaagctttgatcagataggaagcagagaagaacagaacactaacgcatgtttcggagtctccgtggcctcaccacatttgtggcaaattggttgaactggaatcttacgtttgataagttgggaattggtcgggagagcccgatgatacattccccagagaaagattttgactttatgtggtatctttaaatttcacagccccttccaccaagaagattgattcaccgaagacccgccattcctttcattcgccaaatcaagcgcaactgcatacccactcttcaccgtatagcacccattggaattgtaatgccaacaccactgatcttcacatccccccctacacaacgggatgctgaggatgacatcgatatccaaccgttagaaatattgggataaggcattaagatcccaagccccatccccattaatcaattcttgaaccagcacattaccactcagcgcatccgtaattggtcgaaacgttgtaggctggggtatccaaggatcacgaaacgcatgaatacttcacccatcccccacaatctttcttatccccgttcgcaacaactcgaggccccatatgagactagaccacagatgagacgagccatgatgatctttagcctccaaaattgaagtctgcagaaaatacttatgcttcaagacacgagcaggcaaggagttcggcgactggagtaaccgccaaacatgcttagctaccatagcttgattgaaaagcatcaggtctttaaagcccaaccccccccccctttaacctttggttggcaaacattatcctatctcacccatgcaattttcctcttatcacatttggtaccccaccagaactgtaaaataatagatcgaagcttatcgcacgt

SEQ ID NO: 386172 - DNA, 1419 bp, Cannabis indica
ttttgggtagatttgaatttctcaataatcgtttcttttattattattcttataactagttgaaaacaaaataggataatgcgatcaagattaatgttgatgggactatttttaaaactgagaattcttatgggattggtctagtggctcgggggtcgaatggccttttatttgagacttttattgtgcatgatttggagtgtgtttaacatattattttaaagtaataggcatgaaagaagctccaagttagataaagaggaggatttggagtaatgtggtagttgaaactatagtttggtgattgttaaagtaagttagagtcctctcgagatgccctatacatttagtttattaatttgtgattgcaaagatttgttacctactcttaataacattgttatttgttttgtttcacgattattttttcttatacacatggtaagtaattgattaatcttatttttggtattataaattatttagaattttttgaaaaatatttaagtggtcctaaagagctacaacatactcgattataaaaaaaaaatatattaattttttttttaagttaatttgcaacatacatacctaaatttaattatcgattactgataaataccttagtataatttctaacggtaataatacttaaattatatttctggaacattcttatgtacttgaccattaagtgtaaagtcattatccatgtgtcattttctttattggtatgtttaaattaattgttaaacaaaaataatagtttaatgaccaaaaccaattaaagattgtcacgtggatattgaattgacactggatggttaggtacttacggaagtttttaatataatttacatattattaccgtaaaaaattaaacttaagtatttatttgtaactcgtaattaaacttaagtatttatgttataaattatttaaaaaaattcttgatgtggaaaaagataggtctactagaacgaccatttaggggaaaattttattggagaaatgctttaaatataaatattccccatgtgtccaaatccactttagagcattcccaatagcatatctactctttttttaaaaaatacatcaataaaaccctattttctttattttacagcatacttttacattacaatatatatcaacttctttaaaatacatcaccaaaactctactttttaaaaaaatttaatatattttattcatttcaaatatataatatatacatatctccatacaaaaataattaataaaatatatttagagcaataaataatattttataaatatagagtatgaataataaattttaaagaaacggagtttagaacatatgcttagcgtgtttttagtacaattatttaaatttttgaaagagtataagttattgggtgactctataatgca

SEQ ID NO: 386173 - DNA, 4475 bp, Cannabis indica
aataatttccttatggttaatcaaagtgggactgtaaatcttggtaataacatgacacttgacaatgtattatatgctcctacattcaagtataatattatttctgtccgttttcttaccaagaacactcccatctctataaaattcacatctcacaagttcactatgcaggacaataccagcaacaagatgattggaagagggaatgcaatcaatgacctttatgttctttacactgcatctgaaatccctcaagtgctctcggtttctgctgaaacctggcactctagacttgggcatatatctcttaaaagattagatttgcttcgaaatgttttggattgtaatatttctgctttacatgaaaaagaaccttgttacatatgtcctattactaaacaaaagaagctcccattcaataataatgtcaagtttgctgccaaaatttttgatctaattcattgtgacatttggggaccatatcacattacatcacacactaatttcaaatattttcttactttggttgatgataaatctaggtttacttggatttttttaatgcaacataaatctgatgtatcttttatcattcctcaatttttgtcatatgttcaaactcaatttaatgttgttttaaaactttcagatctgataatgctccggagttggttttcaaagatcttttctgtaagcatggcatcttgcatgatttcacttgtgttgaaactcccgaaaaaaatgccatcgctgagagaaaacattagcacttattgaatgttgcccgagctttgtttttttcaagcaaaagatgccaattaaatttttgtccgaatgcatccttagttcagcatatttgataaataggacaccaacacctagatctattgggaaacaaaactccatatgaaattttatttggaaaacaaccagattatcatcatcttagatcctttggttgtcttgcttttgcttctactttaatggctcataggaccaaattttctcctagagcccgagtatgtgtctttataggataccctcaaggtgtcaaagggtataagctttttgatttaaataccaaccaatgttttatttcaagaaatgttgtgtttcatgagaatatttttccatttcataaactcaacactaatgacaacaattttgatccttttactcaaattgttctgccacattctataattaatgacacatctatttgtgagtatcccacagattctactgagcatataccagctaccccacatatgcatgatatgaatgaaaggaacttggaggaacaaccaagtcccacaactgctacacctgcagaaaatcagaccgctgcaactcaagatccatctacagaaaatcgaaacattgctgcccaaaataatgcagcaacacaaagttcttctcaggaggcacctagaagatctcaaagacaaataaggccaccatctcacctaagagattttgagtgttattcactcatttaggacacttcttcaaccccacatcctatcaataaatttctatcatattcgaatttatctgacacatacaaattgcttttgtccttgcagtgtcttctctcaaagaaccgagatcatactttgaagctattcaaattgtgggctggctgaaagctatgcaatgtgaacttaaggctcttaccgacaacaaaacatggactatagttccattaccaccaaacaaaagagccataggatgtcgatgggtatacaagattaaatataatagtgatggcagtgttgaaaggttaaaagctcggcttgttgctcaagggtacacgcaacaagaagggctagatttttttgatactttttctcctgtcgctaaattggttacccttaaattgcttttagttgtctctactatcaaaaatcggcatattttacaaatagatattaacaacgccttccttaatggagatctcaatgaagaggtctacatgtgtataccataaggactaactctcccctctactctaaatggagaaaataacttggtatgaaaattacacaagtcgatacacggactcaaacaatcttctaggcaatggtacaagaagttatccgaggctcttatacaagagggatataaacaatctcagacagactatacacttttcaccagaggtactgaggagaccttcatcgccctactcgtatacgtagatgatattttgattactggacctaatatcaacattctacatgatctacaaagctcattacaccagaaattcaagctcaaagcattgggaaaactgaagtattttctcagttttgaagtggctctttcacaagaaggactctttctttcccaaagaaaatataccatccaattgcttgaagactccggttatttgagcagtaaacctagtaaaacgccaatggaccccaaagtgaaactcgataatgaaaacggagaagccttggacaacccctctcattatcgacaacttgttgggaaacttttgtacttaacactgtctcggccagatattacttttgccatgaactctcttagccaattcatggcaaatcctcggacaacacatttacaggaagtgcatcatcttcttcgatatcttaagggctttcttggacaaggacttctttactcgaagaactccacactacacctccgcgggttctcggattctgattgggcctcttgtcccattacaagacgatctaccacaggctttttcatcttcttaggagattgtctcatttcatggtgtacaaagaaacaacctactatctccaagagttcagccgaggctgaatatcgggccctggctgccactactaatgaagtgacttggctacaatatctcctacaagattttcaaattgctcaaccacaccctgcttttattttctgtgataacaactcagccatccacattgccaacaacccaacctttcatgagagaactaaacatatagaactcgactgccacttcatcagagacaagatcaacaactcttctatacggctcattcccatctcaagcaaacttcaactagctgatgctttcaccaagcctcttactgcccctatactcagctctcatgtctccaagatgtccgtttttgacatatacgctccatcttgaggagggggtattaagaatatagaagggtgcactatatttatttactctgtatttttgcttagtttcccttctttctcttctaattttgcttcttgtttccgaagctttaggaacattgtcagagttagttagagtaggttagttagttaatgatgtttagtctttctttccttctgttttgtaaccgccctttgttgagtattaaaggctctctctcctttctttttgtaacatagtattatttataatacaaaataaactctttttctccttttctcaataaagagcaagacgatgctgctctttcccaaaccccaaccagatgccttaagagattcaagaaaaagggataagaaagctctctacctcatctatccgcgatgtctatgttgttttcaaacattaaatagctattgttattctcacggtagctgagatagttggttatgttttcatgcgacaaacacacaattttgggaaatatgacaaacgttgtctgtctaagattttgaacacatctggctccatcatgtattctgccccaaaaagaagtctgtctgatctcccaaagtaggcgacacaattactcgatttgtggaaaactttgaaatatttaccaagtttgtttattttcaacatggtacacgactgttcatcatcttctacaggcttcttagctatggcctggatattttacgccctcgagaccttcaagtatttgttcatgtagcagcattatatatgcacaaaatctggactctttttggccgttatcaattcgactttcaccgtaggattagtaatttcttatgctttaacatacagattagtttcattctccctcgtcggatcgctaatgttattctcttccttagttgcgcttcttaagtacttgctgcatttgcctttgataaccatgcacgaaacttggaaatacagtcaacatttttaagatatatacgtgtgtaatctctttctctcttcttattttctagtcaatactctacttgattcattgaatataatataaactgatatcaagtatttaatcactactgtaacaacatctctaatgctgacaatctttaaattggaacctttttaaaagtgatataagtttgttacaaaacttctacattacctttattttatctgtcttccatattattttttggtgcattttgttctaaattattacaatgctaagtaataattattaaaatattattatattattatttaatatatacatgttaaatctttttattttatgaaacaataataaaaaagaaagaaagaaagagttgatataaaagatgtcatt

SEQ ID NO: 386174 - DNA, 2181 bp, Cannabis indica
aagaaatataaaacttacgtgaaaatggacatgacgaaaatagacatcaatgatcgcctatgctctcgttgttaactgcggttatatctagtactattctactattgtcataattaatgaatgctgataccattattgaacttttagcagcaagatgaaagcaagtatttccatctttgtctttccaattaataatgtaattacattcttcaaaagaaagcattttctttaccaaaaatcttctctttatcgaaaatgtgtttttactctccacagcaacatgtagagccgtttgattgttcttgtctaataactcgaacatcttgtacctatatgatcctgatccttcttttaatgactctaatgcttcgacagatacattcttggccgcaatgtgaagaggagacatgccttcgttgtcttgaatgcaacaaattaaggagtgtttagacaaaaacttattcaccaaaccaaactcattcaagtgtgctgcataatgaagaggagtccatccatgctcatcttgcccttctaaaatatcattgccatatacttctaacaccttctcaatcattgaatcacctatatatgtacagttttttgtatttattagggaattaatttacactaataatataatttggggtgaatactactttagaaaagttacagattgaaccatctattttgttaaatgactaaatgaaacttatattttcttaaataaaacttaataataatttgatctataagtattatgataaaattggttatattctctgctctgtttgtgctggctaggaattgttttcacaagttggttatattaaaaaaatggtcaaaaattaagctcagaatcttatttgtaccatttttgaaaatacagaattcattttgtcatttaacaaaataaaaggttcaatcgataatttttacaaggtctaaaatagtatttaccttataatttataatcataatatgaagaacgtacgtacctttgatcttattacgtttctcaatagcggttagacccttgttgcgaataacagctgcatgcataacattcaaaccattccttccagaccaacttcccttctcttgagataatattcctttcacattgttgattttacttaaaatatgaaaagcaatttcataaaactctctatcgatagccaagaacaacggtgattctccatcttcattattgaaattaactaaactcgaatctttttcaagtaaaagcttaacaatatccaagtttcgattcttcacagcttcatgcaacaccgtatttctcctcttatttggcttttgtaatagatcacgaacaattttaatattcatgttatccaggatgagttttacaacctccaaattccctaacattacagcaacatgcaagggtgtgtcaccattatttttgttgttggtctcaattagagctcgtaatgatgatgatgatgaaaaacttatgagatctcgaatccagtctatgttgtcggacttcaccgcattgagaaaattcaaggtgttctcgtgattagaatattcgccatcttctatagaaatcgactccatattattgctttcttttatccaaaacttcagtgccaaaaaaaaatacaaaataattaattttctagaatccttttatatatacatatataactaattatttaaatttaaatttgatgtcattatcgtaacttacttgtacataagtgaatcatttgttataagttaattaattgaatcattagttatcatatgcaaaattaatgttctccgaactttgacatgtataaaatcatgtccactgaactttttattaaggttgttaaaaatctcccgtgaactattaagattgttagatttaaagtttttgttcaattttagtaagaaaaatctaacatagataaaaatttaggagacataatttggtacatgtcaaaatttaaggagcgtgatttggtagatatcaaagtatggggaatataatttagtacatggacaatcactgaataagtaaaattaaatgaaattagacaaaagtctttaaatctaacaatttcaatgtcagaaaagttcaagtgacataatttggtacattttcaaagtgaattattatttattttaaaattttaattagttaatgatctcaattttttttttttttgt

SEQ ID NO: 386175 - DNA, 884 bp, Cannabis indica
aaagatcaaattgtagtagtgatgggactggtgtgtcctttctactgtaatgcagaagagttaattaatcatgtactgctgcattgtaatttcagtaactcttgttggattcggtcaggttggggaagtgctccatctcagaatgtaagtttcttagcttggtttactgatttggttggtcagaaaaagccagaaataatttaggagggggttatgatgtgttggtctatttggaaggtccgaaatgatgtcgtatggaatcaaaaaaacgtgttctgcaaccaatgtagtgtgcactgcgaggttaattcttgctcaatggaaacatgcttaatcaagaaaattcgatcctcttcatgttcctgttggaacgtttgaagggtgtgagcgttagtcaaaatcagatacaaataagcttaagattaataccgacggtgccgtgtttgctgctgaaaatgcttatggttcagggattgtggtgagaaatgatggtggagggctggttgagacttttgcgacgtacgtatctgagggtgttcaacccgaacgggcccagataatggggagtaaggaagcactcagctggatcaagagaaagggcgttcaagatgtagtcattgagtcgaacagtcttgtttcgatttaagcgttggatagttccatccaaatgccttcattgtttggtttaatggttttcgagtgtcaatcacttttactttctcttgttaatgttaaagtttgtttcgttaagcgatctgctaatagagttgtacattgtgttgctcacaactcttatttttggtcagattgtaatttcgtagaagggttaggtcttgctgctcttcaaactcttattcttgccgatttggcagtttaatggattg

SEQ ID NO: 386176 - DNA, 1220 bp, Cannabis indica
aagtcacgggtagcactcttagagaaggatatcggattccctaggaatttgtccgactccgagaggggcctaaatcccagcaaattgttgatcatgactctgacctccgaacaagtattcttggaaaaaacagtagcagatttggaggcattaatcttctggcctgaccaatcagaatatttccttagacagtcttgaaccacattaatctcgtctgcattagcctcacaaaacagaaaggtatcatccgcgtacataagacgagagatgggtgtactacgaggactgactttgaacccatgaagttggccattagcctctgctcggaacaagagccgagaaaggacttcacttcccagaacaaacaggaacggggacaggggatcgccttgtcttaatcctcgggagggtctgaattgcttaaggggaccaccattgagcaaaaccgaaaaggaaactgaagaaatacatttcatgatgaggctcctgaaatgatccccgaatccgaaggccttaaggacaacatctatgaagttccattcaaggcggtcataggccttggacatgtcaagtttgagacccacaaaaccctttctaccttgctttttcttaaaagagtcaagaatttcatgagcaataataccattttccgcaatcgagcgacccggtaggaaggccgattgataaggagagatgattaatggcagcactgtgcggagacgattggccaggagcttcgctatcaccttataagcaaagttgcacaacgagataggccggtactcatcaaacttgcaggcaccttgtttcttcgggataagaactagagatggaaattggtcggttaatgtacggggaatgcaatccccgcccccatccccgttatctatttatacccccatccccgccccatccccgtctaataaccaacggattcggggtaggggaatacccatcggttatggagaacccatcgggtatccattaaggtaaaatgaaaaaacaaattaatttaaaataattgaaaaaaataagttaaactaatattctcacaaatatttattatgcattcataattcatagaagataaaaaataaacctacttaaaaaaagcataacctaatagaaaataaaaactaaatatgtgtcaaagtttgaaaaaaaaccaaaaaaattatatatatctatatcggggtcggatatggtgcggatagtattat

SEQ ID NO: 386177 - DNA, 822 bp, Cannabis indica
ttttttacattcagaatagtacccataaggttaaaacatctctctctagtttatctatctagaaattagagcttttaaacttagctatgtttcttataatcattcttgtgagaataaaaactcgaagtagatgtagctctattactttcgctacacatggagtgaactactataaattcttgtgtgtgctctctattttacttagttacttttaactttcatctcatttatacatacgagcgagttggctggttttttgcgttaatatttggtactttcattgagagccataactcaagaagtcacttacaagatggttgcaacacgatccataagtgtggaaaagaagcacaactactggccaacacactaggggcacgccagttattaagactggtgacgagataacatctacatctctgggactggtgacgagataacatctgcatctcagatgttgggtggaggcctcagaaccagatccactgcttgtcccccaaggcaacctactgccattggaactgagaccagtaataaaattccacctggggaaccacgagtagaactagaaaaccccaaggaggccaatcatctagttgagtagcttagccaaatggctagcttacaataacaactgcgagattctcttgacaaacaacgtgaacaatttcaaagcttgttcatggagcattggagaaacattgagaatctacgtgctaagcgagaacaacgaagagctaacctgtctcaaagaagggaaattttgaataataagtctattcaatggacttaacaaaacttcctgatcctagtatagtaggt

SEQ ID NO: 386178 - DNA, 1557 bp, Cannabis indica
ctctctctctctctctccaaccttgaagtcccctctttaaacatgctcttcaaaatgataagtgttggtatttatagaactgggatatggatcccaaagttgatggctgcaaatgctaaattgctaagttagttacgatataacaaacttaacaaactcctcgtaacataatctccacgtcagctcaagttaaacttcttttgtatgagacgtatgcttcttggaagaaagaccagcgtatgctgaaaggacttcctggatagggaaagcgacactagagtcgactatccataactcccttctaagagggaacaactagccttttggaactcctttccaagagggaatagctagccatatgaaactcttttctgtaggaagactagctttccttggagactccttccggttgaataagttagactttcgagaattcccttccgaatgagatctaactttgacgaacaacttctggagtggacaagctagacttttgaaactctttttcggacgacatctaactttccacgagacttctttcaaagattttttttcatctggaggaaatataccacaaaaaaaataataatattttgtaaaaacagtctttattaaaaaaattattaacaaagtaattttattgcagaaataaccataaattatactgtgcgaccacaaatgatcactataaacgtaaaacgaccatagatttacattgtgggactttcatggtcacacaaagtaaatcaagtgaggttattttgtatatttttgtatttcacatggttaatttggtaaatttcaaaggaaatgaaaatctttgatacaattagggtgcctttggtaacacatttttaatcacttttttttttaagtagaaaagtgaaaatattttctaaaaatatgttctataaaattgtttccattttttcaattttttaattgagaatcaaaattttaaaaattttggaaacaaaaaaaaaatcactttcaaaatttttttaaatattttttttaatcaatattttagactccaaccctaactttgaccttgacaatcaaactcgtacccaaacctcggagcccaaccccgaccccagccctggtccggacccaaacctggacccagaaccccatacctggaccccgaacccagatctgaaccccaaacctgaaccccaatcccagcccagaccccaaaactgaaccttgacctcagcccggactcgaaccttgagccaaacccaaaccctaagccaaacccaaacccgaacctagaccccaacctcgaccctggaccccggacccagaacccagaccccgaaccccagccccagacctagaactcggaccttgggccttgatcgagactcggaccccggccccagccctggacctggacccagcccccacctttgcccctgccccagaccctggcccttgccccagactgcagaccccggacacagacttggatcctgaccctagacctcggacccagaccccaggcccaaacccagaccccaggcccagaccctaccccagacccggacctgg

SEQ ID NO: 386179 - DNA, 2657 bp, Cannabis indica
cgcatgaaatcaaagtcggatgttatcttgctcatccattgctccaccataagtggatcagcaccatcctcaaacactgggggattctgcttcctgaaccgctcgtacaacaactctagatgatttcctatatgttatggcactatcaaaggtgccagaggatcaagattaggatttaaagtaggctgagcctgctactccctcaactctcaaatttaatcaccttgctactggatggtctcttgcatcgcggcctacatctcttcccaattttgtggtggtggaggattcacaccttcaccatcaaccacgagccctaaaacctcacgattacctctattagattgcctcgagtgcatattctaatacactcgtgaccataactttcatcattagaatcttcctaacaaaaactaaatgctaataagcattgccgaacatgcgcatacatatataacaatctttatgagaacttatcacacttttctaatagcttacaaatttaaaataagcaggtaatcagataattaacatgtaatctaacatttaacacttactaaaccatgagtgaaacgagtcttcacagccagtgcacatatcaaactggtctttaagatctttaaaccttggtcgctatgctaccatgttgtaacgccttgacccacaaggacgccacgttttacaaatttatttataattaatatattagtttacgaaaagtgttgtttaattaaaaactttactaattaaattaaaatatacctttcataaaaaaatgtccaaaaaaaaatggggatcccgtgcttataaatttttttacaactagtttgaaaaccgttattacaaaagtagagtctattttcagaacatagtcaaagggttgatcctatcccctggaaacctagccaccgcggttgatatgtacatcgctgcgagacctatgactcatggccaattgatagtttctttcctccttacctgcaccacgaaacatgcgtgagtcacaaagacttatcattatagtaattggatatttatcccaatacataatcacgtatttcacatacaattaattatcttataagacaatccgactttaaagcttcatcaagcatccttatcactcgttgtccacgagctacttatgtcactatcgttccccgttaaagcacccgataagtatgaaagctatctacggtttcaagggagtatttactcatttcattaagggtaatgaccgtatctttatccattattaataacagtaatgactgtatctttccctcaattataatcgagtcacaaacgataataatcattacctcgatcataatcaagtcaaaaaagataacctcagtccaatagtcaagtgtgcggcccaacctgagtggaactacactcgaaaatcccaagtcctatgtcacgaaaaaaaactcgataaataacttatccaaattctagaaaccaaccctagtcccttaaccagacatatctaacttcccaattgtttagtataattcaaacatcactaaaatatcctgatctaagctccaaaaaaataccctgagcaaaaaatggtttcgaaaccaaaactagggtttcttcctactggaaaaatctgttgattggtttcactatacctgtgaaattggttaatcaattttcgtgcagaaaatggaaagctctggttttgcatcaagaatttaacaaaaatgcatccaacccttctcaaacttcccataatagctcaataccataaatataatgtattcagagcaccaattcacaacaattcatcaatttgaacaaaataaaataaccaagtgaaataaagctcattaaactccatctaacccaaatttagtctaatagcccctatctttaactgattcaaggtgaaacaaacattaaatcaaacctaaaattaggttctaacctcagtttatacgttagcaccttgaaatcctacaaacctacccaaaaacttaaattacacaataaaaatccatagagaagaggaagaacacaccctacaacccgaacagcacctagggtagataggttcagcttgtaattcgtgagtttgatgaactaaatccctttgttgcatcagatttctagggcacgaaagaaagagagagagagaagatgagtttggttggtattttcttgagtttttgaagcttttctaaccttttactattttaattcttcttttatactcgataataataactaaaaatcagcccatattattagaaactcataaaggacaaaataaggtaaaatgaccattttacccctcccttaaaacataggctatggaataaccgagggcattttggtcatttatagctttccccaatttaatctatttccaaaattttaacctagtccaatataattttaatacaacacaacttaattgtcatgactcttctgaccactccgtcgagtttccacaaccgctgaacatgaaaaaatattttattttgaaagtgccacttaatcacatatttaataaaatatgtctaattaaatatcattatattttttgggatattacagaaccacacaaagattgttttcctactttagattaaacattacaattttgtggaaagaatgtttgtccaccaataacttgtgggtgtaaa

SEQ ID NO: 386180 - DNA, 1077 bp, Cannabis indica
gtatatacagtagtgagagatttatgcaattattcaatattggcaagcaaaaatgcatggtaggaaaaagccaaaggcatgaaaaaagcaactttaactcccagtcccagttcctacactaaaacaaatagaaaaagccccagaaatgaggttgtcatttacgtcccctatccccgacacatatggtatatataatactataatatattattattattattatttgtgtaatatatatacacgaaagtaattagcatatatgtaataactaatacaattaaatctttatgttttgcttgtaaaaagggtaacataaatataaatctcactcataatttattgaactatctgcaaatatatataaattacatccatgtggaatacgtggcatttgatgaccaataaattaatctatatatatcaaatcctcaattcaaatcttcttgtagctctttagacaacattttcaatcacatctatctttttatttgttagttttttcttcttaattattttatatttgtatataactgtgttgtgccctccatggaccacttatagagaaaggaaaattagaagaatagtgacaagctttctttagtacgattttttttaaacaaatgtattaattattgtatggttttctttttggtctgttttatatatatatgctttatcgacatatcaaataatagtcaggagactcagatcaggaccacccaagaatgagataataaaataattaattacctttttcttatcatatttatatataaaaattgataaatatgcatattcaaataataataatgctgtttatatgtgtctaattttttcattcatttttatttagctggttatctaatgataataaatctttcattactagctattatagaaataagtagttatgctaatttttcaaataaaaacactacaaggtggtatatacatatcaaaaaaattagtaacttttaagtttatcttctactgttagtgtaaatttaaatttagtcttaattaatttatgagaaatctaactatagaatcaaagataagcagaaacgtaccgtagtc

SEQ ID NO: 386181 - DNA, 879 bp, Cannabis indica
tatttttaccgggtattacattacataaagagataggtctcaaatctcccatatcacaagggtttttcttctttgggacaaggacaatatgtgtgcaatttagattagggggaagataaccattagaaaagaaactcacataccagagcaacaacatcctttttaacaatgctccaacatttttgtaaagaaaccgggagtcatgccatcgggaccaggtgatttttcgggatgcatctgaaatagtgcagccttgacttcttcttcagtaaccgaagcaaggaggtcgacgttctgttgagcagtcaacgagggacgaatattgtccaccacaccagccaaatggacattagaagaacaaaataattcctcaaaatagctttgaataacatgattcaaacctgaattccaatcgcaccagactccattaggcccctgaagtttggtaattgcattattttttcgtcttgtggttgctgaagcgtggaaatatctgctgttgttatcaccatctctaagccaaagttgtttcgatcgttggcgccaaaatacttccctttgagcatatatttcaaaaagctgtttttctgcttcattgtaagctgaaatatcatcagcatcatggcttcccttgaactgggcaattttctttttccaaaaaccaatcctttttttaaagcttcgagtgagatttttcccccaagtctcaagattctggccacacaaccttattttttccataatctctacagaattatcattgccccagctgtcttgaacaatttgaaagcacaaaggttctcttaaccaagagttctcaaatcggaattgtttaatagcagaaaaaacatcactcacaatgttaggttatttttagta

SEQ ID NO: 386182 - DNA, 1721 bp, Cannabis indica
ctcatcccattcaaccaagccaatcttcatcaatgaatcaacattcttccccacgagacctggatgagtagattcaatgtagggattcatctcatcaggtaaccacggctctaacagaatattaatgttagagccattgccaacaagtctccttacacctgcccgaactagctccttggcctcaaaaatacttctccatatataacttggattactacccaaagaattcgtaagaaaagaacctgaagagaagtatcttgctttgaaaatttgccccatcaaactatccccacatgtcaatagcctccaaccttgcttagctagaagagctaaattgaaatccctcaaatctcggaatcccatttcaccattgtttttgtgatccgtgagtttttgccatctcaaccaatgaattcctttatttttggttgacctccaccaaaatttgctaatggttcactcaatgtcttggcaaattccgattgggataagaaacacattcatcgtgtaggccgggagcgcttgaacaactgacttgataagaatttccttgcctgcacgagaaagaaatttattatcccacgattgaattcatttctgaactttttccttcaagtagccaaaaactacatttttatttcttccaaatgtacttgccagacccaaatatttactgtgttcagccacttcgtggatgcccaacctatcacagatggactgtcacatggtagtggaagtattcgtactgaagaaaacagacgacttaccaaaattcacttgttgtcccgtagctatagcaaacaaactcagcaactgaagaacacgattaacctctccatgtgctgccttacaatacaggaaactatcatctgcaaaaagcatatgggatacactaggagctccatttgccactttatatccatgtatcctttttctctcctcaaatcttcgaataatagtagataaagtttcaacacacacaagaaaaagatagggagatatagggtcaccttgtctaagacttctacttagcacaatttggcccaaggttcggccaatgctcacaatctgatactgcaccgaggataaacatccaaacataagacaaacccatttatcaatgaatcccattcgagtaagtatcgcacacaagaagtgccaatctactctatcataggctttacttaagtctaatttcaaagccataaacccaaccttacccacttgcttcctcttgagatagcgtaagatttcaaaggagaccataatattatctatgattaatctctcggggatgaaagcactttgatatttggagataatatcagataataaccccttcattctgttagcaagcaccttggtaatgactttagcaatgatattatagagagaaataggacgcaattcactcatttgatcaggtttcttcttttttggaattaacaaaatatttgtgttattcattccctcaggcattttctcagtttcaaagaaatgtttaactatattgatcacatcagtgccaacaatggatcaatatttttggaaaaactttgcattcataccttcaggactaggggatttatctggatgcatttgaaagatagcatctttaacttcttgatccataataggccgcagtaactcctcattatgatcatcatggacaataggatcaacacactccagcacctcgttcctgttggattttatgccct

SEQ ID NO: 386183 - DNA, 3371 bp, Cannabis indica
cggctaagtgaaatttttccaactaatattgattagcaaggacacgatcaatctttgagaagatgcgatcatctccaaactgcttattgctccaagtatagtagttcccactgaatttagcatcatccagctgagaattagccacacagtcaataaaatcagtggaacgaacatacctcacttgcttccaaatcctttcatcttttgccaagatgtcattaaaatcacctatgacaatccaagcctcgctcatcgccaattcttgtagatcaaaccatagtttcttccttctttcttcatcattaaaagcatagatgaatgtaacataaaagtgagctttgttatccaccgttgaaacttcaaggtaaataagttggctagaacactttagaatgttgacattatagcttgttggcttccaacttacgattattcgccctcccgaatgccaagcattattggaagtaaagcaccatccttgaaaaacatttgagtataaggttccaaacttggcaaccttaactctagtttcaagaagtccaaccaaaccaacactttgggctgctaggaactgtttcactagttgttgtttgtgctggttgttgacccctcgaacattccgaaaaactattttatccattgggaagaggaggcactccccctcctcctgtatcccaaatgtttactgtttcctgttggccatttctttgctgctggtgtgtctgcataagttttgtttcaaccaattcttcttcctgcagcgaggcatatgtgttggttactgttatggcagcaacctttgtttgatcttttggtttctctttccaagctttttttgctggtttgaacccgtcttcatctacggcctggcctgattcttgtacagcaactttattggctttttaattacccattcagccttttgcttcccctccttgttttgacaatccttggtctcatgacctatgcctttgcaatgcgcacaagtcgtgagtttccattcataagacacaaaaacagcaatgtcctcatcattctcatcttcaaaccatatttgctctggaaattcttgctgcaacgacatttcaatgagaattcgaggatatgtcaatttctcccttgccttagtaaagccatccaccgtaaccggttcacctacttgattgataatcttgaagagaacttgttctccccaatatttcaagtataagttcttcagttttacccaaattggtatagtgtggatgtttttttttcttgaaattaacattaggatcccaagctcgcataatcactaggcgtttgttgaagaagatgtatcctcctgataaaacttgatcacgatcatcaatgcttctaaatcgaaccaagaaaataccatgagaaatcatccccaccttctctatcttgtctttccatacccgcctcacaagaccatccaagatcgacattgggggattagccccaagtacatagcagacaattaaaggagtccaaaaatctacttcttcttggatgtcctcctttgtgatttggactctttttttggatggagaactagcaaatttagaatctaagttcttgattatattaccagatctgagtataggaggtacaacttccttacctcgtgaaactgcattcgcagacatggtctgggcttctcgaaattgcttggcttccatgaagtgtgcaaaatccatacgaatttcatctctcctgatgttgtcgctcgcatccaaagaaggtgaatcagcgacttccttcttcacatccatcagttcgactgtatcagcctcctcatcagagaaagctaagggctcaattccaaggacttgatccatggatttgatcttcttcacatccgcggtagagtcaaagccgcgcttcttcttcttcttcttcggagatttgggcttactctgctttgccctcgtctttgccatggcaccagctcaatgagctgagagaaagctagagagagaaaaccctactaaactactcttttgttaataattaacccgtaattattgtttctaactttttcacaaatatcaaaattatgtggccatatccatgacgcgagatgaatgcaaatttagtttattattatggttggaattgaattcatttgaagattaaaattccaaaaaataacgttaatgcaacaattaaaatttagcgattggagttataaatattatttggatgaaacttgttatccaagtttccagatgaggacacgtgtaatttccaaagccatttagagctcaattactgcaggcccaatagtaggcccaactcaaataatgtgccaaatcaattagcgaagtcagctcttccagatgacgagcagatgactcgtccatgtgaaataattctctagtagagcgagaatttagaagacatcatttggagcatccgaagaagtagtcagcaaatgtctagacatccagctctatatcgcatatattaattaccaaatcccataatatcaggacttaacttccaagatctcattcaaggatcatatcttcccaatatgaaaagatagtaattgaaaattatacatttaatgtgtctttattctccacaattttgacaactatcaacatgatgtggcatccacataagcatgcagtgagcacctcaagggccgggccccaccatatggctcaagtcaatatattatttgtatttaccctatcagtgggcaatgttgaacaaataagaaccctagcactataaatataagaacacacattcaagcaaaagattagaattccattcctcaattgctcagtcaagatctaggattcaaacacttgtgtaaatcataagaatttttcagctttatagtaataatattgactcgtggattgagtcttgttaatgccccaatcacgtaaaaactctagtgctatttctttattattcatctatttctttagcttatcatatataggtttctaaaaatctcggtaatattttggtactttcattgagagatgtagaaacaaatgatatcgtcaaaggttgtatactgcaaccatgatactcacctaaaacaaaactagttgtcacgatggcgacactcctatggatgacatagatcttgttgctcaggcgaagacaagagtcgatggagatctaatagaagtaacaaactatcctgctaaaacaactcaatgtaatgaaaaatacgttgatgaaaaccccataaataaggatcgagaggaagatctcaaagacgaagatcctgaagatgatgggaaagataaagataaagacgacggagataaatataattacgagatacatctcgtagatgttgaaattgtcaaaattgtcagacagatggtcagtccgaa

SEQ ID NO: 386184 - DNA, 1329 bp, Cannabis indica
tttacaaagaactacatacaactttagaggaatgttagacccaattacccccaacctattagtaataacgatgcaagtggtctgcattctaggcacgagggatctctgatccatctattctcttaagttgaaatgttccatttcccactttgttttgtatttcatagggtccttcccaattacgtcctaagacccccactcccgattctttcaaagctaggaagattcttctcaagatatgatctccaacatcaaatgtgcgactcctgactttaaatttaaagtgccttgcaatttggccctggtacatctcaagttggacttgtgattgttccatagctcttcaattaaatctaatgattcttggagcaaagagtgattctgggttgggtcataagtgtctcctctgtgagagggaactttggtctctactaggatgatcgcttcacacccataggtcatcgaatacggtgtgtgccttgttgaagttatctatatgttaatctgtatgcccaaaggactcgaggaagctcctccggccaatgggctttacaagcttgaattttcttcttcaatgttatcatcatgaacttattcaaaactttaaattgcccatttgcttatagtctagccacagtcgagaagctcttcacgattctgttttgattacaaaagtcagtgaagtgatcactatcaaattacttcccattttctgagacaatcttgtgtggaagtttgcagcggcatactatattcttgatgacaaagtctaaggccttcttagaggtgactgtgttcatgagttctgcttcaacccatttggtgaagtaatcaacaacgattatggcgtacatggctcctccttttctactgggaagggatcctactaaatcaatcccctaaacagttaagggtcgtggactgctcataagagtgatttccattggtggtgctcgtaaaaccttggcatatctctgacattgttcacacttctagacgtactctatacaatccttcttcattgtgggcctgaagtaaccctaatggataggggtgttcgtggtgcgggtggtgcggtttttaaccattttttcaaaccaacccgtacatgcggtttttccaattttccaaaccgcacccgcaccgcgatactaaaaaacagcaaaaactgcaccgcaaaaaatgatgtggtgcggtgcggtttatacagtttgaactatcacaatttttttttttgaaatcatcataaaataattaaactatcattaatataattattccaaaacacttaagaaaatacaacaaacttgagactaataaaagttataa

SEQ ID NO: 386185 - DNA, 1212 bp, Cannabis indica
tatctacgagtagacttatttggttaccaccactttttgtcaaagtgtaagaataaccatatttttcctatcttccaagctttgttggtcttttttgctcagtactcaaaggataaatagtcataattagcatgccaatatatacaattatatatcttggttatatgctcacatgtaaatttggtgaagagaattttttgagaagttgtttagacaactcatatttatgtgacacgtcaacaatcgtaattgttaattacaagtagattgtattttggagatatgagtaaacaagagttcctcattccatcattttgtcccacttctctgtgacatatatatcctttggtaaccacttgaacaaccagtaagtgaaccaacaaagtcacttcttattctttatgtcaatagaatgactaaaatattaacaccatttagtatttctcttatatatgtaaagattttatatataccattttggtggtcaaagacttatatatacttcacacacacatatataatgttgtgtaaagtaggcaaaaaatttaaaattacttcctacatacattgaagatgattagtagaagagagttaatctagattctcaattttgaccaatttcatggttaggattgtgaagatgatgaatgtgaatctcttccttcttaatctctcaatgaaagcattaaattgttgacgcgatttctcgttaacttaatctaagaagattattaattcaacaataaattcaagtaaaaaagagacgaaaataataaatgaacactgtatatttttacgtagttttgtagttaaatctacatactccatgagtcaatattatttctgagttttagttgtatttacaatttggcaaagtttctataaattagaattggcttccctttttctttttgagtgaacccctattcataggaatgtgatggtggctactcaatcttttgttagtgaaaagttacaattgatgggaagttaatgcccacatttcacgtgtaactgaatatttagataagtataaataattattttatatttaaatacaaagaagtggtctttgacttggtcaaatcatgatatttgtgagtaggtgcattgctgttgtgtaatacgaggcaacgcattgctgcttgtgtattatgaggatattcatcactaactgtgtattacaagatgatgttggaaatattttactag

SEQ ID NO: 386186 - DNA, 871 bp, Cannabis indica
atttcttgtagtgttagccctgagtactctgaatcttgaacctcaaacctagcctcaaaccttaggccccaaacctagtcctagaccctggacctcgaatcctgaaccccgaccctgatctagcctgggatctgatcccgatccctaaactcgggcctcgccccaatctctggaccaagacatagacactgaccctgacccaaacccgaaccttagactctaggtcccagatccaaactcagattcaacactggatctcggactagaactcaaacccggaccctaacttcagacccggtctcaaacctcgaaccccaccgtgagaaaataataatgagaaaaaaacatgtgagaagaagtataaaaaattattaataaacaaataattatttttgaaataaaaaaataacattttattatttcttataactttatttttttttaaattgttctctaaaaataatgtgaaatgctttttgtttaaaacaaaaataattgttttagttataatgtgaaacaacgacttacaaacaatattgatttaatagtgatatgtaatgggaaatttgattttttatgcttacatttggttaaatattttttttaaacaaataataactaatatttgtaggatatgacaacttttatgatatccctaaaatacccccatttacatcacccccgtttacaccatcggaccacccatcggaccacccatcgggccacccatcgagccacccatcaggccacccatcggaccacccatcgaacccatcggaccacccatcggaccaccatcggacccatcagaccagatctggtaccaatttttttttttgtttgtgtagaagtagcatcaggtgaccatcgg

SEQ ID NO: 386187 - DNA, 2388 bp, Cannabis indica
aaccaaatcgacgtagcgtttccattgttgatcttgcgacatactcctttggttaagaggcttctcgaatttagaattgctttccatagtatcgaatcggaacctcgtacatggagatccaagaaatcgtgatcctttatatatttatcattgagaactctactccacaggctactattttcagttagagctttccatgcccatttcataaggaaagccaggttgatggcttccgtagtgtgaaaccccagcccaccgcagaccttaggatgacataaaacctcccaggcagtggtgtgcatcgaatgtcttccatcaagatcgccccaccagaaatccctaagagccttatcaatcttttttgcaatggaaatgggtatgacatccgacgaaaccacgtagtttgaaatggcagaacccacggacctgatgaggcatgactttccaacgcttgatagtaatttggctttccaaccttggacccgatttagcaccctttccacaatgaattcagcgtctttggttcattttgatgatctaaagagcggtatacccaagtaagaagcattagtagacattctcttcattccaaggaattgagaaatagcatgagtcctagcccgagggacccctctagtgaacgttacggatgatttttgaaggttgatagattggctcgaccaactgcagtacttcttgaggcagtccatgaatgctttggcctccttcaaagtagcttggccaaacaaaattatgtcgtccgcaaacatgaggtggttgactggcatacagtgtcgtcccattttgaacccctttgggaggcctttactctccatctgcaagaagagtctcgataaagtttcagcggcaatgataaagagggagggagaaagagggtccccttgctcaagcccctagaaggattgaattttgccatcaccaaaccattaagaagcagttttatctcctttacagatatgcaagccttgacccaattaatgaacggtgaaaggaagctgagggaagataggactgagatgatgaagttccaatctagcttataataggctttttccatgtcaatctttatcatcatgaagcctctcgatccccgtttcttcttcatggagtgaactctccctcgcaatcatagtattttcagcgatactccggcctttgacaaaggctatctgattaggaaaaattattctgggcagtaagtgtctcattcggttagcaaggatcttggatattattttgtaagagacattacataaggctatcggtctaaagtcttttatgtacgcagggccctccttcttcgggatgaggacaaaggaagtgtcattgatgaaatggggcaactctccatggttaaagaagtacaacaccatttcgatcaggtccttgcttacagtgtcccaataatgagagtaaaaactgggggggaggccatccggaccgggagctttatcatgtcccatttcattcagcgccgtagagatctcttcaacagaggggattgcgctgagatcacagcaatcctgagctgagatacatggttcaagaatactagtagaggggggtatcattgtcgtagcatttttgccaaacagctccttgtagttctcaataaagacttcagcgatttccttttgatctcttgtccaggctccatcatcgctcttctttatacactgaatatagtttcttctacgtctgatagccgttgatgccatgaagaatttagagcacatgacccctttctgtaaccattgaactcttgatttttgtttccagtggatctcctctcttagaagagcttcgttgaggtcttgtttggccttatggatggacatgagatcattcgggttacgttcttctgcttcttacagggccgatgtagctgaattgacttgatattgtatagttttgaactgttttttattccaagaactgagcttacgacaagtatgctttatctttctatgaaagttaaccaaaggattaaggtggagtctttttgcccatgcctcttggaccatccagaaacaacgtttaacgcgagcccacatgtagtatgcttattcttcaatttagtttaaggtaaatgttcaatgtatttaaaatttctagatattgaattaattatttattttaattacactatctatataaagcaggcatgaactagttagtagtacacatttttaacataattatattttcttctcaataatagaaaaaaagtatttttttggatcacgccatcaacaacattagcaaggtatgtgttttttatttgtatatgtatataatattattttattattattatttttttttattttgttgtactaacttatttttctttggttttttcttttt

SEQ ID NO: 386188 - DNA, 2214 bp, Cannabis indica
gtagtaaatattcaaggccggccaacccatttatttcgtgcatcgtccataatgatagtggagatttccaagccacgggtgaaagcttgattgaaaagaggccgatacgaaaatctgaatgggaaccatgatatgagtgctattggggcaaagatgagcatacccatagcagcatcatacattttagcaaattcacgaaccgagcccacaacccgagactccagaaaaacccttttccaagtcacagcaagctgtgtttttggcacaaacacaaaaaaaaatatttgaatgatgcagctaaaacagtatacaagaaatgggttaaaaatgatcaaaataaatgacttacacaaataattgcccagccagtcggaataaatgcaaggatgctagcaaataagtctcgcatcgaaagatcagtaaatatgaccactagagctatcgccgcaatgagtcccaatgatgtgacgccttgtgtaaatcgaagcactaggtggaagtaagctgacttcttcggactgtaggtaaaaacctgcaacgtaaaaggagcatacataattgagttttcacaaaatatatgaaaagtaggctgagaaaagcgggaagaatagtaccttaaataccatgacaatgacaagtaacacgacccaggaaaatagatagatctacacaagataacaaaagcaagcaattgtcaagatcaatgagaatcaattggtggtgatagtggagtagtcaatgttctagactcaatactctaccctttattctatcttgaaaaatgtccatgataatctcctattttaactacattatacattgacgtcagcagcatgtatacatagcaataggaggaactactaagtacattacaggatagatatactagctactacacagataggggaaatgaagcataccgcaagtgatctttctttggcactgaggtggagcttgtatacaatgccatattgaaacatgaagaacctcaaactcaaaatggtttccaatacacgacctctcagtgtttgaatatgtgactgcaccaacaacataataaattattcatgaatgaatgagaaagcattgaatcattagcatataacatgaaataaataaaaaatgttcaataaacaaagtgtccattcaaatccttatcttgtagaaatttagaacaaataatcctagaaaatggcacaaagcaactattgaactcctgtggattcttcaatgaaatcattattaacaaaattatacctctattttctataatatgcttcatccccttcatttgtaatgcagcacaatataatattgttaattaatttaagatttgtaattgtttttcttttcctatttttgtggtgtttggtcacctctcaactggacatgtgtccaggtattggattgctttatttaagggttatttttttttttttgataactggttacaattcgaaccaccaaccaacaaagctggccacaggccaaaacaaccagaaactactcactattggagtgagtaccattttacttggaaaagtgttgagtaaactgcaagcaaaaatgacagagaaacgatattaccaaataaaaattctgagttgagtcgcagactaggttgtctctttaagacgtttgcggcactgcccaggagtgtgcaagcagtcggaatttgccggtcgtccccaggataaaacagcccagtcttactgtatcggaaccccattgcgctgtaaagcaccgtcgaatacatccaaagatttttgatatcgcggatggaatttaaattttatgaaaaatgtatttttttctatatgaaaaaaatatattcttcccatcagttcaatcgcattatatagacaaatagattaaaaaatcataacgggaagaagaaggttttctgaatcgtggggtgtagttggttgaacgtgtcacattaactgatacgattaagtaattaatttcaattaaatatgtttctcaattaaattaaaaaattaaaaataattattttattaaataatttttctataaaagtaatagagtgtcacaccacaccaaccaaccaacccaacacgactccgacggacggcgcgcgcccgtgtggtgggttaagtgtgtgagccctcatccattcacacaaaattgggtaccccttggggcccaaacccaaaagccaaagttgcactctatatacccttgtaaataagg

SEQ ID NO: 386189 - DNA, 656 bp, Cannabis indica
ttttttccttttgaaatagagcctctcttttatatctggtctacacttattcttaccaaattatgtataccgatgacgtagtgttgtgacacgagataatcctctaagacaagaaaaagaggactttttgtgtgtggaaaggagaccaccaatattgacttgactatccatttaatctatctatccatctaacaaattcgaagtcaaaaactaacacttatctgaaccaaaaactgttatattattttataatataataataaagtagattaaaatgtgataaatatatgtgaataatatatattaagtgtatggtaaataaatgtgtaacctatgattttataacctacacttttgtaacctacatgttgtaacttggagaggagttacaatttgttgtcacttgtaactcatgtgttgatcacacattattattagtgtaataaaagggttgttacacaatttgatgataggattcaaatggtatgaaatatagttgttacaaactatattaatactcatttatatgagagaaatgagtgttgtgtattttgaattctaagtgatcacctatacattataaaaggaggtctttggtgctcatttgtaagagatgaagttttctatcaagaaagcactttgctagaaaaccctaa

SEQ ID NO: 386190 - DNA, 1656 bp, Cannabis indica
tcaattttacttgcctgtgtactgaaaaggctgaagatttatcactttgtgcacacaaggcaaacgtattagcctgctttaatctgaatctaatactaataataagcgcaaccagcaatggacaatgattgttgtttaacaatccaagtgaagtgaatcaatattacattcattgaaacaatattatttataggaaaagaaatgaaacaaataaaaaagtatcttaagaaatttaacggtcagtattccttaagaaaacaagtagaaccatcaaaccttcaatgagcacaaaattgagcaattagagacaagaaatccttattacatactaaacttcaagagcaaactcttacatccatgacgaatttagtcaagatggccctgcattaaacaagagaaaaatggactatttcatagttagggggcatcaccaagcaaccaaacatcaactctgttttcaaatagattgatttgataaagacatatcaggagaaaggtaaagacacaggccagtgaagtaacaataaccaagagaaccatgataaaattagattggttagtacaaatagagtgcataaccaagtacacaacaacaactctgaatttaaatagattgatttgatcatagacatatcaggggaaaagttaagataggcccgtgaagtagtaataaaataaccaaaaagaaccatggaaaatttgaaataatattggagaaataaaagtacttatatgaaagccaatacattcaaaaagatctggctgccttattgtacgacttgttatgtgcaagaaacattgtaatctactctatgctctttcattgtcgttgtgacattaacttataattatgaagcacaaatgaaacaaaaagtatactactcttcatgattcaagtagggagagaggattggctgaagtatctgaaatcaaatagaattcctagagaaggtaaatttataggaataatactataattatcaagaatcccattactataattagcatggagctaatcttgatatcaaacaaatggtattatactataattatcaagaatccaatcacttgttaagcaagctgattggcagtctggccatcttaaagacatagttataatcctcaaaggagaaagcttgatctcttgtatgatgttatttactccaacatgaccggagacattcatgaatagatcgcattgttatttataaaactattggcactaagaacatcaatcaacttcaaataacaatagagtagttgtctcaaatttgatcaaaacaaaacaaaaccctaatcctaatcctaattgtaatcctggaaaataaagacaggaaacacgttaaggaggaatatacagacccatcatcgaaatctcttggggccaggcaaaacggcgtacttagataccaaggccagctttcttatcaatggttctcccttcataaacgccatctctttcactcttctccaaatccttcttcttcttcttttctgggctttgattttaaatttgcgaacggaaatttacatagtatactaacttttgccatttttttacaaaaatactgccagacggtattttttacttttttactgtgttttttttataagtttcatactgcagtatactgtgttaagtttcactggtgttct

SEQ ID NO: 386191 - DNA, 1355 bp, Cannabis indica
attaggaaagaggtgataggagaagagaagagaagagaagaggagggccataatgatggattgtcgggtagtgaaagaggtttaaggggccacatttttgactaaaataggaagattgggatgtgatcttgggtatcgtgtcttccctggggaacacgtgggacagctagcacgcacccgtggggacaccataatcataacccgacatcttgtctctctcacttcctcaccttttagtttttttttcttcactaatgctcaatctctaattataattttttttagtaaaatataacttattttattaaaaatttattttaataatatattaaagtgtaatgtaaatatattatataataaaagatatttaaatttaaatcacaatataatattatataaaatttatattaataaatattatatatatattttttctaattgaataatgattaaatttcattaaactaaaacattcaaaactaaagattcaaaaacaaaaggtaaggagttcctactaaaagtccggtcagcctcaaaaagagaagatcgcgccaagacatgcgcaaccttattagcagaccgcttagcaaaattaaaagaaacaaaatcaaaatcagcaaccaaaattatacaatcataaagaatatggccataaggagaagccatatgtttgaacttttgctaatcgacctttaaacaattcgactcaacaacaatctgtgaccatccattcactttactctaagaaagagcttccttgataccaatagcttcgacaatataagacttaataataaattttaaaaaataaattttaaaaaatatcactaaataataataaattgtcacctctaaaaaatattaccattactggtacttaattttaccctataatcaccattcccataattataatggtaatcacgatgaatggtgatcatgactattatgtatggtcgtggttggcgcgtgctttcacgcatatattgatttcatttcatacttcatagtcttttatgttttgtttttaggtgagtgggactttgagatagttgttttcctacactcgagaggcacaaaggaatagaagaaaagaatctttgatttcttagtttgtttttcctgatttggtaacgcattgggtgaagtttttatcttttgataggttctaagagttaagatccacctaaaaataaaataatcataataattaattataatgtgacgggtcaagttgataaattaacgagtaaccttctacttcattcattttacaattatgaggctccaccaccctaaaccccaacatacatcaaagaattttagtatctctatattacaaaacaaaaaaaaaa

SEQ ID NO: 386192 - DNA, 1452 bp, Cannabis indica
cactaatggctcaaaattgatgactcgatatggtattgtatgtcaaactgacttaattctattgcccatttcaggagtctccctgatgactccggtttttgtaacacttgacgaagagggttgttggttagtaccctaatggcctggacctgagagtatggtcttaacttttgggaagcaattagcaagcagtgggaaagcttttcaagcataggatacttggacttcgcgcccagcagtctcttgctcacgtaatatactggaagttgtaccttttcttcttctcacactagtgcggcacttagggcatgatcagacactgtgaggttcaaaaacaacagttctccttcaactggtttggactgtataggggccttcactaaatattcttttagttgctggaaggttgtctcacattttgctatccactcaaactagttattttctcgaaatacattgaagaatggtatgcacttatctgtagaattggagacgaatctactaagtgttgttattcttcctgtcaatttctgaacatctttgtgtttcctgggtgaaggaatatctacaaaggcttcgatttttttcaaatttgccttaatccctcgagagctaactataaaacctagaaatttccctgaagaaactctgaaggtacacttctttgggcttaatttcattttatactcccagataatggcaaaggccttttctagatcttggtaatggctttcagacgtctttgattttaccaacatgtcgtcgacgaaagcttccatgttcttccctaagacattcttgaacatcttgtgcactatttgctgataagtggctctggcattcttcaaaccgaatggtaggaccttgtagcaataaattcccttgtcagtttggaaacttgtatgctcttgatcagctatgtgcatttttatttggttattaccggagtaagcgtccatgaaggtcaacaacataaatccttaagtagcatcaaccatttgatcaatgtgcgaaagcgggaaacagtctttgggacatgctttattcagatctgtaaagtctatacacatcctccatgtctcgttaggctttgggaccaacactggattggcaagccatacgggatacagggcttccctcaggaagtccatgtttgtcaacttgtccacttctgtttttaccaccatcgatcttgctggatctaatggtctccatttttgccgaactggtccggcattggtgtaataccggaattaagaaaaaggattagcaaagccctaaatagataattatgagtaattcatggaagtatattattatatagttcactatatgtgaaattatatgaattttaatatgttaagaccccgttggtgagccaggggaattttagtaattttgacccgagaagggtaaaacgatgaaattaatttaattacgtgcttaatagaa

SEQ ID NO: 386193 - DNA, 2049 bp, Cannabis indica
gagagagacaaaatagtttatagtagttcactccctcgtatcgcgataataatagagctacatcagcttcgagtttttattctaactagatggaataactaaaaaatatttaagtcaccatgctacaattttacatagagaagaactagagagggatgctgtgaccttatgggaactttttagaacaataaaaatgagttagtagaactctccttttagtagggaaggtggtcctattaaaataatgataaaatattacaaaaaaatactatggagaaatacatttaggcttttttggtggtagatgatgatctaacgatgaagttgactccggaggtccgtcgataatttttagagcttgtgttgcatttgtgagacacatttcgagaaagttgtagcttaaatatgtaactctcttatgggttaaatttagagtcgataattatggaattttgattgatgtgtaaataatgagttggtagataattggaatagcttcaaaatacacgttgaatttcatcaattaggtcaatattgtgtgagttatgaccgttttactaaacacataaatgctcctacactgaggttgatatcctgtgcccaggttgacatgtgaagtcaacttggacggtgggctaaagaaaaatagcatttgggatgtaccttttgaagcctatgtgatattttgacatcacttagttaggttttgtgttctggtgaaataggttagcagttctcagagatgtgttttgcggaaacgagagacttgaaactacctagttttcaggtaagtcatttttcgaaaaagtgaaaatatgaagtggtgaatttgactcttcttactttatagccctcagtcactattaaaaattagacaaacgatcgacattgaataatcgaataagcagaacctagcgcacaaaccatatgtcaacctgctgggtgttaggtgctctctttggagcttttgagttatcgttttgatatttccaaggctcttgaaatcagagacaaggtctcctaccatgtttttgaccattttggagagaatgcttagagcagaattcacatttggatgatcgaaacaagctcaccaggtagattttcaacctgggcattaggcttagttttgatgcacatatagttgtcattttcttgcagaaattacttgtaacttagatattttttatgaaaaaaattgttgagaaaactattatagaaaattaactggaaacatcccaggttgacaatatgttaacctagcactgggttcaggtttaggcccatagacagttacatttcaaacacatagacagtgtcaggtttcaacctacgcgttgggttcagtttgaaaacggagaatatgcttggaagactttacaaagaaactccacgaaattggcacaagttgagaaaatgtcagcttaggcgttgacctagcgacaggtgtcaacttaggtgttggtcccttgttttagcctttaggctaatctatttcttcccaaaaaacacttgtttctttgtttttgatgaagaggaagaagactctagagtcagatttctagtttgatgcttggaagtggcctagatttacaatatttcaacctgggtgatgggtgcctagggcacttggtgctcaaaaataaatgttcttcaaatttgattatgatgattgaaatatgttcatgacatgtccagttcatatcccagtacaaagtttgacccgttttaattaagatggtagaaaaagctgaaacccttgttaggttatgatcaacctgggcactgggtgaaaccctaggtacccatgtgtattttcgtggtgttgttttgtgtatttttagctcctgacccataaacttggatgctccatgcctttgtggtacaaaatactgaaagatggtggattagaaataacttggtggaatctaaatacccattctagagttctcaaagttaacctggtcatacactactacaaaaaatacttttggtgtcagttccagaatcatttaatttaaaaaactgacaccatagagtagctcaatt

SEQ ID NO: 386194 - DNA, 3027 bp, Cannabis indica
tgtaacatacctgttctgattgtaactttggatcttgatatgaatgaaatgaatacctaagggggtagcaggaagtaggcatttttgttggccgaacctggataaaattctgttcttaattctttgctttaagtttcatgttttatgttgtttgctgatcctaacctgtgatatttatgtcgaattgaagtgttgttgatttacaacagtggtatcagagctttggttttgtaggaaggagaagaagatctcaaagatttaacatctgaagaatatcaagaattcaagaactcaaggagctggttgcaatggcttcatcatcaacaagatttgacctggagagattcgatgggactggagatttcagtttgtggaaggagaagatgatggccatattaatctaccagaaactagattcagctcttgaagatcgaactgagaaaaatgataaatcagagaaaccagaaaagggagcagatggatccaagaaagaagattctgaaattgtgatgaagcaagcaagatcagcacttatcatgaacttagttgataatgttttaaggcaagtcattggggagaagacagctcttggaatctggactaagctaaatcatctctacatggccaagtcgactgcaactaaaatcttcttaaaagggaagttctatggttttaaaatgaatcctgttaattctttagaacaaaatcttgatgaattgaataaaattgttttgtctcttactaatatgggtgaaacaattaaggaggaggatcaagctgtgattttgttaaatggccttcctgatcaatttaaagagatgaggagtgtgataatgtatagtcgtgacactctaaccttggaagatgtcatgagcactctcaagtccaaagatgctaaactgaattggcaaaaggctgctagacaagaatcaagacaggatgagagtctatttaccagaggaagaaatccaagaagacataactcaaagttcagaggccactcaagatcaaaatcaaggcctaaggagaccagaaaatgtcatcactgtggcaaagttggtcatctgatcaaaaactgctgggagatcaagaacaagaaaaagaaacacagggatgaagaagagaagtcaaatgactcaaaatgcagtagtggatgatgcatatagctcagatagtgacctctttgctgtaataaatgattgttgtactagtcagaaagttggagatgcctgcaacaatctgcaacaaaagaactatgatgaatggatcttggacagtgggtgtacataccaatgagtcctaacaaagattggtttattgactatgaggaaataaatggaggaagtgtagtcatgggaaatgatcataagtgccaagtaactggaattggatccattgctattagaagttttgatggcactgtgaagactcttaccaaagtcagacaaataccagatttgaagagaaatctaatatcccttggaactctgatgatgagggatgtgaatataaaacaagcaatggagtcatgagaattacaagaagatctatgttgatattaaagggcaccaaaaggcatggattgtactttctaaatggccaaacaatcatgcctgcctatgctgcaactgtaaacaaacatgtgtcagaaatgcagctttggcatgctcgaatgggacacatttgtgaacaaggactggtggaattatcaaagcaagggttgataaataactacacacatgcaaacttaccattttgtgaaatttgtgtgcagggaaagcaacacagaatcaagttttcgaatagcaactacagagccaaaagtgtgcttgaatacatacactcagacctttggggagcaagtagggtcaaaacaacaggaggttatcaatacctcatgtccattgttgatgattatagcagaaaggtttggatttttctcttgaaacacaaaaatgattgcttggaagcctttaaaaattggaaaacacttgtagaaactcaaatgaattcaaagattaaagtactaagaactgataacggtcttgaatttattaatgatgaattttatgagctttgtttgaagtatggaatagaaaggcacagaactgtggtaaagactcctcaacaaaacggcattgctgaaaggatgaataggaccttgctaaacaaggtcagatgtctgttactagaggctggtatgggcaagaaatactggggagaagcattacacactgcttgttatctcattaacagaagtccaagcagaaaacttgatgccaagactcctgaagaactatggaaagataaacccccttctctaactcaattaaggattttcagttgtgcagcatatgcacataaagttgaagataaattaggaaagagatttgtcaaatgtgttttcctaggatatccaaatggcataaaagggtatagactattgtaaactgaagataacaaagttattataattagggatgttattttcaatgaactcgattttccttctaaaagaaatgagaaaggtggttgttctgatgttgcaggaaatgaaactaaatcaaaaaccagtgtgcaaatcaaggtggaacctgtgcaaactcaaacagaaactgagatgaattctgaagcagaaagtgaatctcaagatgaaaacttggaagactaccaacttgcaagggacggaaccagaagagaaataaaacctccagttagatttgtagaagctgacatttttgcatatgcattggctgttgttactgaatcaagagaacctattccaaagacctataaagaagctgtatcagggaaagatgctaagaaatggaacaaagcaatgtctgaagagatggtgtccctaaggagaaacaaaacttggataataatcataagacctgaaaggcagaaggtaatattttgcaaatgggtttacagacagaaacctggcattccagggaaagaagaaataatattatacaaggctagacttgtagccaaagggttcacacaagttgaaggagtaga

SEQ ID NO: 386195 - DNA, 840 bp, Cannabis indica
agagagagagagagttctctctttgtttcagaatggtgaaaaatgagagatgaatgtaataaatagggtttgttaaatttaaaggatttagcttcggttattattagacgctaacattgttagcgtcagttgataaccaacgctaataatataagcatagcgtcagttgataaccaacgctaataatattagcatctaataataaccgacacataaaataaagagaaaattacgtaggaatacgtgaatatcaaaatattcacataaatattactacctatttaattgtttaaaatatcgttatatacttctattactttataaacgtatactaagacggagataaaagcacctatttaagtggtactgtatctaactttttattttttaacttttgcgtcaatgttgtttgtttatttaatttttttctctttattttattattgaattttcttctctattcattctcttttttataacttaaaaaaaattctgaccacaccagtaattaattttacttaaacacgtgcacaactctgataagcttttaatattaacttttttatatataagttgcttgctctttccattcttttaataatggttggtgttgttatttttaatatgttttattattattattattattattattattattattatttgggaaaatggtatcattagttttaatattttattatttttactatctatattatgtctttcttattcataatttttaaagtctttttcaatcatacgggtaattatttgagaaaataatgtaataagttttaataggtttataaaataatttgtcaataaattgaatagtat

SEQ ID NO: 386196 - DNA, 1842 bp, Cannabis indica
ttaccattaattctcattacttactaagtaatttaaacagttttacactagaatacaacaaaggaaaaacaacaaactataagaaaagacaatgtcatgcgctagtaaattcacataaacttcttcagaaacaacttcactctataatcagcatatactctgttttacaaattattcaaaaactcataagaagcattagtcgaaggactgaaaatttgagagctttttagcacatttcctcgaaatggaaatggaagatatttaaaaagaaaaaaaaaagaatatccttctaggtgcaaaaaacaaaatgataattctttatatctgaaatgatgactcctaagaaccattaaattagttgaaatttgctacatagaaaatccaaaaattacttctttcccctactaagtctttgcatatggtaattaatgcttccccatagctttctgttgttgttctgcaagaaatataaaactctcaagatttaaagctggtcctaaaatgaaagtttgctatattgcaaataaatttaagcataaaaaattcacacacatggagaatccaaatacaagaaaccaacctgagcatccatataagtatttagaagttccttatttcggacacacttctcatcactgttgtggttaactgccaagcagttgagaaaggtcatcatctccttcatgcaaggtttgtgtagagagccaaatttcttgggattaattcgaagagtaccaacttttcgacccattgtgatcttctaaactacatgtccaagcaggcattgttaaattcaacatcaaagagatactcttttagaataacgacaatatttggtaattgctccaaaatcatcttaaaatacaagatttccaatcagacataaaaggtaagaaacttgaccattggtccatttcatgataaatggttgccaaagtacaacttaatttagagttcgttcactggatcacatctaatatttttagactcatccaggtccaattcaattatacattggatgttggatttctccaaccgatccaatccaatattgcaggctcaaccgaaccgatccaataaaacaatagattggatcggttccatccaatgaatgaatccctgtattggatcggatccatccaatacttttgatccaatattttttagaccggattggatccatccaatattcttaatccaatattaattggattgattggatccatccaatccaatccaagagtaaaacctaatttttcacctaaacggctaatatattagttcaaaatattacaacccaatataaatccaacctaattgtaacataagtccaacataaatccaacctaaattgtaacataagtccaacataaatccatcctaaattgtaacataagtctaacatcaagttataatacgtgttacataaacaagagtatacaaattatgaatatcatagaatccttcatcagtccaaactcgaaagtgacaatgtcactcaattctgaacaatattacaacccaatataaatccaacctaattgtaacacaagtccaacataaattcaacctaaattgtaaaattagtccaacataaatccatcctaattgtaacataagtctaacatcaagttataataatacatgttacataaacaagagtatacaaattatgaatatcatagaacccttcatgagtccaaactcgaaagtgacaatgtcactcaattcttaacaaatacttttttaaagtttgttaatactactctcactttattattattttttttttcttaaaagaaaaaaaatagatactaaagattaccaccaagatgaacgatt

SEQ ID NO: 386197 - DNA, 1369 bp, Cannabis indica
tttatttttccaactgactttatagtgcttgacatggagaaagatagtaatgttcccattatccttgggagaacctttttggtgtcaggccaagttttaattgatatgcaaaaaggtgagttaaagctaagagtacaaggagatgaaattgtgttcaatgtactcaaggctataacttatcctgaagcaagtgacaactatttttcggttgatgtggtggacaagttggtggaaactaggaagcctattgaagaccctctcaatttgactttagtgcgacactatgtggttgaccaagatggaaaggaggcgatataatatgctttgtggcttgattcttatgggccattgaacagaaagtaatttgaagagctcagagtgattccaacaaagtcagtgccatattgagaagccacctgaattggagttaaaagtccttcctaataactgatatgagtttttaggtgagaacaagatactctcggttattgtgtcagcttccctttctaatgtggagatagaaaagttgctgagggtattgaggaagcacatgagagccattgggtggacattggccgacatacaagggatcaacccctcaactataatgcatcgaatattaatggagaaaggagtcaaaccaaccagtgatgcacaaagaagactaaatatgcccatgaaagaagtagtgagaaaggaggtggtcaaatggttagatgttggagtggcttatccaatttcaaatagcaagtgggtgagtccagtccaagtggtaccaaagaaaggagaaatgacggtagtcaagaatgagaggaatgaattaattccataagaactgttactgggtggagaatttgcattgattatcggaaattcaacaaggcaacaaggaaggatcacttccccttaccattcattgatcaaatgttggataaattggtgggttaagagtattactctttcctagatggctattttgtgtattaccaaatagctattattgcaccttaggattaagagaagacaacgtttacttgcccatatcgcactttttcttttcgaagaatgccatttgagttgtgtaacgctcctgcaacattccaacgatgtatgatggctatcttctccgatttgattaagaattgcataaaggtctttatggatgatttctcagtgtttgggtctttgtttgacaactgtttgagtaactttgaactggttttgattaaatgtgaagaatctaatttggtgctcaattgggaaaagtgtcatctcatggtgaaggtgttgggttttatgccctaaataaaactcatttcatataatcagatttacttattaataaagatcagaaataacattttatgtt

SEQ ID NO: 386198 - DNA, 1165 bp, Cannabis indica
aatgagccttagtctacgagtcagtgttattatgagatagtctaagaaagccttagtctatagctggcttccagatacacactggagggttcgtccagctacacggagctagaatccttctggatacggactagccttggcagaagcttgcctgagcgaggagtgtaattgctttcctgaaagaataggttggtatatggctcgacctataatacatgttatttgggtccactgatggaccttgactcttatttattatccacatgtttcttgtcaaagacacgaataacatctttttatatattttaaaaaagaacaaattttgttttaaaattgaataatattactttgtttataatatacatatcaaaatgttacattttagattatatcactgactaagtacaaaaatatatataaaagattaaagaagttgagcaacaacatgccaagcatagtttggttctctagttaactatagacaaataaataaaacataaaaacatcaacaaataaagaaatgttggaattaccattaaatattaataattattctatgaaagtatggcttagaagacatttttagagatacaacatggctctctaataattattccattaagtaattgtatttagtgcctcactatcaacaacattattttaagaatctggtggatataagtatggctttggaggcatttctagagattcaacatggctttctaacatctctatgactttacctatcgaagggcgatcacaaggcttcatttgtatacaccataatgctaccaaatcatcttttttatttttttctcatctaattcctcatttgtgatgtcgtttaattcaatgctctttacttcttcgacatggtcatacacccataaaggaaagtaaattttgctagaatgatctgtttgtgtgttcaaatttctccttcgattagccatttccatcaacaacattccaaaactatacacatcagctttgtgggagattgctccaatatttttgtaaaatagttctggagctatgtatccaatagttcctctgagtgtagttaagactacattattatttaatggacacaatcttgctaggccaaagtctgaaatcttgggagtaaaattttcatccaaaagaatattgtgaggcttaatat

SEQ ID NO: 386199 - DNA, 674 bp, Cannabis indica
aactattaaagtaaataacagcaataacagaaaaatattgctttggttactttctggcaacgaattagcttattattataattgttttttaaaatggttactcttttgttagccaattttaaaaagttaaaaaaatagtttttttttaattataaaaagtaaccaaaatgttactttctcatatggggattctataccaatctatgagaaactaagtcgaacgagaaacccataaatacaagaaccaaataaaagtgggctattaagcttaaaaataaaagtgggctttaacaatttcaatatggaagacaaaacaatttgagatcccctaaatatttccaaccattgagccttaggtaaaatggctcttatggatctctaagatgtaagaagggatacagatgagttattaaccaacagaaaaagaaaattgtgagaaaattgaaatggtgaatttgggctctaggctttgtaacacaaggtccaagctggttcggaactattaaagcccaagggctatctttggttccctaaaaaattagggaaatttagatagtatactaagttttgccatttttttataaaaatactgtcagacggtattttttactttttactgtgtttttttataagtttcatactgcagtatactgtgttaagttttgactggtgtt

SEQ ID NO: 386200 - DNA, 3163 bp, Cannabis indica
aattagttaaaaactaggcaatgattgagttttgtgggaagcaagtgagtcagcaatttaaggagctagtaaatcctcctatgatatagattggcacctagttttactaatctaactcaatcactgacagaaaagactacgccgcaccccaaacccaaacccacatttcattatttaaattccataatttagaaaggttcgaattcgaaaattttgaatttttgaaaaaagagcggccagtgggcctttttggttttgaatatcagctcctcttcaacgtcttgtacaaaacaaaatttaatatatattattttctaaaaccaaaaatatatgtatttttttatttgaatttacttttagtcttctctctcttttctttatcttaaaacatttctaattttcaataaaaagaaaaacatttcatacattttgtccagaaaaaaaaaaaaataattaggatacatgtatatatatagtgttaaagctttaacgggtgtcttcgattttgagttaaataatctaagagagctatagatccaacttcgagttcattcaaacttgcatctgtgagttctcactctctctctctctcttaaaggttttgaactgttgcaactacttaattatctatttacagtttgatttctgtgttttcaacagcttcatgtggattgtctaagatccaaagaaaagtttatatatgtatatattttcgttttcaaataatttttgttgttatttgaatctacttttcgtcctctcttactgtattcttaaagctttgtatatatatatatttatacacacagtgttaaagctttaacgagtatctccgattttgactaaattaataatctctatagatccaacttcgagttcattcaaatttgcatctgtgagctatctatctctctcacacacctttgctctagaagttttgaactgttgcaactactaattcatttgcatttgcattttaatcttgtttttatcacttatctgggttttctacagcttcaatgtattttgtttcatctgggtattctaagataaaaagtaaaaatttaacgttagttgatgcaagaactagcttgacttttatttttaatctttgaagttttgcttttctgggtactacatatcattttccggttgatgttcttaatgacgtttaaaggctttggtatcggtttgattattgcccttccattttttcattttagaaactctactttttttttccttgtgatttttctgatttatgggtgctttctggtatcttgttattcacagttaacctgtttgagttttgttatcatagaaagtagtcattttagtgattttatatttttcgtttgcttgtccgagtagtttttgttgataattttaaagatcattgtaatgttagctaactatttgattaatgtcataacagaatggagtcgctccctgatgcaatggtacacactgtattatcatacatgaataatgcccgagatgtggcaatttgtaactgtgtatctaagcgttggaaagatgttatgccttatattagtaggctctacttccctcgcaattgttttgataatctttcgggcagtgacagccctgatgaaattgttttgaggatggtttcctcgatcgaaaggttagaagagcttgttgtttatagtccattctcaggtgctggcctctcctcgtggctatctgtaatgggttcctctcttaggcagcttgagcttcggatggacaatctaactgaacagcagggttgtcttgaaagcccctctaagttggattgtataagctttgcaaagaatttggaatctcttaaactttggggtgtcttaataacccaacctcccaagtgggaagtttttcaaaaacttaaaaaccttgaaattgttggtgcaagattggacgacctagcattgtcagcgctgctaacaatgtgtccttatttgaccaatttgctgctgcttggttgtgaaggagttagatctgtatcaattgatttacaatatttggagctgtgcaagcttgatttttatggcttgggtaactgctcattttcaatgaactctccaaaaattgaagttcttgaggtgcaaggttgtagttggatccgggttcgcgggacagagtacttgaagaacctctcaattgccaacaatgcaggtagtttagcaatgtgtgagtttttcataatatgatcctactgaactagtggtttctaattttcttttgtattggttttcaacagggagagtctacatggttgattttggaaagcttgtggctctggaattcttatccattagaggagtccaatggtgttgggatgcaatatgcaacatgcttcaatgggcaagcgaggtgaagcacttgtttatgaaagtcgaattcacgggagattttgaggtacttcaaccctttccagagattgattttgttgagttcttcaacaaccatccaaagcttcaaaagtttgatattcatggagccatgttcgcagctctttgtcaaaaaaacagcttgaaaagggttagtagatgtaatcaaaactgcttttagtttggcttccaactttgtttttcaatgatttgatacctaatactaacagaattgttttctcatccattattacagattaataggggctttgtaattccatgtttggaggaagtggccatcacaattcgatcgccattgaatgctgagcagaaaatgagcacactagagtcgtttctaaagtttgggaaatatctaaaggcaatgacaataaagattcttcagatgaagagcaatcacagcagtgcagatgatttttttgatgagatatgcaggtttagatacatgaaccggaagattgttcgaattgaataacggctcattaaatctaattccatgttcaatttatcattcaatttcaagttttttttttctctaatttatcaaatctctaatcaactgaactaatagtttggttcaatttgaattcataattgtttttcttttcttttttaatctcttgagattggtgatatagctctgattgaagaagattgatcactttcaataagacattgagcccataatctcttgactaaggcattcctaagaactagaagaaattcacatatataataaagggctatttaca

SEQ ID NO: 386201 - DNA, 1355 bp, Cannabis indica
ttgttttagtttattttgataaatttagatcggagtcgtttagcttgctgatatggctctcaattttctggatctgctgtatttttcacattctgcttgtctaaatcgatgcgatttaaagttcgtgagtttttttgttctagatctaactttggattacaagtaaactgggatttcattcgaattttcccccctttttttctagttttggattacagaagctacgcagtttaatatgcacggacattactataattaatcataagatagtgactggagttgagactctttggaacagaagtaaaaacatggatctttattataaaattatcgttcttttcttgtctgttgatgagttagagaatcacttttttgctgcacaactctaggaaagactcagatgagttggactgctgctgttttacaacagtttaactgataatattttttatttagatttatataaaatatggccgacgcagaggacattcagcccctcgtttgtgacaatggtactggaatggtgaaggttagtatctatctcccctgcttctgcgaaattaaaccacaaatgtttgttttattaatttatatatttgtttttctgtttatcaaatattttgcttggaaacattgttctgatgtgttatctataaatttgcaggctgggtttgctggcgatgatgcgcccagggcagtctttcctagtattgttggtcgtcctagacacactggtgttatggttggaatgggacagaaggacgcatacgtaggtgatgaagcccagtctaaaagaggtatccttactttgaaatatcccatcgagcatggtattgttagcaactgggatgatatggagaaaatttggcatcatactttctacaatgaacttcgtgttgccccagaagagcacccagtgcttctcactgaggctcctttgaatcctaaggctaacagagaaaagatgacccagatcatgtttgagacattcaacgttccagctatgtatgtggccatccaggcagttttgtccctttacgctagtggacgtacaactggttcgtattttattcaattacagtaagatttggaatttcatttagtaattgtattagaataaactgagttggctttctttaccaggtatcgttctggattctggtgatggtgtgagtcacactgtgccaatctacgaaggttatgcccttccccatgccattcttcgtcttgaccttgctgggcgtgatctcactgattctttgatgaagattctcactgagagaggctacatgttcaccaccactgccgaacgggaaattgtccgtgacatgaaggagaagcttgcttatgttgcc

SEQ ID NO: 386202 - DNA, 905 bp, Cannabis indica
cttatctcttctttctcggaaaaacttgtatctcttcttttcctgtgaaaattttaatttgggagaagttgttataaagagacagttaagttagcgtgtatagggatcgtggattcaaaaaagtcataccgggaatgctgacgcggattatgatattggaaataacgaaattacccctgcaaatgtgccataagtggggcattttagacatttcagattttctaagcggtaagaagcttcagagagttttctaatttttttttttcgtttgttttttaaggagtggatttctaatttctaattgggatacaaaataagaagcagcgtctgacgacttctacttctaccggtaacgtgttttattgggtatactttgaatatgatttttttttttaataaaatgctaaatgatttaagagcattgctattaggcaccagtggtatctagtacctttgcgacatgtcgcgttgcgattggctagcgatactccctaaaaactattatattaaattatatgggacccgatacttagttgtaccaataacgatattgacacataaaaaggtgctaaacaccaataacaatattggctagcgatacacccgcatttctcatgatttaattataggttgaagttaattaatattcatcaatattatgacttcctaagttcctatcaaatttgaaaatgtctctatctcttctctaagcatatcattttaacaccaaatgtctttctgtttattttctttttaaaaagaaaaagagactttaattttattttttacggaaaaagggaaaagagggaaaaatactcaaaattggcagattaggattagatataattctatatattaattaatggtagtttttgtggcatcagaatggtggttcgagatatttt

SEQ ID NO: 386203 - DNA, 3248 bp, Cannabis indica
taaaaaaaaaattatataaaaaactttttggttttaatggggatccgcatcaacaaaatttgtaacattaaatttttaaacaaatatataatttatttatattgattatcaaattttaattaaacatgatttttaataatttgaaattgggcttattattataagattgtttatcaaagcacatacgtagtgttcctagaaattagggctttataagtgcactcttaaacagtataaaattatatctatataactttttcttgtagttcattgatatgatcaatacaagtagttcatcctctatttgttagtttataattagagttggttaaaattaccgttataccattttaattttctcttgattccttaagtatcattaagtcataatgatcagttaatgttaatccaattaacactttaaggaaactaatattcgatcattttggaaagcttggattctgttaaacctccgatccattgagctgtaacaccatgaaacatgaagaacaaagttgcagaaaaagagagatgaaggaagaagaaagagcagagaaaagatcagtgaaagaatggagaaagaaagagttatctcattgatctaatcaatgtacaaccttatatacaagagtcataacagaactctaaccaaaaccaaataacagaaagccaaactgaaataacagaaaaataacaaaccaacaaattaacaaactaacagctaatcaacagaactaactgctaacagtttgattggtcttaacacctcccctcaaactctgaattggatggtctccaattctgagtttgtctttaaacatggaaaatctttggctagaaatggctttagttaatccatctgctatttgatcaaaggttgctacatgtttgatttgcaccacttgttcatgaccttttctcgcacaaagtataggtccaattctatgtgcttagttctagcatgcagaactggattttgagtgagcattatagtgcttaggttgtcacaccagattgtagggggctggtgtatgcgaatgtgaagttcagtaaacaagtagtgtaaccaagtgagttcagcagtcacattagctacactcctatactcagcttctgtacttgagcgagatatggtctgttgtttcttgctcttccaagcaatcaggtttgaaccaaggaaaatggcataacctgaggtagacttcctgtcatcggggtctgaagcccagtcggcatcgcagtaagcaacaaggtcttgactttctggttttgtaaatctgaggccgaagtccatagtaccactaatgtatctcaaaatcgtcttgacatcttgccaatgtgtcgatagaggcctttgcataaactggcataccttgttaacactaaacgacaactcaggtcttgtaattataaggtattgcaaggctcccgctatggaacggtacaattggacatcagcaagaggttccccctggtgagcagataagcgaagaccacttgtcattggtgttggagaaggctttgaaccaagcattagagccctgatgagtaagtctcaagcatactttgtttgacagagatgaatcccttcatctgaataggcaacttcaatgcctaaaaagtatctcaaaggaccaaaatcctttaaagagaattgtttgttcagatcaacaacaagtgtgtcaacaagatcttggtcactccccattattaaaatgtcatcaacatacacaagaacaagtgttgttgatgtattagtgtggttaataaacaaggagtgatcagatttggaagagacaaatccaaaggatgttaaactctgttgcaatttgtcaaaccatgctcttggtgcttgcttaagaccatagaaagctttgtttagcttacataccaaatgttcttgtccagggatttcaaacccaggtggttgagtcatatagacctcctcttgcaaatcaccatttagaaaggcgttgttgatatctagttgtctaattttccaaccattagacaaggctagagttaaaacaacccttatggtaacaggtttaatcacaggactaaaagtctctgtaaaatcaaaacctgcttgttggtgaaatcctttggctacaagccgatccttgtttttaagaacaattccatcaggattttccttgatcttatagacccatttacaccctattacttgtctcccttcaggcagtctcactaagatccatgtgtttgtttcttgccaaggcaaggatttcatcactcatggcactattccattgctcttgttgaagagcctctttgagagaagagggctctcttgaagccaaaaacacccttggtttgaaaatgcctagcttggatctggttgtcacttgatgcttgttggaccttcctggtgcatttaaacagccagctacaagaggcaaggcagcaggagaagagcaaattggtggaggtctagaatcaggtgctataatagagtcagtgctataccatctggtgtagaagcaggtgctataccatctggtgtagaatctggtgtagcaatttgtgtgttggttcttaaagcttcatcacattcaataccctgagaagttgcatgaccagtaacctcttcacgaatattgtctctactccctgaagtgacatctacaacacagagagaagaagtacctgcaaccggttgcacctgaactggaaactgattgttagaaggacaaaaatccatggaaacattaggtacagatgtattgtcacataaagcatgttggtcaactgtaagaggattatttaaggcatgtcaagagtgaccaacagtaggtaagaaagcagcaggggtctgattgcttggttcagtgagatctctcatggtatattggtgtttgtaatgagcacacacaggaatcaaggcagaaataaaagatggtgtctcagttgaatcttgaggagcagtagatttaggagattgctcatatgggaaagagaactcatcaaaaataacatctctagagatgtataaccttcctttagagtctagacacttatagcccttgtgattcaagctatatcccaaaaaggtacaaggtgaagacctaaactctaacttgtgtttattgtaaggtctaatattgggataacacttacaaccaaaggttttgaaagcggagtactcgggtttagtgtgaaacagtgtttccaagggagtggactgctgcaataagggagtaggaagtctattgtgcaagtataca

SEQ ID NO: 386204 - DNA, 1916 bp, Cannabis indica
atttcatatataagatttacaaacaaagaaattaaatgcaagtcattctgataaatataatacttgtttataatataattcaagtttataaggctaacctaaacattatcatgagctgtcttaataattttattttatttcttataaaagctgtcctaaaattttattcttaattttccggaatttcttttgaagctagctaattgtagtattttaaagagattatacataggctacacctggattatttatacctatctgtatctataataataaatttatgtatatatttatatatacgaatccaatgtatgtgaactgaattattaacaataacaatatacaatatggtcaacatttctttccattgaccaaacaaaacaaaagaaataataatgttattcatttttcaattttttttttttgagatcatttttctaaatattgcaactatcgttattcttttcatgaaagatattgcaactatgttaagtgggcgttcgcgtgaagaaaaatgagactataaagtcaaagaaagaggccaagtggacagataacatataataataaattagttctgtaatcatatcaatcactcactcactcactacttgattcagacattttgttaaataaattcttatttactacaattactattcttctatactccttatcccatataatacccactaaatctattccctatataaacaattggccaaaaccatatagacaacaccataatatattaaagtgaaatatgggctcaaataggctctactgctcttccttaaccttcataatattgctcctttccatttccatacaatgtcattcaggtacatattacatgtatatacatatacatatttatacacacaatcttctgtatattttttcttgattcaatttgtgtgtacatgtgttatatatagggaaaagtgaagtactcaaagtaaattactataatgaaagttgcccaaaaagcagaagaaatcataaggcaagaggttatcaaattgtacaatgaacatggtaacacagctgtttcttgggttagaaatctcttccacgattgcatggtcaaggtgctatatttggtttctctttatttatcatatatatataaatgaatattattaaaaattaataacaataatataattactaattatgtatatacatacatacttgtgtatatatgcagtcatgtgatgcatctgtattgctagagacatggaatgggattgaatcagagaagaaatcaggaaggagttttgggatgagaaactttaagtatgtaaacaccatcaaagctgcagttgaaaatgaatgccctcttactgtttcatgtgctgatattgttgctctttctgctagagatggcattgtcatggtatatatacatacgtatctaatacatattaattaatttattttagactaatatataattaacattacttatatatatatatacatatataattgtgggatgatatgatgaatatataaataagtgcagttaggaggaccaagaatagaaatgaaaacgggaagaaaggacagtaaagaaagccatttgacattagtggaagattccattcctaatcataacgattccatttctttggtgctttcgcgatttcagtcagttggtattgatattcaagccactgttgcccttttaggtattattatttttatttgagaactgattgatctcataataatatatggacttttgagggaaaaaatattaccgcgtaaagttataactccaatattaatttattctaaaaaaaacttcaatattaaaaaataattaatttaaattaattttcaaaaattacttttaatatttttttaaaaattttatttttcacattattttcttttaatatttttttttt

SEQ ID NO: 386205 - DNA, 1620 bp, Cannabis indica
tttaaaaacaaaaataaaaatgggtatgaggtgtgggtttgagggttagggcccgatacatgacgtattcgagttcaggggctagggcttggtataggtttgggttcgagttagggtccgggtcgagattcaggatccgggtcagagttagggttcgaggtcttgggttgggggtggttttaggtccaggtttggggttcgaggctgaggtttaggtccaagttcaaggttgacgtctaaggctgggttcgagatcgaggttcgggtccgagcctaagtccgagtctgcagtctggggtgcaaatcctccgaacccttgtcctagttcgagtctaggtcaaaggtcgaggtctgaatctgtggatcagtcggattataagatacattccatgcttcaattatataaaatgtcgaattatgtaagaacatgtcataacttggcttgaattatgtttgaaccaacttatgtgaaatgtaatgaccgcttagttttattatgagaattagtagataatcagggcttattatcatgaatagattttaatttattatttttgcaattacagagatatatttaaattctaagtgtattaattatgttatatatgaaattttatgtttttcatattttatgtccggtaacaatataatgccacgtttggcctatagagtcacttagatatgatttagtattttagaattaacggggcaagatagttagatattcaaaatatcgagattactcgggattatgattttggactatttcaccctgagtatgtagattactctttggtgattaagggtaaaagggtttttactttttcttatctttagtgtgaattagtggattatttggttaaacttttagttattatcttttaattaataagctaaaatgataatggttaagtctttttctcttaaacacaaaaaaatagaaatccaggccctcctttctctttcttagcgttggccatagaagcaaccaaggaaccagagaacttcttttctaattctgagtaattcaaggagttttccgtaaaataaacttagtgttgtgatagcttaactcaaggtgaccttctcttcctcttttctctttgaactttctagtgaaaattagagtttcatgcatgttctttggtttaaggtactgttcgaattagagtttcataacatatcagtaagagcagtattagtgtacataaagtcatactaaataccgatagatatatatttggcaaagtaaggattgacactatcacatcggtacgactagagtactgactataggataatattatggtcaatcgtaatgtcatgtaaacgtgccaaatttaatacgcattggacgtgggatagggttgtgattgggtgcatgacacctagatataattcgatttatttatgtattattattatgctttttttactgagtctattgactcacaaatattatttacatatttaggtaaaggcaaaggaaaggctaaacaataatgagctcgagctaatgaagattgtacatatcgaggcggttagaccaagagtgtgacagtcactagtcctgtgatccataaggggaaatatcgggtaagctgtgtaatctcacaccgc

SEQ ID NO: 386206 - DNA, 1329 bp, Cannabis indica
gtgtcacaatcattgactccaccgctgagattagcaccttacccctaggactagtgtggagtttgtactttaagatgagattgagacatccccgaggttgaaacttaaccccacgatggggttatacacgccaacaccccaagatcaaaatctcacctcgagatggggttgccttaaggtagtttgagagctttttttccttgttacgttgtcaccaagagagggtggttggtgtgtgtcaccccgagacatccatgtggaggtcggggttcaccaccccgagaccaccattgagaggtcggggtgtaccaattcattaccctgagttgaccaatgtaccctgagatggggattatactctagtaccccataaaggggttagctccccgagatggggtgcacatgcttatacccagagacacacacctcctcaagactaaacacccccgtgatggttgtgtaccccgagttaaggcttagtgttcacctcgagaaggcaccccaagcttgggggctcggttgatgcacccgatattggggttattaccccgatattaaggtgtcggggtacacccggattcactatttttcttttctatttttttattgtgagcagcgcgagattggaggttggggtgttaccccaagaccacctcatggtggttggggtacaccatcctgaggtcaccccatggttgttgggggtaccaccctgagtctcaaaatcattaccctaagactagacaaccagagccacccttttttatacacacactggtaccccaaaaattatttttattctatgtttggtcgagattgagttttaaggatgcttcgccctgagtgaaccacatggggtcgggagtagtgctcgaagacgaccataactcggtttcatgggttggagataattgtttcttgcatacctctcgggttcttatatgtatatgcttccatgtattacttttacttttacacacttagtaaattttttaagtgtgtaaatgccattgttgcttctaccatttagctacatgaatggttgtcccttgatcacacttcctttcttgtgcaccatgaatgtacatatgtatgccttcttttttgctttagagatatgtggctctatttttatatgctactatgtattaataatttttctggcgtgtaccacactatgcgtaagcactttttatagttaaccatataccacatatcggtcgcttaagacattgaacaatgtacaaatactttagaatttaaaaagaaattttcaaacttgtaaaatcaatttaagtgaatgcgttttatgcttactagtccatgtat

SEQ ID NO: 386207 - DNA, 700 bp, Cannabis indica
acaagcatttattgactttagagaacaacattggaagaacattacaacaatgcgtgaaaaacctaaagagttccagaatgtttatgtttacaaatttttaacgttgaaatatagatatgacctctagatttgcatcgttgaatattttaatcggtggtattccatattttgctcggtactgtatttgcagggttgtttgtgttttgttgcccccaataaagtagtacatgtaagagctcttcatacttgcaatgtttcagtatgaattcttcactagcctcataactgacataattattttcttcttcccatcatccattgctctttaagagaacatatatagatttcataacctgcaatttttcccagtacttcattaattcaacatttttttttcaattaaaacaacaataaaataacactaaaaaaacatatttgttcattgatttggatgcgcatttattatcatcgatatccttaatttataataaaattaaggtcataagccaagagcgattatagaacaacgttgaattttgtaatgtacattattaatcgtttctcagggacgatctatattaatctttactttcttttaaatggcatgtataattatacatttttcagtttatactttattttttttcgaattcaagatctaattatgggtatatttttttatttgttatttaattgaatt

SEQ ID NO: 386208 - DNA, 571 bp, Cannabis indica
cttgaagcggggatgttacaaggtgagcaatcaaacaaaataaaaagacttagatgaaaacaggtcaattagcctaaacctaagaatattagccagatagccctaatgtacaaagctattaatcagcaaagtacaagatctaggtgcaaaaaattaaacacgcattgagttttaagctattaactggctaggttaggctctacctaaggcatgccattagagttcctacgggaattaagtattgggtaagggaagaataagctcaaaaagccacgaagagtcttttctaagattaagtgtaggctagaaccagccaagttgttaggaccgaagccacaaaccaactagggttccaagacagaattatgaaccagttcggttctcaggtttaaagccacaaactggacaagttcttaggccaaaaacataaatcggccagggtcacaaacggaccctgtgtgtcggccaggggttcgcgagaatcaaattcctatttttcaaaaacttgaatagtgttcttcgtgactcaaagagtcaagaatctaaatggagatcaaaatctaatcttttt

SEQ ID NO: 386209 - DNA, 1184 bp, Cannabis indica
atattttactttgctaaagaaagttaatggccaacgttaaaaatattaatttaagaattctgttatatagtaatattgtatatattttatatatattttctttaaataagttcattatttttatctatatcattaaagatggtctagttattaatgtccaataccacacattctaatattatatttatgagaaatactggcactagcaccttcctatgtgtcaatatcgctattggtccaattaagtatcgggttatataatttaatacaataacttttagagagtatcgctagtcaatcgtaacgtgacatatcgagaagatactaggcactactggtatctaataacaataatctatatttataaatcactttgaaataatatatttattaattaataacacattaacacacatgctaagattgtaacaataataataggtacatgcaaagaaactaaaggatgatataggatacgatgatgatcactcttaaaattattattataacacgatatatatatatatatatatatattaattagttaatcaatactgtgcaaccaaaccagcagtactaattgaagataaaccacttatatctgcattaatccttctgcagtttgacctgatttccccttgtgagccagtcaagaccttaatatttcccatcttgatcattgacaccacaaactggccgaagaaaattcgttggtcggcactgaaaacgttgacaatattagcagtgtccggggcgtcggttccggggttggagaacaactcttgatcggtttgaaggattccattctcggattggagattggagaagtacttgttgtcaaaagtgtttggagtgacaggatcgagattagtgaggacactgccgtttcctccctgaggacatagttgtcttagtgttgctaagagggttgggcttagggttgggtctggattgtttgtgttgttgaagttgtatagtctgaagctgaatgtttcgcacttggcacgtccaaatgtgtgggcgcctataatattttatagatatataaatacatcaaatttctagaaatatagtttaaatcttttatacgaactctgatacatgcatgcatccaaaagagcattcaaacttaacatattgatcctcacctgtatatatggatttttttttatgtataaaaaaaa

SEQ ID NO: 386210 - DNA, 490 bp, Cannabis indica
aactaatatagacaatatccttgttataagatagagacaataattcttgttaagaattagaattaaaggataaatctaatagaaatactcttataaaaaaagaaatacgaaaagatacacaccataaatttatagtaacaaataaaacactaattattgttaaattaactatattctgtaattaatacctaaccaaaaaaaaactatatattcagtaatagaatcagtgttatgtttattgtcatttaaggcaccaataatatttaacaccacataaaagcataaaatatattattattagtataatttaatatcaaacttatatagaaattacaaacaaaagatatgataaccaaattttgaagaaagaaaccctgtcattagtacattctctgaaaagattattatgagatgattaatgaaagcaaaattgttatttccttaccttgcacagttagatatgagaaatttacatggtgtactaactttt

SEQ ID NO: 386211 - DNA, 948 bp, Cannabis indica
attaaacctgaccttgtaactgtagcaaaggtaagggtgtataaattaaatgacactcaaaaagatcacaagcaagaaaaattatattcataaaaacatattatttgcacgacatatgacaaacatatttttgttaaagcatagccttctcaaactgaatgacactctctcttatgttggattaatcttcaggattttgcttctgcatatttacccattgcagctgctttagtgagccctgaagtatcagaagtaatgttctctcaaagcaacaagcttggtaattattgggtcataattaacaatttaaatattttcattcgcaatttggtatttcatgcagcagtaaatattcagaagcctcatgctcaagctctggatccccaattttagttgctgctaattttgctttacatggagttgtggaatcaaactcacatactaataggcagatggaaaacatagagcaatgcaatgacactagtcataagggtattaaaactctgaaagagttacatggttctgttggtgtggacgaactgtgtcctggaaaagtaggaccacctaacactgcaataaaattttccatagaagatgcaaaattccagatgaatgataccaatctctaagtgaacctttatatatttgaatggtcatgctagtttctttgttgttcatttaatttggtttgtactgggtagcttattttatttttcttgttagtaactttgattcattgagtttgttgttttactgtacgtttatggacaatgtacaattcaaggattatattgtaattgaaattttcatgattgacattgtaattttttatgtaatgaataaatgtgtagtgtatgatgttatttaaatatagctttgaataatatgtttttattatagaatttaaatgaatatactctaaattaaaaaaaatatataaattagttt

SEQ ID NO: 386212 - DNA, 1212 bp, Cannabis indica
attcgatacaatcggtaattgtaacacaaaccctctccatatatccttccatattcaaaccctctccatctatctcttattttctcactaaagaaaacaaaaccctctccattgccagaccaccaccgcgctactgccgcctcctctccaccgcttgaagctttgccaaaccacccccgtattgatgccgccgccatctttcggtaatataatttcatttctctcattctcttctcatatatatatatatatatatatatattagtttaatatttttatgtatactaatttgtattttatatatatatatttatatttatattttctgatattttgtactttattgttcaaacactattagtgcgccaccatccatattggagctagccactacaagcggtcggacggagccatttatatcaaagccaccacttggtatatcattgaaaatccattactgcttctcaactacaaatttttgcatccattcttatttttaatgttaacaccaacatatgaactatttccatcttcttcaaaaaccttcacttcccaatccatggttcctttccacattcgactaaatatcgattcttcgatttctagtttcgaaataaatctatccactactgatcttccaccaaaagatgcaaccaccacctcgttctcctctcccattattcctcctccaattccacccccaacttacttatcattgtcacaatattgtcttccacctctctcgaccgatcaccagcaaccattaatctcatcagtaatcataagttaattatataattttttagtctagtcgactgtctcccaaagaagggtccataagttaatcatagttcttagtccatccgactatctcttagagaaaggccctaaaaatcatacataatattaatttatcaattataaataagataaaataataattaaacttaaatataatactaaatattataattctataattaaaactattaaaacttgaaaagttaagatttgtatattaatttatttatagggtatgatataaaaattgagtatttatgagtatatatttaaattctcatgatgttaataattattttatataattatctataaaatattgttcaaaaattatataaatataactatgcctataaaatatacatataatttagtaattgtaaaaaaaatatgaaaaagtaaaacacgaat

SEQ ID NO: 386213 - DNA, 2123 bp, Cannabis indica
tccaagccattgtcagttcttagatttttaagtctaagattagtcaaattctccataagtgttttccattcaacaaatttattcaatcatcatttctatgtttatgtaaatacacccataactttcttgagtgatactatgggcagaaagtaaacactaccaccatgtgtaagagttttctcaggaccccacagatctgagtgaacatactcaagaatttattttgtctcgtagatcgcagttttgaacttaatcctatgatgcttcccaagaatacatgactcccagatttcaaccttactcaccttgtccttattacataacaggttctgatcactcataatttgcaagcctttctcactgatatggactaattttctatgccatatagtattgccttctgatcctctagggagtgtattattgtgttgtggcattttgaaactagttccccttgtaagtagtaaagaccttcatgtttctttcttttgattactgtcatggaactcatgcttaatttcatagttttgtttcaattttgttcaaaatacccaaatcatcaagtacactaataaaaatcaaatttctagctagattatgtgcatatttgacccctgtcaaagaccttacaaccccattaaaaaattttaaacttacagtacctaatccttcaatttagcatgattgattgtttctcaagatgactttcccacctttagaatcctttaaattagacaacaaatgtttattgttagtcatatggaaagtacatcctgaatttgaaatccaatcatccctgaactcagtagcagcaagataaacttctccaccatcatatccataactatcatttgtagattgttggtcagatttgtatttgttatctcctctttgagagtttgagccttgtcaaaatcccttgtagttgttacttcttttccagaagtaacaatctattctcatatgttccaattgaccacaatggtaataaccactgggatcttttggtccctttgctggagatcttccctttccaatactaggtcctttgttaggctctctactctagcttctacctctataaggattcatgtatttgttctttccttgactgaaattcagttcacaatttgaggagcttggtctttcattcttcatttcaagatcttctaatttaagggctaaaataacctcttccaaggtaattgatgttctaccatatttgatagtagtcttgacttccttgtaagtcatctctgggaaggaatttaatatgatgatgacctggttctcattactcgaggcttctttttctcttaagtttgcaatttcaatgtacattctcagaaacttattaagatttttttccagggatttggattgactcatcttgaagccaaaaattctttcctttaaatagatctagttggtgagtgacttttgttgaaattgttcctccaacttcttccatatcttagctaaagtttcttctttatcaaccaatagaatgatttaatatgagagattgaagattataattccaatggctgtctccaagagttcttccttctaaatcttggtaatgtcttatggccactaaatatgctctttaagcactctcaagagcttttgttcagttagaagaaatctaatcttccttctccatatcagatccatcaaacctgtcaatgtcaatgtttacattactcatgctaacacaatcaaaattcgatagagatttagttagagagggttttgtcagattgttcaaataaggaatatccacaaatcttctatgtcacgtactctttgttggggatcaacttcctctagcctttgtttgattcttgatcatttcttaagttaaatctttagccaatttgtggctttgataccattgttgggattaatctactcaatccctacaccaactcaccatacacattagatcatcatgttgggaatattttaccaggatctagatttagtaacaagtatgttgaattaacatcctaaatatgaagattgagtacttgacttgctatgtgtgggcacgttactcattcactcaaggtttcgaatatggaagaacaatgaaggaggtgagaaatcactaaggaagg

SEQ ID NO: 386214 - DNA, 1251 bp, Cannabis indica
tatgtcatccacataactagtaagacaataaaggttgtgtcagatcctctggtaaagattttgtaatctgcttgtgatttttgaaaaccttcatctaacaaggtatatgaaagctttttgtactaatgtcttaaggattaacgaagtctataaattgatttatgtagtttgcaaactaggttggtatctgtaatggaaggaggaagagttaatccttttagaaatcgcatataaacttcttcatggagatctccattaagtaatttaaatgtgactatttttcaataggagaaaaggtattgaaaaaatcaaggccctcttgttgagtgaaaccttgtgcaaccaatctcactttgtaacgttccacacttccatcattgttatattttatcttatacacccaacgatatcttatagctcttttatttggtaaaagagggacacagtccatgttttgttgtttcaaaaaacaacaagctcaatgtccatagctcaaagccaatgtttgaaatgtattgcttgatagtaattttgtggttcctattctacaaaaatggcaaagatatatgcttggtgagtttttgacaatttagtataagagataactttagtgagaaggtgaagtgtggaggatttgtccttaatggaggaattacattaaaaatccttcaagaaaactggtggttttagctattctagttgttcttctaagttctattggtatggttcgaggagcaggtattgaatttgctggtgtggtgaagttgcaggggaactttcattttcattgctttcttcctacacagaactattggtatggtaaatgacctccctttctttatgctcttgtcaaccatttgtctatctctatagatgagctgcactgaaatggatattttccctttttaaattaattttttatacacaatttgattatttttaaaaaaaatataaaatactaatttatatattatacattcaaattgaataatacataatgagcttgtttggaacgtcatattagatcgtattatattatatttttatataataatacatataattttacataaaaatattgcataaaataaaatttaatattatactatacaatataatacggtgtgatacgatgtaacaaattaaaccaacccaataaggatatcaatgattattataataatctaatccaatataacataataataataataataaaaataaagatgatcatactttgattttattacg

SEQ ID NO: 386215 - DNA, 1321 bp, Cannabis indica
gattaaagtaagacaatgcaacagcaactaccccatttgcaacaaaatttttactttaccaaacaagctcatttctcgctttccaaagagaccaacaaatcatcgcaacatgacaaattaaagtcttcagaaattcgatgatcagttgataaaactatcctgaaaaatatgtactcgaaaggttacaaatagccccttcaacccggtgccaacaagctttggcttaggacactcaaccaaaatgtggaaaattgattcattcataccttggcacaccagacaaatgatgaccacatcaacatgccgagcttttaactgggtcagtgttggttaacacccataacatgtcctccagagtaagtctttaacattatgaggaattttgagtttccataatgccctccaaaggcccgaattattatcttccgactacctaccatgaagcacctggagactctttataagcactcttatcaccgaataaattcctaaagtctctttaaaccaataacaaagatctgacccaaaattatcattcaacacaatactcttaattaaccgtcggtcagaagcattgaacatatcctcaagaattgcatcattccacacccaggctcctcccgccataatctaattgaccttcatcccctccaaactaggatggaaagaagcaatctcggactgctccttgcacggaagccacgactaccccaaaatgtcaatagaagaactattaacaacgcgcaccacctagaaccaactttcaataacccttgagaagcaaaaatacttctccaaacataactaagattcaaccccaattccgtagacaaaatcaatccactaggataataccacacttaaatatatgactaacaagagaggcagaatgagttagaagtcgtcactcttgcttcctaacatagctagatcaaaatcatgtaaactccaaaatctcatcctgccattatctttatgaaccgccaccttctctcatgataactaatgaatacttgggccattactacttttccaccgttaatacttacacatgatttgctccatttcaagacaaagcttaagcagaagcagaaaaacactcatagcgtaactagagagagattgagcgacaaatttgaaaaggttttcctttcctgacataaagagccatttttcgtctcaactgttcactcgcttacgcattttattaaacccaaagtaatattacaataattaaattaaatagtatacatagggtctgtgattgacacagtttttgaaaaagttaaaagctactttttaaaaaagctgtgacaaaaag

SEQ ID NO: 386216 - DNA, 553 bp, Cannabis indica
tggtatgatacttaatttgaaagatcaatataaattaaatactataaatataattgtactatataccctaaaataaagtactgttaattttttaactccatattaaaaattacaataaaataaaggcatatgtacgtacaaataaataatgtatattaatgaaagtccatgcccaataactttatttacttctacaatttattattattgttattattatttataatttttgaatttgaagtactcacataataaactcaactacaaagaaaccatacataataattgtgtaggacaaaattgtataatataattatgggtaaattgcgacataaatacctaatgtttcgattttatacacttaaatacctaatatttatttttggtgagaaaaatatctaatgttacaattctcttataccgttactaccacttccattattaacttataaatatagacacgtggagggctcaaatgcattacatttattttttattttaaaatttaatattcttaatataaaaattatatattacttgtttctttaaaaaa

SEQ ID NO: 386217 - DNA, 1360 bp, Cannabis indica
ctctctctctctctctattttgtgatttcaaacacaactcttgggggaaagcttgaattttagtgttgatttttggtgtatgttcttgcttggagcttgaagagcataggtaactatctttgatctattttaatttgtttaatttctgaatttgagcttgctagtggtaaatgatgtgttcttaagattgtggttgcatgctggtgaaaaataaggtgaattgtggtaattttggtatgggtatgctattgtgttcatgattgaagcatctaggttgctttgggaggtttttggattgggtttctatgttgaatttttgagaaattaccttaaatttttgggtttcaaggtttggtaatttatgtgctatttaatttcttgtggtatgccaagttgtgtttgtggtttgattttgagctacttgttgagctcaatttcttactaattttagattggatggatgatgagtaaatcttggtttgtgcataattattggatgtattttggtgcatgaaatgcttgaaaaatacctcattttgatttggaagcttgttgtcaagttatggtattttagtattaagtttggtgcatttttgggtacccaaatatgaatttttctgggtttttaacccatgagccacgacaaagttcttgagtgtcgcggccctcgatgtgtccagtaaggcagaatgtttttaaaacttattttggccataatttttgactccaaactccgttttgggcgttcttggtattgttggaaggctcgtttcgggctctatgtgctagtctatgattggagtccgtattatgtgtatgtataaaaatgaatttgggattaaccctatttgtggaatctcgagaatgtgtgactaggattaccagcggttgctctggaacacccagggatttggaatctccacatacttggattatcaggtaagacaatgagttagcacatagagattagcatagtgacactcatgtatgttattttgtatatttatgcgggaaaacaagactggggttattacccttagtttagctattttgtggtctagggttattactctacagtgtatgtgaatgtgaatgcaataatgtgttatatatgtggacataaagagttatgcggttaaggcataactaggatagactcggtattgaaaatcgagataagccattctaaggccttattgtaaatagacgtgtggcatcaacacttaagtgattataattgttatactgtcttactgggccttggctcacgggtactctattgtgcaagaaagggtaagtcggtagttgagcagccatgagatggaggccttttgcggtgcattgtacatgtttaggccaa

SEQ ID NO: 386218 - DNA, 523 bp, Cannabis indica
acaaatatacaatacattcactaaatgtgaaactaaaagaacagagacagagaaagtgagagactacctgatgaaaatggcttcgactggtggtgcgactggcggtgcgattgaaaggagtttgtgcgactggtgcggtggaagaatggcttcgtctgccaatggatccatctgcagcggctgccagcgactcgtcgtgtgtctggcagggttcgacggtgcaggatggtggaaatggggtggttgacggcttacttagggctggtcaggatctgttgctagtggtggatcactagatcttgagctttagagagagagaagtgagggagcagagagagagagagagtgtcgtttttctttagggtttcatttcaaaatatgggtgagtgtaatgtgtttgggttaggtggaattattcattcacgtgtttcttatgatggaaaggaattgtaatatatatatatatattatggtggcgtttggtaaatatttttttaatcagttttttctttttaaaattaga

SEQ ID NO: 386219 - DNA, 805 bp, Cannabis indica
tttgaacagtttgatgaacacctctcgtgaagtattacctattgaaggtgttgagcaccagtgatgccctatagcaatgcttattaaaataatatatttatttttttatttttcaatgagcattaatagtagtattgacttttatagttaacctgcactttgtgtattgaagcacaaatataaaaattaagtcaaatttaacataaaatataccccatttatgaaaaatgatcttaaaaaatattgctaatcaataataaaatgctatttataaaaagtgctagaaaccaccaattagttagtggactttttttttttttttttaatttaaacgttttatatattgcacaatgcataatctgggactcgaacccaggacctccaacgcacatgcaccctccatggatacttgagctagcctcaagtagtttggtgaccaaattaaaaggccataacatcatctaagagcatctctatgttatattatttattatataatataatgtttaagattaaaattgtgatatgttatatatattattacatataatataattgggaattatatgcatgtaataatcacaatattatgtgattgggagttacatatagttgtaacatataagaggtggagttaatattttgtaacttccacatgaacattgattaagtgtgtaaagagtggtgagataacttaatttttgaaattcaaaaactataattcaaatatagttgttggggattgaattttatcatttataatgtgtataagtgatataaaataaagtgggaatggtttggaata

SEQ ID NO: 386220 - DNA, 514 bp, Cannabis indica
ttttttaattaaaaagttactaatactataaaacacatgagccttacaatttatgttttagttgaattttaaatctaaaattatattttaaaaaatctaaatatctcaacacactaaccgattactacttgctcatcttcaaagtagtaagtagtaaccagactaacattcaaaaataatattaataattatatttccaattaacgagtaaccgcatgcacaaaatttaaagtgtaatattattattggtataattaagtaccagatctcatataatttaatttaataactattaatatagaatatcattaccacctataactagtattagacactatcagtacctaatatcacttttcagtttttttttcttagtaataaatgatttaattaagaaattatatacttgaaaaagatatttttttcattgtcattgaaaattaacaacacacattgtgcatgtgatattttagattcagtcctaatatgacaacaaaaagaaaatcaaaacaaa

SEQ ID NO: 386221 - DNA, 565 bp, Cannabis indica
tcttttggaccaagcttttgatttgaggatgagaattgtgtcttattggaaagtggttttgaggaggttggttgatttaatggctttaaatatgagattaagtcttgataagcttgttaataaggaattggaaatggagattgtgagtgagttaatggatcctcgtgggaatagaattgagaaattgatggaggaagctcctaatgtggctgcaaagagagctaggcttactgctactgttaataagttgaaagagtgtagagagattttggctaagattaaaggaagaattaatacaacttcttctgattataattagttaattaagctaattaagttgtttggtcatgtttgatgtgtgttattgttattatgtatatttagaactaagtgtttgtgttgtgtgtgtgcttttgttgtcttaattggcatgtttaatataataaattatcccttggtttttattgtttttttagaagaaaattgttatgaagaaacgtttgcggtgagactaaatatatatatgctttgtttatatacattctttgtaaaagtagtttttttt

SEQ ID NO: 386222 - DNA, 1245 bp, Cannabis indica
ttaaaattattatacatgccgccagaagtacggttttgttccctagtgatatataatgtaatgtaatcactcccagcaacttgaaaattgtcgttattatatcctatcccatataggctacaacgatcgcctaagaagacataaaatagttttatgtggctgtaatattgacgacatcgacaagcttatttttgtttttaaatttatatgttacaattaataaccactcaggctaccccagagagaaaaagatcgtttgttcatacccaggagtaagctagtcgacgatacaagtaaagtacatatatgaatcaaatggttaactatcgtgatacctttacttattagttgactaaaataagtggaatcaatatgtttttaaggaactattatagtgggatattgctgacaccaactttgtttaatttatacaatattttttatattgtcaaaattaaccatcttgtatgtagttgagttaaaatatgtatgggctagttattttctataagtgatattagtaaggcccagtaacgatgatagtagaaagctcatttgtacagaactagatatagatatagcgcacttaacgtgatgtgatttcccaccgtcctcgtagctgagcttttggctgttaggactgccttacaaaccatatcatttttttttggtgggtctattttccatttccattgttgagacatgacaagtaattgtgtggtgggttctagtcgctagctcctaaaattttacatctaaagtggcgtttggttgaaggtgttaacagttgctttattgtaattggttgagtttgttagttagaaaggttgttgacaattgctggtttgttgttattgttactactggtttgttacttgttgttttattttttcttcagtagtatataagctatgtcaagttatcttgtatcaattgagattcattcaataaagattttcattcatttttctctcctaaaactaaagtggtatcatatagagccaagaaattcttgagttcattctctgtttcttctttgttcttctcttcttctattcccatctctacatttgttgtgtcccagctgccatggcaagaggaggaggagctcagactcgtaatacttctaatcgtgataacgatcctggaaacaacaatggattttccacattagatcaaactactcgatattccacgaagtccattgtaacgccctaatgataaggcacgctacaatgctttttc

SEQ ID NO: 386223 - DNA, 753 bp, Cannabis indica
ctggatttgagtttgaaaaattcgcttagtagaatttttctaagatttcaaagcagagacacaagaattttggcaaaaaagaaaacggctaagagcaccctcattaagagagaggctggaggaattagactaagaatcctgaacagtggtataaaaattaggattctcaagccaaatattctcaaattgaaaacgctttttaacaaaaagagagctagtggaaacgctagtatgaagaaaaaccttaatggctcgatggtccgaaccataaaaaggcaaatgatgtaaagttgcattaggagaaagagtcctccaagactcagaactgatttcccagtcaagacgctcacacactgagctattatccaagtgtatttatctccctcaaaattgaggggcgagagacaaaatttatctaagaactgggcaaattgattcatatctttgtgattgtaataggtactaccgattttgtcatcaaaagaaagaaaactattgaagtctcccataataaaccaaggcagatcaggagcattatagaaaaaaatttcatgcaggttccaagtaacagaacgttgagaagaagagggagatccataaaagccagtaaaatgaaacatttcattatctttaaagtttatattacaatcgatatgattactagaaaaatataaaatatttacataaacagttgctttccacaaagaaaaagtcccccccaaaatactttctagggacttctacaccattatc

SEQ ID NO: 386224 - DNA, 1325 bp, Cannabis indica
aagtcttctgggcatattctctgatttcatcaataattaagatctgactgctttcgggaaacaaatggagttgtctaggggtcagaactgggacccagcgccaagttgacactttgtcaaccttgaccatttccaaggagtttttttaagaagtcttcctggcatattctctattttctgcaaagattaagatacaagtgtttccagaaccaaaactgagtcatctgatggaaaaaaaaaagctagacttagcgcccaggtgggcaactggcaccaggcctagcgcctaggttgacattttatcaacctgggttgtttccaattaaatttttgagaaagtgttctaggtattttttccgtcatcaaaaataacaaagatacaagtgatctcggggagaaaatgagatttcagggagccagaatagggcccagcacccaggttgacatcacactgggccatgcacccatgttagcatgcaacatcgtttgcatgtttctgctcctcaaacacaaattttgctctgaaattttttctttaaatggtcaaaaacggggtaggatacctcgtttgcaatctcaaatgccatagcagtatcaaaacgagccttaggaaggcacccgagaagcacccagtgcctgggttgacacctgacctagtgcgctgggttctgcttatgagaatccaatttcgttttgagcattcaactttttttttttatagtaaatgagaactataacttgtgacaggtcaaattcacactttgattttcaccatttcaaccaggtggaacattaacaaaatcagagatttttgagtcttcttgatttcacaaaaaatcgacatctccaagaatcggttaacagcttcaccagaatacagaatttgactaagtgttgtcaacacatcacttaagcatcaaaaaatacaagtttgggacgtttttcactcacttggcgtccaggttgacgttaggatgtcaacctagtcgctgggtgtcaacctggccgcagggtgctaaacaacctttagtaaaatgatcataactccctcaatattgatcagattgacgtgattcaacttgtgtttcgaagctatttctaagatagataaatttatgtcacacccatatcgtaattctgaaaattttaagtccaaaatttacccttaacatagttgcaaattttgagcaaatttgtaaaaaccgcttagctcaatttggaaattagcagataattagggtttaattataaaaattatttattaatgttaaattaattatttatgatgatttatttggattcagaatgcattttatatgtcatat

SEQ ID NO: 386225 - DNA, 2257 bp, Cannabis indica
gctcaggttgatgtggatgaggttaatgctcaagctacgaattgggactcagctgttatatgtatagtgttaggagcaaattctcctatggctgtgtttgagggatttatcaaacatatctggtgtaaactggggatagaccaaattgttagaatgacagtgggcttatgatggttaagttctttgaaacttcaactcgtgatcaggttcttgaaaatggagtcttccaatttgatagaaagccagtgattgtgcaaccttggtccaaagatctaaactcaatctgtctgattcgatctgtcccctagtggatacgtcttggtggtcttggacttcagtattggggcaacaattgcctcagtactcttgttagtaaaactgggaaaccattgatgatggataaatttactaaggaaataacccgaatttaatttgctagagttcttgtagagatggacatagctgacaatcatcctccacagattattcaataccttaatgagtatgagcaattagttgagcaagaagttgactatgagaggctcccaatcaaatgtaaaacatgttcgggttatagcaatttaatggcgaattgtcggaaagtagagaagaaacaagaggttaaggagatgaagcaacctgtcgtttttcaggcagctccccatttcgatgattttctcatgtttattcaatgcctaggacttgttttgctagagatcaatagggaaacctatagttttgagtttaaagtcccctaaaagtgatttagcatatcatttatcaattttacaaattttgtgatttaggggcctgtaaaccgtcgagcagcagttccactcaggttgaccggcatacctgaatttgaaattaaggtaagattagtatattgatatgcatatgtatttttatatttagcgtacatgtttgttaagcctgttagattacagtgaaatagcggtggctgtatatatagaattatattggataccgacaaatgtatttggcttaagtactgattgatgctatcatattggtacgactagagtacggagtgtaggtcgatattatggtcaatgtacattgtacgaatattctagactcagtatcgtgcgggacacgggtttagggttatgattaggtgtatgggcaagtaattataatctggtgtacactgatgttatgattatacttttctaactcagcctgtcgactcacagatattattttcatgcgtaggtaagggcaaggctaaggttgagtaaccgtgagagcgagcggatgaagattgtacatgttagggcggttagacctagagtgtttggtcttcgggacaacatgtttcattttgattagtcgctaggcgacaagctttgtattattatattgtattttggttataacttttgaaacacaagatcctgcacaattaatataaaatcacggtaacacgcctatgctagtagggtgttacaatttggtatcaaagccattaggttttctttcgaagatcatcataacatgtacaatcatcatcaacgataagctcgactcaccattaaataagcctttattgcttttgtagtttattttattagtatgttataagaaaagcatgttagtagcatgatagctgaatatgcatatgtttcattttctaaaataagcaataattagtaattattcttgatcacgatctgaccaggctagctcttggtttcataggctgttctattagaatagacgccaagcgaaacatgagaagtcaggataactcggtcagatctagtggcggtgagggagtccagtttcccctgaatatgcgtggccgaggtagaggcccaagaggtagggcacgcggttggggagatgtcaacccgccgcaggctgcccaagttgagaaaacaggtttgcaacaatgcaagccagaatcaatgaacaagacaaagaaatcagatgcctgaggcagaattaatttaagtataatggctaatcataaaattaatttagctttgacaaaagaaatatttcatttaaataaagttttgaatttataataggttttaaacatgttaataaattaattattaagaatttggctttggtatttaaactttttgttgtttggttattagggtcgatataacgtcggttattagtatataaccgatgccatagtgtatatatggcgatcagttatttctatataaccgatgccatgggtacactttagtgttggtttatgttttgtaccttacgt

SEQ ID NO: 386226 - DNA, 1742 bp, Cannabis indica
tttttcatcatctttgccatttcaaaaacttcttgagattctctgcaaataaaaactccacccatattatacgaagctttgcatgccatctttgtctttaacatatttcttgcaaatttcatcagattggcttttcgacctcaagtgttcaaagagatcaccacgccgttcacttcatcccaagttgcagaatcattcatcgcaccacaactcgatttcaaaccataagtatctcatcccttttttgtgtttttctttacattcctgggtttgatcattattgttatggtctacatttttgtcattccatttgattttagtgattttggtttaaaatcctgggtaatttttagggtttaggcaaagtgcagatttgtagatttatcatatttgtaagttttctggtttgatatactttcatctaggcattgggatagccttttttttttttgcaaaaagtcccaattttgttaagaaatttatcccccagaatctttagaaattgagtgtcctagggaacttgtcatcccatacaaacccagaacgtcaaaactcaagtccaaattagaaataaatgatgcaaaaattagagaccacttaacaaaagcccaccaggatgatattgctaatcttcataggcgtttcttataagaaataacggagggtaaacatcgtttcttacgagatgatgcttggcgtgaacctcccaatttgtcatctattcctttggctaaacccttgtttctacccagagtcacaatttctttttcgacaagtgacatggacttcaaaattttgacttccaagcctcgtaaattaaagactccccaagacccgaacgttaccttcgaggctgaacttatcgagtcgagggtacgagccatcggagactatgtaggtagcattttaaggacttgtggcattgaccaaaagcagaaattccaggtaaggtctgtagcccctggcaagtttagctatcacccaccagaacaacttcctcgcgaggtagtcgaggggaccagtggtgtaacaccctaactagcataagggtgtgaacgtgatttttaaactcactgtgccgctcgttgctaatcaacgaggttaatgaaaatcgtgattaattaaaatttgcttacttaattaaaaacatataatattacatacaaaatatttcgggatcccgtttacaaaatattttacaaaagtctgctattcatttacaaaatatatgtcgccaacgactaacaacaaaagccgtgatgtcccgaagatcatacgctccaagcctaactgcctcgacatgtacaatcttcatctgctcgtcctcacggttccccaactttagccttgcccttccctacacataaacatagcgttgtaagtcgacagacccagtaagaaaagcataaattatataacatacatatatcccgaattatgatcagacgcccatacccgtgaccataaccctaatccccgtgtcccacatggtactgagtctagaacgttcatacaacgatactattgaccataatatcagcctatacttggtacgctagtcacactctagccgtaccgatgtgatactgtatcagcctatactcggtacgctagtcatattctagtcgtaccgatgtgatactgtcaaatagtacgttgttatcgactataatatcagcctatactcggtacgctagtcatactctagtcgtaccgatatgatactgtcgaatagcacgaaa

SEQ ID NO: 386227 - DNA, 678 bp, Cannabis indica
atttatttatatcataaaaaataaattataacctcaattcccatatttatgaaaattttccacatttgggttatgaattttttattttctttacatttttatgggcttccctatatcatattttgtaaaaaaaaatcaaataccatattttaacttttcccaaagcccagagcctctactactcaaaatcttctcattttctttctctctctctttcccattatctctctctcggttctacctatgcagtactaaagtctagattgggagcatcgtgcttcgaccatgcccaccccccaacgaactccaggtctgttccttctaagccaaataatcccaatccccctcttctccctctcttgatatcactttctctctattttcccttgtgtagcgacggcacactccagaattagcctttgcctgtgtcaatggttcagacggaccacaaaaatgttgtgttttaagccctaaataaaactctatttcaatgtaatctctatcatttaaatatcaataaagaaacagaagtattttcatctcttattgtgtcatttggttcatgttatcatttatttgtttatttgatttataaattcatctaaatccttatcacatttatatttttgtttattgtgtcatcagcacagtggaaagtaatcaagattatgtgattaa

SEQ ID NO: 386228 - DNA, 1583 bp, Cannabis indica
ttcatagtattcccatataggttctttagaatatttttaaatatcaaaataaaaacacactacatcatatttattgttcttattatacatttcgttttagatgtagatatgtgaatttattatattatatattttaaatgaataaaatatattaaaatttgaaaaaagaatgaggtttttgtgatatatttttaaaaaaattgatgtaggttgtttgtagtattatttttagattaattttagtgtatttttaatttagttttactcgtgtttgaagcaattctacgttttttttatcttttatttgtgcaagtttaaaataaaagaagaataggaaaatagcgaatgaataagatgagaagatgaaaaaaaaaaagatcaaaagatcaaataaaggataagtgtgcacaagatggggaccatgcctaggcatagaaataccatgccatggcctgtgtcaaattaagcttgaatccctgtgtaaaagtgcaacacaggtcgtggcatagggagagcatgtcgcggcccgctcatctaattgaaggctgaataagagttttcaacgcgaccttatctttcctatctaattcgaaactggatagattttctgcttgtgctatcttatgctatcttttttattccctcattggctataaaagaaatgaacttcaattgatttcgtcaagcaatttagaagaaaataagaagcattcaacgaggtacgaattttggagatcaaattcaatactggaggcgtttttcagagggttttcagcattcttttcttctctattttcttctcttttctaaaattaatatgtgttaatttgctacaatgaacaagagtagctaaacagttcaccagggtctaaatggagatttatttatattaatttttggttttaatatgatttaatttcccctcaattcctatgtattctatttcatccgtacttacttactttcaattacctgatcaccaattaaatatctatgattttggtgcgagatcaagaagtgagtgtcgattagtgaaatagaaccaaattttgatatacgatgagagtacctatatggtttggatagcttatagagtttctgtgtttaatgcctgttacatgtttaatttatcacgagagtagaaaatttgcatgtgattgaagtttatatatctgagaagactataaattaccttagtaaatctgctattgcatagaaactcgtaataggaatagaaccatgttaaaccataatcaatagatataattgaaatcgaaagccttaacttttattcattgttaattcctttattaaattacttgtttcttactctcgttgtttttcttgtttttctaattttaattttctcttaaaatttatttagccaaataaaagtaagaatttaattttaacggacttaactacaatcttcgtgggatcgacctcactctttgtgagtaatacttgttaaaacgatgtgtatacttgcgtgttgcaaaatatcacaacaagtttttggcgctgttgctagggattgttagttaatattattaaaaattaaattttgttctaatttgattttt

SEQ ID NO: 386229 - DNA, 1543 bp, Cannabis indica
agtagtagtagtgcagctgggcgtgagccattcgcttgtgacccaaaagataaaacgacagcaaacttagcgttttgcaaagtgtcgttgccaacaaaagagagagtgaaggacctgatcggacggctgacattgcaagagaaggttaggctgctggtgaacaatgcagcggcagtgcctcgtttaggtataaaagggtacgagtggtggtcggaggctcttcacggcgtctccaatgtgggccccggtactaagttcggtgggccctttcctggcgccactagcttccctcaagtcatcaccaccgctgcttctttcaattcttctctatgggaagccatcggacgggtcagattttttctctttttttttttatttaaaaatagaaaaattaaattatatatacttggagagtgaactagtttagctcatataagcggaaacaccattttttccccttcaaaataacatacatatttttcttaattttaactaataacatctcaaaattcattttttgagttgttttcgttattatttatttaagatggaaactttctaaattttcttattttagcatgtagctagtttatctaagttatcctagctattgtttggtatagtaatatcagtaattttatatataattttttatatatatattaaaaaaaaagtgtcatgggagaatatggggatggggtgcgtgcgtcagtttaaattgttgtgatgtggtttggttaaggctataataaataaataataattcttggtcgaaccaataaacacacccactcacacacgttctgtgttttaacgtaacaataatttatgaagataaaaaagattgataataataatctcttttagaaaagattctttgatcaatatacatatactatggtaacatcatatcgtttacgcatgaaaggtacattacagtaacatcatatctttgtaatttcttatggtaaaattgtaataaagcaatgataagcataataagataagatcataagaagaaagctagtaactttaatacggtctatctatatagactatagaagagtaagtaataataaatctaaagcgcgaaactaggtgattggctgaaattcagaacaagttgggttaaaaaggaaggcaagttgtgcatgttagtgggaccaaggttggaatactaaagtacactgagtgtgttgtgggcgcaggttgtgtcagatgaggccagggccatgtataatgggggtgtagctgggctcacctactggagcccaaatgtaaatatactgagggacccaaggtggggccgtggacaggagactcccggtgaagatccggttgtcgttggaaaatacgctgccagttatgttaagggattacagggaaacgacggtgaccggttaaaggttgcagcttgttgcaagcatttcacagcttatgaccttgataattggaatggggtcgatagatttcacttcaacgccaaggtaaaatataatttatatcattttgttcactgtgaatttgatcattaaaatgacat

SEQ ID NO: 386230 - DNA, 682 bp, Cannabis indica
gacaaaaatcctaattagcctcatttttttttaatataagttccaatcaataaaataatgaaatttagcatacgtaaccatttatttcagttagagaacaaattcaaaagttagaatctataatataccttttctctgatattaattttttgtattgtatgtggagactaccgagtaaatcttaaatctcaaactaccaattaataattatatatatacagtatttttaatatgcatataaaaataaagtttcaattttaatgtaaatattttttactgctagctaaatgaaaaaatgaattatacaaaaaaataacttaaagaataatctattttactttgttattaccaccttttgtttcttgtttttctaaataaaaaataaaatggtgggccttggatataaatagtaatagctaaaataagtatgatattaattaaataataaacaaagctattaataataataaacaagagaaaaaaaaaaacaacccaaacttctttttaattattttttttttttgtaatgaaagtagaaaacttcattaagatagaaatgccaaatcggcacttacagtagtgttaatagcactaggaacattgctactaacaaaaatacaatctgaccaataacaagcaccgcgagccagacaatgggcggtattattagcagatcgcttaa

SEQ ID NO: 386231 - DNA, 1546 bp, Cannabis indica
atgttcagggtcaatccccaacacactcccacaattatttcactatccagggtcaatccctgacatataccggggtttcaggtaaagtaatcctagttttagttgcttgtcttcgactgctactggttgacgtccaactttccacgtggtagcttgatatggcaaccacagtgggccgatatctactcatgtcgcaattattttacaaaatttctttatcgaagtaattgccccttgtattctcgtgacctgctccctctcgagatacccaaggtgtccattcctcttacggaggagggttataatcttaggtcgctcgagttattgggcagatcaagctgctcataggcatcttcctgcccctttatatatcgttgaaggtgtccttgcgatatgagactttctatatcatcttttaaatgacgacactcttccgtgatatgatcaatatccccatgatattcacactgcttattcgaatctctcttacgccttgcatgtttcataggcctcggctcgccaaaaatgacttcctatacatgtgcaaggtagattgttcccgactttcattgatctcggtatattcaacataaagagggatatagttgttgggcttcttatccttgtgcagccttttggaatcatcttttctctttgatcccaaggcttccaaatcaagctctccaatagtatcgtgccccggtcgtctcttggatttcgtgacttgatgccttctgaacttactctccaactcgttcattcgcaactggagtgaatcctttttctttggaccgagtcattgataaaggtcaggcttcttcaagttcagatgttctcgtagatcactcttgtcgtgactgcgatcggaccttgcccctctcaaagtttgattcacctttttctctctataagggtttgtgcgagtttcttttttatgagcctgaggagagggttgacaattttcatccgatgttccatgtatctcacgttgtgtctccaagttttcttcagttccctcaggttgcatctcctgagagttctgagtatatctctgggttgtccccttccccttggtttgtgagccgcgaggttttcctcgtgaatctatttttccaaggccaggttgattttggggaccatcctcctacgctgcctttactgcagctatttcacgctctaatttggtgttacgccggtttacctcctccaatcgacgcctaagatggcgattttctaattccacgattggtatgtatctggttgggtcgtaggcgccatcctcatcaacttggttaggaagtggccaattgttgtttatccaaggttcgtcaagccaggggccccaatactgggtcttcctggggcttgcaggctgttcatgcgatgactcaatagatccctgaggactcaatggttcttttccaggacgatgattgattccttctcgaggattattttctttggtgtcatccatcacttttatgtcaggaggctttttctgagctttttttacagaggatcttaatgaaagcaccaagttgttaac

SEQ ID NO: 386232 - DNA, 1829 bp, Cannabis indica
aaaaccagaacatttatcaaagagtacacacagttaaaaatactaggtggactttggtctctaaatacctaggacagatcagcaaattagttacaaagtctattaaactttgtaactaactcttttctctgtactccactacaacagatattaaaagccagataatctcaatcacagagtagaacagaaaacatacaacatagatccgaatatatctccagaccagaaatcacacaaattagatccaaaaattggatggttgaaggagacacacattgggtgagttttggagccctagggttagggctcagatgttcaacaccaaaccagggagatcgattcatgcaaaacaaggaggagaagatgattagagattaaactcagagagggaaaaatagagataaaagagggaaacaaattctgtaattaaagggattaccaaaatcatacctttgttttttttggaatctgaaactttgtactcttgatctttggagatctatagtgaatctgaggcgagctcaagaggatgtactgagcaacaatttttgtggaacctctataaaatctggtgttatctcttcttttatttttttgcaatttctatattgtgtgtatgtttatgtgatttctgggttgttaaatcagtttgggaaaggctcgatttaagggattattttttggtttttattgttgttgttgtcttcgtgttctacagtgaagaaccacgaagaataaggctcggtttggggttgattcgatctgggcagtgggatatttctaggttgtgttgcaggtgttcttcgtgttcttcagagaagaacaacgaagaaggaggcagtctcacggctagggttttcttttagttgttgaatgtgtgtttgagaaataaatcaacttatatatgactgatgcatttttagggttttcttgaatgtcataaacgacgtgtagtaaataaaataagtgctgttgtttggtttataagcaggggtcaaaagaagggtttgactgaagggtaaaaggtctaaattgaccttggtcttctgattagtgttgctgtgtgtagggtaataagttgggaataaaaattcttacaaatctattccaaggaattttgaagatgtttgaatagatttcgactgttttttttagaaatacttctcatttactttctgattgttttattttctcttttctgagatctaaggtattcctagggtgtatatagacatatccttaagtcgtgagttcttatcgtctcttgtttatcattttttcaaaagctagcctgtttggctgtgttttaagtttttaatttttaaaattatgtgttttcaaaagttgagaataaaaaatagttgtttatcaatttaaaaatttatggtgtttggtacaagatttttaaaactatttttagattttttcttactaaaaaaaattaatattttaactccataccatgacatgaacccatttgattccgagttcgggtctaggatctgagtcattgagaaaaaaatgtaaaatataaatatgttaaacaaaataaaattgtttttgaaaattgaaaataacattttgatgttttctgttttctagtttttaaacatttctaccgaacgaccttattagtttttaaaaaatatttcttattttttaaaactgaaaacagtttttaagttgcgaagccaaacgaccccttaatttctatgttttgtagagagggcttcttgtgcgaagaacttgagtccagaaagttcttcatatttttttgtagtgtgttgtgtattgttttccttgtgttaattgtaggttgaatacacact

SEQ ID NO: 386233 - DNA, 780 bp, Cannabis indica
tgctatttctggaatcaaggtaattatctaagtctgtttattattttgcatggttcttattgttgaagtatttcacctatttggtcttaactgtttagtatattccatcagacgacttaaaagtgtgctcatgccatgaaatttgcagacaaataagcagaaggagagtccaatgaagggttattctcgttataagaagagttacgagacagctaatgctgcaaagaaggcagccatctccaaagtcaatgccttagaagtcaataataagttgttgaagagcaaggtcgatagctttgactcggagaagaagagctgggatctcactcagttagttctggagtctgaaaaaaaaaccctaactgataaggttacttctctcgaggcaaatttatccgagatgagactagatcatgagaaattggagtcagagaaagacgctttgattttagagcgtaatgcccttctttctgctgatgaggcggcaaagttcgagatttcctccttaaagaccaaaatatatgaggctgagaagacagcgggccagacagagaaagctttggttgatgaaaaaagttctttgtttaaagagatcaaggctatgacaaagcaagttaagaaagcattcctcaatggaagttatgagtccgcttttaaactctattatgagtttaaggtgggtaagtctgttgggttttgtgccctaataaaaacccatttcaatataatcatatttacttattaataaagatcagaaataacattttatgttgcatggtt

SEQ ID NO: 386234 - DNA, 895 bp, Cannabis indica
ttttaaaaaaaaaagtcttaattaaaccaaaattttctaaactaatagattagtaagaaataagtttgtaaaagcacacaagtggcgtccctgagggtcagggcattacatcggatatctacgaggatccaagcttaggaaaaaatggtcaaaaccccttggtctaccagtgacatctgagataggcagggggtacaaattacgtggaaaggaatttacctcttctagaagtactcgttcttgaagttcttacttatggtactctgctcggaacttagactggatttcttcttctttcatgaggggttttggatgatgactttcccaggtagcagcaagaagctctttgtccttagtcgcctttgttatcaaaactgacaatttaagagcgatttgctctttgaggtcactaggggtttgaggttgacctgtaccactaactccatgaatgctttggaatgtggcaatgaggccatattggcgtagcaagttggtggtcaccaggtcctccaccttcagttcttcctttgtgaagggtttgtagaaggtgatctgcttccttagctcatccgtgagtactattttggggacgaattctacaaaaaacaaacaagaatcaaaccctgaaatggaataatctttcaatctatcagagaaattgaggaagggtgaaggttatacctagaattttgaagttcagagaaagtggtgggacacgctgttacgaattttatgtttattacgcaagtgtacgcaatcaagtagtatctcacgcaagtgaggtcgaaccacagggaattggattaagtactactgaactatacttatgattctattcgataaaataataagtttgcaatttgaaagtaaataactcagaaattaaagagaaaat

SEQ ID NO: 386235 - DNA, 672 bp, Cannabis indica
ttttttttattattaataaatgtgaatgaaatatgtggacttgtggagtagatcatgacgggttcgagttcagagcttcttacatataatagtgatagcatacatcatatcatatagaacattcacattataataatttaaagtgacaataggaactttcaagttgtggcgtatttagatacttgttccaactttagtaggtaatgaaactttcaaaaatataagcctatttaaaagtgtgctaaatttgtggcctacttacatattcattccatctatggtagtaatggaactttatataactttaaaaagtatatcttgcatgtttacatgttccaaagctgtggctacttccaggaagagaaaaaactttgcaaagttacggcctatttacatatcctttgcatctttaatagtaatggaactttcaaaagtttaagcctatatttacgagtggagcacataaaatgtaatatttgtattggctccaacttttctactgcatttgatcttcattagtagacttgtgtttcttttcatcttcatcagaattttcatcagtagttttgtgtttctttttatctacatcagtaggttgtgtttctatttaatttgagtcaaaagtgatgtcctatttgttagacatttatttgtatagactaaaacatacat

SEQ ID NO: 386236 - DNA, 1019 bp, Cannabis indica
cttatcggtgtagaaagtacatttactgaggttagcatataattttttctttctgaagcacatccaaaactgaatgcaaatgtcatgcatgttcatgcaaactcttactataaattggaatgtcatcaaaatacacaacaacaaattttccaatgaaagcatgcaaaacatgattcattaatcgcatgaaggtgctaggtgcattagtcaatccaaaaggtatgactaaccattcgtacaatccaagtttagtttttaatacaattttccactcatctccttgtttcatacgtatttgatgatatccactcttaagatcaatctttgaaaacaaataagaactgtgcaactcatctaacatatcatataaatgaggaatgggatgtcaatattttaccgttatgttgttgatggcttgacaattaacacacatactccatgttccatccttcttagggaagagaatcactagaacaacacaagggctcatgctttctctcacatgcccttttctcatcaatccttcaactttcctttatatttccttagttttataaggattacttttatatgctagtcggtttgggattgaagcacctggaacaaaatcaatttattgttctatcccttgaataggtggtaaaccatgtggtacctcctcacaaaaaaatcctctaactcttgcaaaatacaaacaacaacactagggaatgaagaatcaagttggttagtgtttaaaatagcctccttgtaaatgaacaaaatcatttgctttattgtatgccaagctcgcgtaacctcaatttttttgcataaaaattattttgttttctctctaattttccctaattgatcaaactcttctctttcttttctctctcacttgattcgactattttctctctttgtctctcttttttctcactctcattcatctttacactctccttcttttgctcactcaatttctttttatcactcaaattttgcaacctcacttggtcttcatagacttgttt

SEQ ID NO: 386237 - DNA, 3026 bp, Cannabis indica
tggggtgtgaacctttatttctaatttatctgacgtcggatgaacgagattttacagatcgattcatggcccaatcttctttcactattcctctggctagtgacagtgctatggaccgtttacactcacgcatataaaagactaggacgactcccaatgctgagaaggaggttgttactactgttgctccttcttgtccttctgtgacagctaacaagagaccatctctggttgagtaatacggttgatctttctttcccatctttagtggctacacattctgagtttggcctacaccttggtgaggccagtaagctattattcccagaggattgagctcaatttgagaacatcagggaaatagcttctatggagttgtccatctcacgctcctttaaggtatgcatgaatttctatgttacaatttatgtatggaaaaactcacgatattattgtgcctaaccattatggtactttatattgtatgacagggtatgcaagggcttatgtacgctttggatatgatcaagaacatgaaggagaaaatgaaggttatgaggtctgaacgtgatgattttcgcggggagattaaggagctgaagggctgcaagaaagagcttgatcgtgtcaaagaagagttacgaactcaactcaatgctaaggaacaagattctgattgtttgaagtctgccttggctgatcttgctactacccaagctcgtgtggacatgttgggaggtcgattgatcgaaattggactggaggctgagatccagtgtcatggaaaaatggcgatggagtattgagaaaacaaggccgagtcttgggacataaccaagcacattgctaattatgaaaaattgcaatgaatgagggtcgaggaagacactcgaactagccagctggctaactcgtttgaagggatgactacaaacaatttctcgtcaaatgactcatgtctatcttgagttaattatatgtcaaatgttttatatttttaatattgtaatatgaacttttgtcttgttggctaacttgcatgggtctagtaccctcatttcccccttagtctaaatgtaggtcagccgagttggatttagacttagtatttcggaatgatgtttggactatgtggttcgttttatgcactatgcatctgttgtagtagaatgttgtcttgaattattgtttgttcggtgaattgtcatagaaactatcaaatagacgttatatggtcaaatagcttgaatgacacattatcctaaaaaaaatggttatgatagggggctgcactctgtagatctgcccacatacccttttcagggatcaagcccaaatatagttctatctccctacatgaatatttgtcagcaatagtgtgttgagaagagtgggtcttataagaccgataaagaaaacaaatgcaaagagaacagaccaatagtttggggtttaagtgtgatactgctttaggtgaatagcattccagctattgttgatgtctcatcatttgtccgtttggagtttgtaagcttcattgtcgactaccttagtgatcaggtacggccttcccatgttgggcctagcttatctgctcccgctttcttggtgttttgaaagactctccgaagcacccagtctcccaccttaaatgaccgagtacgggcgttcttgttataatgctttgctaggcactgttggtaggctgccattcttatagatgccctttctcttctctcatcaactatgtctagttcgtggcacatggcttcccaattttgcagtttggtagtcagctcatgtctagctattgggactttgctttctgttgggatgactgcttccattccataggctagagaaaaaggtgtttctcctgtggatgttctggctgttgtgcggtaggaccatagtactcctggcaattcatcggcccatctaccctttaccttctctagtcattttttgattgtgttcatgatggtcttattagacgattctgcttgtccattggcttgagggtatctaggtgttgagaagcttaacttaatgttccagaatttgcaaaagttttgaaagtcgaggctgatgaactgtgagccattgtctgtcacaatttctttcggaattccatatctacagataacatttctccaaatgaattacttctttgtctcgaacttggtggaacgattccgcttctatccacttgctgaagtagtcggtcactgcaagcatatataccttctgtccaggtgcagttggcaatttgccaactatgtccattccccacttcataaagggccatggggatgtgatcgatgtgagacgttcaggaggctgatgggatacttgtgcaaaacgttggcatttgtcacaccgtcttgtatattcagatgagtcggctctcatagtaggccaatagtagccttgtgtgagggcccggtgtgctaagcttctgcctcccgaatggttgccacattcgccctcgtgaagctcagctagtatatattttgcttctgcagggttaacacatctcaaatatggaccagaataggatcgtttatagagcttacctcgtattattgagaatctggctgcctgagccttgactcttcgggcttcattcttatcttctggtagcacatctttttctaagtactcgatgatgggcgtcatccatgtcttttcgttggcaacgccatttacttcttcttcttcttctctcttccagacagcaggccatgaaaggtacaccattgggatcgttttggggctagttttctggatggaagacccgaggttggctaaagcgtctacatgactattattttccctagacacttgattgactctgaactcgtcaaaggtcgactgtaattcttttgttttctcaaggtaagctgtcattttgctatctgcttgatagctaccttgcatttggttgactataggttgtgaatcgctaaagacgttgattcttctggctcccatttccttggctagtccgagtccagtaatcatag

SEQ ID NO: 386238 - DNA, 2073 bp, Cannabis indica
acaatttagaggttattcttatttataactggcccaaatcgggactttgattttttaataacaaattagaggttattcttgaatagagtattcttgaatagaggttctactgtatatatataattttagtatgttttgatgtggaaaattgacttaacaataaatttttattaagattttgaattcattacatcatattcgatatactcgaattacattctcaatcggtttacacaattttcctctcgattctctcaatcaagtttgagtcacttgcttcccgagctcaagtgcaaatctgagggtatttcgacaaagttttggctagtctagtgtgatcaagaatttatcctctttttgaatgagatggtctcctatttatatgcttgaaggattgcatccttccttctttttttttttggttctaatttgtccacgtgtgttaattctcattcgttgttcatcacgcttcctttcctgcctttagaactccttaatcacgttattatgcttcttcccgacctctattttgcatctctattattcagagctctgctctccagtatttgagcttcctgctctacttactttctttagtgaaactgtgtgtttctctttatgtcctgccacattataatatatcaactctttttcctcattttaatctcctgaaattacttatttcttcttaagattatatttatctcttttaattgcccttcgattctataggaatcgagctcttaactctttaatttgagctctgataccatggatggaatcgattactagaaatattgtcccatttcattaatgtgtgttgattgatttaatgggtaatcatttaaattttttaaaaaattatccccgccctttctaatttctcgaatattattactatttttattattgagttttaaggaaaaatttttactaggaaagataaaagaattttttgtaactttcgtgttttccttcaaatcgctaatttaatttatccttcgctatatgcttcctcttaaattttgaaaccctttttgctatcttaggctttatctcgacttttaacaatgacttcaagatcctccaagaccaagacaaaattcgttgagaaagtttctcctgttacggagccaaatttcatgactgaaatgaatccatcttcaaggatatctgcgctaactaaatgccctattccaaaagggatcacttttcgtctgctaacaaaagaagaactagataaagatttgaaggaactctaactaactaaaagtgaaactctagttagtaggacacacatggaactcgtgaggtttcatatcccccctcgactagtttacattatttctcttactgaggtttctttaatcaactccttccgaatgttgttcaaaaaaatttgggcatatctgcagtctgtgctcataagtgtacttcgttccttactttagatttttttaattacttcaatagaacgtcatgccctaatctctttcctacatggtactttacagcaaaaactcctaattattatacttccttcaaggtcttccttcttcaaataggaattggaatacctttgtttttgtgattggcggtaagcggtttcccaaggttattaaccctaaggcttttcctattgtcaatggtatttcaacaacagaagggaaagagttgacatcaactacttgatcattcacaatagaaacattagttgggagaacttcaatagaaaataggagggaactccaacaccaaaagatttcttttaattaataatttagtagagaccaaaatctcaagctttgctagacatcttataaaactacatactaaaaaagcttttagtgcttctcctcctatttatgcgacatatttttaattgatattgattattatgtccgatcttatgtaagttagtataatataaatacatatctctcttaaattctcttaaattaaatatggatatataatagaaaatattattttcttaacactaatataatttaaatttaaatttactgaacatctaaaaaaaatgtatttctattattattttttttaaaactt

SEQ ID NO: 386239 - DNA, 3520 bp, Cannabis indica
atacaaaataacttatgatatcatctaactatgatcaaatgactcttattaaaaattaacacaactgttaaactataagtttcaaccacatgaataataatataaaatatatatatcgaagaattaagaaaaataatagaaaaacttacactaccaaaaataattatttttagtcacaatataatttttttgagattaaatgtaatttctagtcacgacaaaaaaaattacttgtgacgaaaacataatatttagatacaaattgtcattaatttaattttagtcacaataagtattgtgactcaaaatatatttagtcacaataaattgaaaattttgtttctaatacatttagctacgaattttatagtcacgcaacataagaataatgatttataattagtcacaatttttttacttttagtcataaactttattgtgattaaaagtacgattttttttgtactgttagtaagtaaattaagcataatgtaatttaaaagataattctagactagcattcgataaatgacttttcgccatgttattagcatagaaaatttgaaaattaattattttatatttcagcagctaaatcctcttcactatcatttcagttgcatttaatctttcaaattcaaattttagtggtaagaccttctatcaagattgagttagttatagaaagagtgagtattagtttggatgagtcaatgttagttttatgttagttgttagagtatcattttcaattagtgtttgtaactaacttactaactgtaccgagctatatatatagctccaccattgtaccttttttagtagatcaataacattgtacacaaagcttgcatacgtagtttttctctctttcttttcgcaactaatatggtatcagagcaagatttctgagtaaactccattgcatctcttttcttcttcttctccttttctccatggcccgaggtgggggaactcagactggaagctcataagagagttctaatagatggattcgaatgttcgaccctactttaatgaagctcaaaatccttacttcatgtcaagctgtgatcatcctggagctagtttggtttcaaagattctcacatggtgtgagaactacaattcatggcattgagccatgagagtagctcttgtggccagaaacaagctcaagttcgttaatagaaaacttcctgctcctgaggaagatgatgataattttaagctatggaattgttgtaataacactatgatttcatggatttttcatgcaatttcaagtgaaattgctgaaagtgtgatgtatatggataatgctacacacatctagactaatcttgaggaaagattcaactagaaaaatgctcctcgtgtgtttgaagccatacatacaaagcgatccctgggtcaaggttctaaaactattactaattactttactcgactcaagtccttatgggatctgattcaagagtatcgcccataatctacatgtacttggggtgccatgaaaacggtctaagaataccaggaagaagatcatgttcttgaattcctggttgaattgaatatgagtcatacagtagcagtcaatctcagatcttgatgtagatcctcttcccaacatcaatgaggcctatgcttttgttatacaggaagagagccaaaggtgtttgtcaaatgttcctactgaggatgataaaataagatttggatctagtcctaattctgaacaatctactggaaatgtccagccacatcacccaaaaatattgtgtactcattgttgcatcacaagtcacacaatgtctaagtgttttagaatccatggctatcctcctagtcgcaaattgcatggaaaattccataacagataatcaaagcagaaataacttaggaaagctttctgcagcaaacttttcagctaattttgagaccaatgggaataatggagatagttctggtagggattaagaccttatttctagtttgtctacattatagtgtcaaagactcatggcattgttatcccaaaggaatccataaccctcatccaacccatcaaatgagcctccattagtgtctcatttctctggtaagaattccaaagtttccaattctaagtggattattgacactggtactactcaccatgtgtgcaataatttttctttactccagaacacatattttgatccctctatatcatttgtaattttccaaataattagtatactaaagtgaattgcaatagaactgtccatcttttacctaatctgtctctattaaatgttctttatgtgccaaattttcttcgcaatctcctttctgtgattactcttactgactctagaaactattttttacctttcactcgcgaaatataggacactttgaagaagcagatgatagggatacataggtgaaagaatatgcaggctttactatctaaaatctgatgttgccagtaacattccttttgttttttctatttttgttaaaaaaaaaaaaataataacatcagatacagtctggcattacaaattagggcgttcatcttgtattaaaagtcattctttgaataaagccttgtaatttaattcaaatatttctcatgacttttattgttctatatgtcattatgctaaacaaagaaagttaccatttgtgtccaatcacaatgttacttctgctattttttacttgatccatgttgatacttggggtcattttaatactcctactattgatggctgcaaatactttataactattattgatgatcatagtagatacacatggatttatttcattaaaatcaaatctaaagctcaaaaggttattcttaattttttacaacttatcgaaactcaatttggtgttcaaatcaaaggggtaagatttgataatgttaaagagttacaatttacatattgttttagctctctaggcattattcattatcactcatgtgttcaaagaccccaataaaattctgtagttcaaagaaaatatcaacatctcttgaatgttgaaagagctttattatttcaatcatacatctctttgtcttattgagatgaatgtattgctagtgttgcttatctcatcaacagagcaccaactctcattttagagctcaaaacacgttttgatattttgtattccaaatccccatcttatgaataccttagagcttttggatgccttgcatatcttccattctatctcagggcagatcactaagcctttatacttaaatgattatcactgttatctggcttctcacaatctctctgtctcctcaaaggataacatgccaaccactgcacactctttgtccaaggtgcttgactactccaggctatctccaaaattttgagttgatgttctagctatctctagccatcaagaaccactttgcttcaatcaagcaaaaggcattcctgagtgggatcatgcaatagacactgaaattgatgccttggagaaaaaaccacacttggattgtggt

SEQ ID NO: 386240 - DNA, 660 bp, Cannabis indica
tcccatctcgatggtctctctcttcattagtccttctctccagatctgaatattcactggttcgcacgcagagaagcagggaaagagggagttgggcagagagagtgaaagacaggagaggcagaccaggcggtggttttctttgataaatcgtagttacatagagagtcgggtgaaccaggaaaaaatggaaagaaaaaaaagaaaagaaattttttattattaaagttttattttttttgtaatttattatatttttttttgtttgccatgtggatattatatttgccatagaagataatatagtgattacgattggccacatagacatttaatagagtaaaatagaagaaatagtggatttgcaattagaagtgaacttaatgtagttttaccaaaaaaaaaggttaagtgtataaaatataaaacataaagggtttggccgcaaatttctcttaagtttatattaaaattgtctcagtaaatttatacttatataatttaaacattttatagtattttgacatataattttttttataatttatatattaattatgttttgtatttgaatatttaaataaatatttttaaaataaaatataatttaataaatttgttcattttatataattaaaaaaatattaaaatatatatatt

SEQ ID NO: 386241 - DNA, 2255 bp, Cannabis indica
gtcaaatttcgataacgaaagtctgacgtggatgagagttaaggggacacaatttggtacatgtcaaagtttgagccatgtttggtagatatatatcaaagttcgggggtatgctttagtacatggacaatcaccgcattagcaaaattaaataaaattagacagaagtctttaaatccaacaatttgaatatgtcaaaattaagatgacaaaaatcctaatcatgaaattgatcaatactatactttagttacaagtaattttttgttatgactaaaagtcacatttagtaacaaaattttcatgttgtaactgaaaggttgtcactaaaagtaattttttagtgctcttttttattttatctatgtttgctaatactgattatatattttgaatatacgttatatttatttatatatgtatatatatgagtaggtgggatatgtgtttgattgaccaactaccagagtacattcaaccatgttacaaagaaattttgaatctttccactgaaattggagaatttactaaggaaaaatcatattgccttaactacgctaagaaaggagtaagtccttaaattaataatcaattcaatacaattgtatacataattgaaatgttctaactaaattatatatttttttaaattttattgaagaattaattaaattaatgattaattttcagttccaagagctagtaaaagggtactttgaggaagccaaatggttacaccaaaaacataatccaacactagatgagtatatgccaattgcacttgttactgctgcttctcctctactcattgctatttcatttattggaatgccaaatgttgttacaaaagattctatgaattggatcttttctcatccacagcctaaaagtgtacggactctgtcaatcgtcggtagagttcttaacgacattggcttttatcaggtatatatatttgtaaaagttaccgatcactaactttattgttttgctatatgacaatttggctatatattttgcaaacaagaagataaaataataataccctgagcctaattttttggttgaattgtttttttattcgaactatgtaccctaaacttcttattccttagctctaacaactgtgcctcaatttctattttgttcctaactcgaaataagtttgaacaaaaatcgagttcaaggaaccattattttccattttgtagggtttaattaagtttttcatttaacaaaatagaaattctaattagtaattttttaaaaaaaacaatatagtaaaatgatatttacactaagatttattatacctaaattagcaatttatttcttaatattgtcaggactttacatataataaatttctataatgtttcaatttttcgaattgaaattcaaacatcgtgttaagaattttcactacatgttaatgggcacaagtagtatttgtaacttcactttgtgttaacgaatcaaaatctacacgaaatgaataggtgtaatttttttttaaaaatgagtttggatcatttccgagtagtatctgtaactctaaactgtttttctaaaggaaacaaattgtcaatgcaaactatttgtgttaggtgcaaaattatattttgtcaaacaacattaatataagtaaaatatgtgctatttaattaatttataattttatacattgtatatgttgcagtggagggaaaggagaacagagaaagtagatttctcagctgtgaattgttatataaaacaatatggtgtcgaagaagaagaagcaatacaaagacttaaagaacaagttagtgattcatggaaagatctgaatgaagagtgtctctatcccaacaatatgaatatcccaatgccacttctaatgcgagttcttgatcttgtacgcatgaataatgaattatacagagaaggagatggttttacaagagaagccttcatcaaagatttgattgattctctcatcatcaatccctacatccaacaataattatttatataatagggttttattaactcgtatcgataggaaggggctattataactagttaagagcactctcaacagtttctttactctattctttaaaatacattaccaattaaaactccactttatttattttacctcaaacttttatactatatcatatatcaacttctctatttttttttcttaatatcatttaaatattatatttttaatatatgttattcattttatattaataattcatata

SEQ ID NO: 386242 - DNA, 5994 bp, Cannabis indica
ttcatctgagatttgtaagtcatcctatccaaaatgtgtaactataaatcaacacatccaaaatgtgtaagtcatccatatttgagatgtgtaactcaactcatcggagatgtttaagtcattccactagagatgtgcagttcatctattgagtaattagatgtataactcatctaagatgtaactctatcatatttctactactctaaagaaaaaaaaatctctatcatatttcttttacaatgggcttttttttttaataataaattggacttgcaaattaatagaatgaaaagagagaaaggaattaggtataaagagttgagtgttcataatcaatagtaaaacacaccatgaattaactaatgccaagaagaatgaatgaagagatgagcatagagctcatcaccatttagaggaactctcttgtctaattttttttcttataaatagtacaaaataaaaaaagtatcatagtgtatttttgcaagtatttttgtttgtttattttgtttatcatagtgtatttttatatagtaaaacatttatttaagaatactttatgcaagaataatttttaatttgtttcgaaaaaaaattaagtttcaatttaagctaattataaataagaatagcatctaaatcgtaattagttatatattttttaagtctctgtagtatagttcctctaaatgaaaaggtatttaaaaattgttcctgaaaagttaggtatctcctggatgttgttctcgcacaactaacttgtccatctcggaaggagtcttgtgaaatgatagttgagtccagaaggggttctcagatgactatcatttccattccgggttcagtcttcaagatagctagtcctcctccagaaaggagtttcagaccactagttattcttcttgaaagtttattctccttggaaggcaattctagatagtcgaatccaactgattctatcctatctggaagcttcttcagcgagtgtctttggtccgtgatctcgaaagcacacatacgttcccagatatactaagactgatgctgacatggagatctcgctcatagaaaagttggttaagttagtcattgtctaactagcttaacaacttcgattcttacaaccactgactttaggatcttgatcctaagcctataaatactacattggcttgtctttttcataacacgagagagaaatagattgagagatagagagagaggtactgataatagagagagagttttgtatgaagaattttgtagatgaagaaaattcttgggtaagagtgtgaaagttaaaacactttgagagaactcaacagagaatctatcttgactgtaatgtacttgttcttgctcattaataaagaggatttcggtggtttttcagaactggtgtagagtcttaaattacatcgatctatcggacttgaaccaatatatatcttggtattgatttctttattttctgcatttattgtttctagttttccatactctgttcatccctgttttttgttcgattattattcgtgatatattaatcttgtcattactaattgtttgtttaaagttttgataatttgacttttcactgttaatcgtaattttcccacagtcttatattaataaagtatatttttatataagcattatgtaaaattaataattttattctaaattataatacatgtatatgtacttaaaaataattagtattaagaatcatttattagtattgttatattgatatttttttcgtatttttttagtataattttatttagttataattttttaattagaatataatttatttagtctcaaatatattgttggatagatatgggaaaatatatatataattcatatatataatagttgaagaaatctaaaagactttaagcaaagtagtgacaaattacccaaacttttgatttgtcttcttatgaagatttattatattgattcaaaaaaagataactcaaactcaccaagtctttaacataaaaagggtatttattcatattattattattactcatggcgccaaacagaaaaaattacccaaacttaaaaaaaaaacaaaacaaaaagcaaaggaccatgtggcaagtttcactattaggtacattaggtaatgttatacatgataatgtataacattacacattgttaattaatgtacttaattaagcactaacagcagccctaatcccctggtgggaggtggtgaaaagagaagactcttctctgttgtacttgagcctcctagcttgttctctcgagatttggtatgagttggcgatcacatcctccggcatagctctcatgaacgatatttttcccgccaattggtttacttgagctctgtcgtttgtcttaaacgacacccattcaaatccttccttctcggccattttcacaactgcaaagttttggggtaccgtcaaggcctggccttggcgaatctcaccttcgaacactgatcgtccgttgttgtccacaacttgacacctgcaacttccccttatcgcatagataatgttgtgagcgttcatggtgtattgtggtgcgtacattgcgttctgtaaattaattacaaaattataatcaattaggagtacaattaagaagcataatttaaatttacataattcaaataaaataaatatttaaaatttagccgttaaacactacaaaaagtggcatacttaatattgatacattttaatatgggatcttacaatttaatatttaatagtaatattatcgatatatcaggtctcacatattttaatataattatataacataggtgaaatacacttactttgtagaggaaacctctctccgcactgagtcggaggaagctgaggatggggaggttgtagctgttaacggtggtgaggcgaccggcctgaggactgaagacatcagcacgagcagggtcacccatgctctccctaagcctcattgtgcaaatattctcttccaaaccattataatcccggcctgagaggcgagcgtgctctctctcagtctgttgcaactcttgtcggcgcatttcctgctcttgttcttggcgagacctctgtggtttcaccaagtcaagcttgccttccactctgatgatggaacccctgaaatcgtcttggttttgaatcttcctagcggtctcagaatccacattgaaagcttcctggatcaaattgacactgaatcccctgaaaacgttgttgggcaatccttcttgctccttctcttcctcgattcgctctcgcctttcctcgctgtatcgccgtccttgttgtgtcatcatgctttgtgggaattcctggtgtgggttaccagcaatgtagaatctctacaaaatgataaatgaaattaaaattaattcaattcaaccatgcatgaaaaaataatgaattatgatccttaattgttcttactcttggagacatatcaagttggttttggttgttgataatgtggatgaggttgacagtgatgagaggttggtcaccatcattgttacaccaataagccattccagctggaattgctatgatatctccttctttaatctggcgagttttctggtgacgatctctctggcttgaccgaccaccgccaactgatacttgtgcctcttcaaatgtctcggcgcaacctgggaacaatgttcctagaacacctctccctaagccacaaaaacatacacacaattagctatgatcaacttttttcaaaacaaaaatactaacacatttatatatacctcggatgacgtggatgagttgagggccattggtgtaagaaggcaagtgaaggccattaggctgaatggtgagacggagtagagccacgccggcgcattggaactgctcgtggttcgggttccatgactcaatcatgcctccttcacactcaactcgatgatctggctcacgggcttcaagcctgttgagctgacactcgttttggtctccgtacatagctgttcggcttctagccgagcagccatgaaacaagacgagaaaacaaagggagagagagagcaaaagaggtgttgaagccattttagttactatattagtttagtttgtggtggttttgatgagtgaaatttgtgtttggttttataggtgaagagaaagaagagttgaaaagacacgtatggagttttggggtaaggaatctatagacaactcttcactttgcatgcatattataattaaaccccttattgtttttacacatattatcaatttttttgagtgattttcatatttggttatatgatgacaaaatttcatttgtatttattcaattttatttacatgcatgaaatagctctgtcataaatctgcattggcacttcagcacccttattattcactacctttctcaatattatttgaaataattgtattagtacttatgtcaatttctattttactttttttagcctaattaaatttgatcatttggtatgtattaatgtatgcatttgatttagattaataacttctgaatagaaaatccattgcatacatattgagagatgagaacacaatcatcaaattagcatattagttccctgttactctcgtgagaacaacactaaagaaaactcgcggcattaaaagagacctcgcaatattaagtaaaagaatctcgcagtctcaatgaagacaccctacttatttagtaaaactgtggtatcattagaaaatgtgcgaacacacaccaatcaacaaagattacagtcaagcatattcaagtgtcattaaggcaagtgttataattattttataactgatgtagtcattatgatcgaattattgtaacctcctactctctataaataggtgaatcctctctgttccgaagaaggggctgagctaatctgaacaaagaaaatacagaataagagatttttttttaacagtggactaagcaagccgagtactcgttaatctaagtcagtacttacatattattggtgttatccaaattttataataagatgtcttttgagtttttctagatggtctaatctagtagaagaattgggttaagaagatttgactgggattatatctctaataacatttagtttcgtaactcaattttgaacatgttgagaaactggggagtatctggtttgaacttgtaatttggctttcaaattaaagacccaaattttacaaaacaaaaaattggttactttctttttttcccaaaatagcaaatatagcagtaaaaatcaattgttattgatatgatgattcttaatcaatatagctagtgacgcttgctgctaaaaatgttaaagtctttgctaacataaaagaagaaaacaaattagttttctcatatatttcattgatgaaacagctatagttaattgtgtccatatattctttgagctcatcgcattaaagttttcagcttttgatgaaaaaaccacttaagttgaaagggttgaaacatcataaacaatgtagttgtcaccactcaccaataactagatttggaacaaaattcaggccatataatatagttgtgaatcgaagcttgttgttacttaaattttgtagtttttcttccatatttctttggtaggtattaagctcaagttcaacatataaaccattataacacaagccttgaaaatggaaaatggaattaaaaagaagttcataaccaaaagggttctcataacattattagattttaacagtgtaaacatgaactttcttttaaaagtacaaaaaagtaccccaaaacgctacatgccatatataatgtatatcactacattatacactactgcactatatatttctttctattaacttaggcagtagccctcctctcgtaccggtcctcgcggcgagaggaagtggatgaggtcaagaggacggtttcctctcggttgtacttgaggttcctagcttggtctctcgagatttggaaagc

SEQ ID NO: 386243 - DNA, 902 bp, Cannabis indica
ggataacatttgccccctaagtccatgcaggaacttcttggttgcacatggacttatttggtcatgaaactaattggatgggtgacgtcctacttttactcttaaaccgacatgactgatcgaatatctcttcgatgtctgaagcatttaatgccttatcttggaagttgtacctcgagacatgtaatgatggttgtacaacaccgcgtgcgtgacatctgtcttattcaatgggtactaacgttcctttttaggggggaaaacccaaaaattcaaatcttgaattactttcagctttttatcaacatttataaggaataaaaattggctatacactcttttagccgtttttaatcttgcataattagagaaaaatcttttttttttccacttaaaatttttcaaagaaccctttgttggaaactcaattgctggagccttccaaacatattcaggagtttacgaacagtgagtaagttatcttttcttctcttttatgcaatttctttcaaattcttacattatttttttaattttttctcttctgtaaaattctaggtttttgaatctgtttttgactaatttgagacttagtagatattaaggccttttacattcactgatatacgcacgagtcttttagacttcctaatttcttaccattttggctagaaattatctaggattactcatttattggcttttgaatatcaacattcttttaaacttctaggtttaggatttcatcattggaatgaaattctttcctttttcattgaatcgacctggtcaacatatcaaatatgttttaccttctatacctccgtccatttctcaccttttgtcttccttcttttatagatgaactatgtgttgggttttgtgtcctaaataaaacccat

SEQ ID NO: 386244 - DNA, 616 bp, Cannabis indica
cattgtttgattctagtattgaaactgccagtaattccttgtccccaaacagccagcacttcaacaccgtttttaatctttgctattaaattttgttccccagaactattccaagagtcttcaaccaactgcttgcacattggttcgagaatccaggcattttcaaacttgaaacgcttagagatagcccgaacttgaaacgcttagagatagctcgaacttgaatagggtctggttccaacataatgggacaatgatcggatgtggagacttctaagtttaaaagctttgagtttggaaatttattaagccaattgacagaaaccaatgctcgatcaagacgtacctcaatccagtttgtagctccgtggtttcgttcccatgtatacgggtatcccatgagttccatatcaatcaatccgcacctatccactactcccttgaaaccttggattagccaattaggatatggtttcccacctttcttatcactttgactgagcacgttgttcatatccccaattaagcatcatggcaaatctaaccttttagttaagaccttcattaaataccaacgtaagtttacttttagttacctcgttaggtcgtcaccgta

SEQ ID NO: 386245 - DNA, 557 bp, Cannabis indica
gcactaccatgacgtagcacggggggacaaaatctgatcctgagtcagtaaaaggtataacagtctatggagtgatatttgtaagatgttgatgtggccaacgtctctaagactctcatcgtcttctaggttctttaccaagggaagttaatctcgaaggccatcacctctccttgccttccaggtttgggagtcattctttttcttgcttacctcaaataattcttgttgtggatatatccttacatctgatcatgccatgtgtcttattaatgaaaatttggataacatttacccccaagtttttgagatcctttggatcatgggagcttgctattgtttttggtgttggccgttgacacgtgttgcagatttaggtcgcagatacaccccaacatgagttgtattctattgagggtatatactgttgggttttgtgccctaaataaaacccattttaatataatcagatttacttattaataaagattaaaaatcattctatgttgcatggttcacatgatttatttcatgattatatttaatgtataaattct

SEQ ID NO: 386246 - DNA, 3520 bp, Cannabis indica
gatttatatctcaatgataaaacaattgaaatcaatccaccactaattgatgtcgccgttggggacgaaatcatatcttctcgtacattgactatggatgaccccgatgactattgatgataattttaccctttagggactatctattgttggggaacctgaatctgatctagctgtactagaaccgaaacttgaacctaatcacaaccaaagaagaaaaaaggtaggggcatataagggtttgaagcatataaaaaataagattgaaggaatactcctcgaaatcgagtacaaccaatggggccagtgctttggggagactgcaaatgaactggttagccatattggcttgtatgcaagacggactcttccactggcatacaatgattggagaaaagttccaaaggaatttaaaaatacattatagtagtacatcaaggtaatgttaatagccaaaattaatttagcatatgtagttgaatatttaatgtcattctaactatcattgctaattcttgcagtcaatgttcaagttaggcccagaagataagcattctaccttaaaaactattggacaaagatggaaagaatggaaatcattcctaacaaggaacctaattttcaaatataaagataaagttccagcaattctcgatcgtcctccagatgcttatgcttcatgttacaagcccgcagtctggaaagcatttgttgccaaaagatgtagtcctgaatgggaaaaaaagagaaagaaaatgcaagatattaggagtaaaaatacatacaatccccatgcaagccgaggtggtgttaagaaagttgaagaaaagtttgagaaagagttgggccaccaactcactatagatgacaaggcagacttgtggattagaatacacaagaacaaaaaaggcaagctcgatggccctgctcaggaggttgctgatcggattgtaagttccatttatcatatatgtgcttgatcaaatccttaaacacttttatgttgttcaaattcttactaattttactttcttaaatgtaggctaagatacgaaagcaagttgaggaggggatagtgttagtagaaggctcaaaagacatactctagtcttgggaacagaagagcatggaagacgtgatagaggaatgggacgtggcgtcacacagacacagtttttcgaaaccccacgtcctaaaagaaagagagtcaatgataatgatcgcatgagtgaggtggagaagtgacttcaaagtcggaggaacagggtcgtagacaagacgaattattaaagcaactcctccaaatagtccaaagcgaaagtggtgttgctggaacctcacatgcatctagtttatgtgttgagggagcatccaacaaaccagcttttgctgctgttacctcagttctaggagcaacacctgctgcaggggcctctgctccaccagctgccacgtcctctactccaccagctcccaaggcctctgctccactagctgccatgtgtgatcacactgcttctgttccaacaccaccacttgttgctccactagccacaactagtgcagctgctccaccagcaccatctccggttacttctgataatgtattatttacttgctttttaaaataattttcattatgcatgcttcatttctttttaaaataaatttttttgtctcttgttttgtttgcaaatgaagagattgaggtgtgatatgtacgtgattgatccaaagaaaaagatccagtcttagttgcatcaagttatgtgaaacttgaaaggcagacaactaaggcaatattagaatacatggagtaaaaaagaagtttgttgattttaaacgtgtctttattgagaaggtggttgaagaaaatgccattctcccatgccctatagagcatgaaggcttcaacacagttggtttagctgtgaacaattttgtagcttggccaaagaacctaatcaacatacatccagatgattttacaaagatatttcataatcagttataatgcattttgtttttttctctatgctgcacattgagtcacttctatagtacttggtattttttagagtagctattattagattttgaaattgtaattaattgtttgatgtagatgaaaggaaagaagaaactttcaagagattatatagctccaccgactcagccaccaatacacccaatgaggttgaataagcagtctgtcaaacagtacattctgcctgcaaagacacaattattgcttggacttttagagattgtgaagaattggcctgctaagaaatcaaagagatattatattaaacctgaagtgtttggagaagaaggccaagaatgttggatcagcgtacacgaggtggaagatgtgtgcgagctctagaagattggaaatactattatgtctctttggtgcaggtataatagttaataactaagttaatatctgagctaaaaattatattcacaactatttattaataatctattttaatttagttatttgcaagaacacacacttaatcttggtgggttgaggagtacatacacatttaataatcctgcttcagtagcacctgaagctggtaaactcgaacaacattcagagaatctctgtcagcgattgatgggtatgcaacctgaacaatggttgatatgtctatggaattcagagtaagtatgtttttatattaataaatgtaacaaacaaatggatcgattagtgagttgactgaattaacatgttttattctgtagtgaccactggatgacaattatgatccatgccaatactgaaagtattgcatatctcgactcgacgaatgactttatcccaactgatattatgaattgtatcaaaaagtaagttataattttttaaatttaaattatgttacaaatcaattaattaattaatttcttttttgtttagtgttgtggacatgtacaggttccgaaaaaatatacgaaataagggtccagtaaaaatcaatcagtacatgtgtcgacaggagccggatggagtacaatatgattattatgtaatgaagattatccagagtttcgtgacggttattaatctcgtttttgaaaaatcatgtaaacatgaatgactcttctttatttagttttaattttaattatatgtttaatgtaatgattaatattttttatcttttattttacagtttaagtcaggcgctccctatagtaacgaggagatcaatgcagtatgagatgagtggaccgaatttgtgaaacctttgattatagattaagtataaggttactacttttgctataatacatgagtaacaagtttaatgattgttgttaacttttacatatgtaatttgtttaatttagcttacgatatacatggaatttgagttttaggatcgattctattaacaattttagtattatgtgaatagttaatagacacaattactaattttatataagttttaaaaatgttattttaacttttttgtattatgtatatactattata

SEQ ID NO: 386247 - DNA, 1153 bp, Cannabis indica
aaaataaaatttaaatattaaattggaacacgtatttgttttgttttacgttcgtgttataaattattttaaattttacttttaatgctgtaaagtatttgaaatttttttaaaaaaaatattactattaaatatcattagtacttaacaatttttataagtaatatcttataattgattagtaatatgttttaaacattattttcttaagttatataacgattaagttatatgaaggtacgacaccttgttaattaagcactaatgatactttttttagcaattctctcttttaaaagtatatacaaataatgtttggcatccaaatttgtcgaggagctcctcacctttcacacctcttgtttgctgatgatagcatgttgttctccacagtcactccccgttctagtgatgccctcaatgccattctgcatctttataatcgtgccacgggtcagctggttaacagggacaagtcctctattcttttttctacaaacacttctgttgattcccagcaacaatttcgacaatttttaaatctcactggggagggtttcatcagtaaataccttggtgttccccattgtgcaggcagggtcaccaattccgtttttcattatctcctccaaagtgtttcttcccgtctgaattcttggaatgaccgatcttttttgagagctgggaaagaaactcttatcaaggttgttgttcaagcaatcccttcttttgctatgtcatgttttaaggtgcctaaatccacttgtctaaaaaatccagagtgctatagcaaagttttggtggggatctcagggtattagcaaagtccactggaaaaattggtctgccatttctgtttccaagttctttggtggcttgggctttcgtaccttgacctctcataatcaagctctgctggccaagcaagcttggagagtgtggactaatccagactctctcatccattctatcctcaaagctcgttattttaaacatactgatcttttgaatgctaaaaggattattccccattctagttgtcctgtttgtggtaacagctttgaatctgtcactcatgccatcctcggttgtgttggaaattaattttaccaggatctagatttactaacaagtatgttggattaacaaccta

SEQ ID NO: 386248 - DNA, 2873 bp, Cannabis indica
gtgagggtgatactctaatgtgagtagtacttttatgtatgtttggtgtctataactaaaaatgtgtatatttgagacatgtttagtgtctatattagtgtttcattttgatatgcttgatatcaaaattagtaaaatttgagttgtgtgaaaattaatcttttatgttttaagtttcaaagtttaagattttaaggagaaaagtgatacttaaaagtgggcactatattttgctagcatgattcgcttggaatcaaaagtgtgtagttaacaaatcgcttaatcttcatacaagattaaagcatgaatttttgggatggcacctaaattctcttattgtattcctcattgatggaacatatattaacagtagtaaaaatataatcttaagttcaataagtaataacaagtcaatagagtgaatttgggactcaaattgtcccattcataaatgagtacatatggtgaaaattgaaggttaaaatcgaaagattttttaatggagtttaatcttagaagtgtataaagaatagtgagacactaaaattctacctatatagactagaggcggtgcctcctcttttaagaattggaagtattttctagagagttcatgaattagaattttgcacatggatattaacggtacaagagcgagacatgcgttctcaagtgagcattagcaagggtgtgggttattgccaatttgtattaaaagaatagtgatttaatgctacgacaactaaaaatttattaaatttggtggtaactacactaaaaaaaattaaagtcgaaagatattttagttaatgcacttaagcaagacttctataatagtgtatatttagtcaatcaaggtagaaaaatattatattttaatgtaatatttttgattgattaaatttatgttacaaaagttgcaaatttgttattaaagagataatatttaatttagtggagattgttatattatttatgaataatataatatataaattaaatatatgtaataaataaattatatgtaacatatgataatatatattagttgtcattattttatagcatgtggggagttacttgttgctattagtaacctccacacacgaccgactttgaaatatagtgggtcataggaaaaaaaataattttgagaccttatttagaaaaaaaaatgtggtatttttcaaaattagtaaaatatatgtatatatatataattttaaaagaaaaaaaaattgggcccatggattaggtgggccctacgcacatgtttagcccgcctatgcccaaggctgggtctctctccataattatcactaatattaagagtttaaaattaggtgttacacgtcatagtttggaattcttaaaagttataggagttacaattgttggagaatgaattttatacttatttattgagtctataacctccatgggaggttatgagttagaatttcaaatggttttatcataaatactatataaaaaggtctaagatacttatattgagaagattaagttttctataaaaaaaacaatttgctagaaaatcctaaggtttgataattctcaaagttgtttcttagagagtttccttggtgcttagagatagaaaaaataaaattttggacaaaggtgataatatattattcaagtcatggtgatcctctttaatctacactcaagattgtaagtgaatgtatatatatattcttctctagtaatatatattaattatataatatattttgttcatattcttcttctatcttccttatatatgtatgtgtgtatagtgtattgctgttgtaatatttttttaatcaatcttttagtccttgtattatattgtaatagtcttgtaatgttttgattatcttccattataataaactctctaatatcttcatcaaagatccaccgtcgtccccgatcaaagatcctcctctaatctttcagcgacatgtaggaatcgattctcatggtgagccaccataaacaccaaaaacagtctctcgaacacgctcataaccttgtacgccaagatccaatgacatctctgtcttctctggtattggagttcttcgagctccattcatagccgcaaatttaggatccacaacgttcgatgaagtcaagggcgccttcttcgactttgatggtccgtgagctaccatcatcgccatacatcgagcaggcatcaatctacttcgatcagatttaacataacatcactgtcggcgagatcgacgaaaggcttctccattggcttcatgattctcacttgttcctcagaactaccaatgatattttcgacctccggcgaaataggcactgcctgagctaagggaaccagagttttctcaattgatgagtaatatagctcaactctaacatctaattcctctttgagatgcacttttattgcgttcaattgagcatctaagaaaccgatacgcaactccatagatttcaatgtggatctcacaaatccatgaagctcttcatcaaccattttgccgagctctcaatgaaagcatcaatgatagataatagtttctttgagataagaaaatccccaaatctattagaaagaataagtgtttgcattttgctctgtatcaattcttgaaaaagtgtgtttacaaacctggtgcattctataaagaaatactatttcctctatgtgaggtaaactgttcttaacttatcaagtggttccttaagctattatttttcttgttcgttttttgtttctgacaaaattattctcttcattgacagtcgaaaacgtgcaatctaagggaagctgttattattgggagcataatacaaaaagtttctattcctcttcttcattcaaggtt

SEQ ID NO: 386249 - DNA, 2769 bp, Cannabis indica
ctattatgtgaggtgaaaagaatttgctaattttcatggaaagaaaattagacaacgaaatacatctaatatacagctaacactttcatttaaaagtctagatgctcgatagaagatgcccttagctgttcttcggtctttagatatctttttgaaattaaatattgttgaattttcccactatcaaattgacaactgatttcaatgtgacaaataactcttatggggtcatttaggtaagctatgtagcaaatgatagcttgttcccggaatggaatgtatggactcaatttctcaatgaatctattgagggtcttagacttgatgggcttgaagaatctcaccccattgaggtaattttgtctgcactgtgaatagatactcttacacatatgcctgcttcaactacatatcataatcatattgaagtgtgcacccttttcattattcaggtggaagttccgcacgtgtctcaaattcaggaaatatttgatgcaatcagttataaaaaaggtgcttctgttattcaaatgctccaacgctatattggtgctgaatgttttcaggtttggttacttggtttgttctttcctttcataagtttagctacttcactttagtcatgtcaaataattgtttgtattgttttatttgatctatgtgattagaggtcacttgctttgtatataaaaagacatgctttctcaaatgcaaagacagaagatttatgggctgccattgaggaagaatctggtgagcctgtgaacatgctaatgagttcttggacaaagcagacaggataccctgttatctccatcaaagtcaaagatcaaaagttagagattcaacaggtcattttgtctctaattacagtttgttaagttctattctactgtttgtgaacttacagatcttgtatgttataaatgtagtcacgattcttgtatgttggttcacatggggtaggaaagtggattgtcccaatcacactatgctgcggttcatacgacaaccaaataaacttcctactagaatcaaactctggagctctcgacatgaatgaattcggccttgcagaggctgcaacagctgaaggcaagggcagttcatcactcggttggataaaacttaatgtcaatcaaactggtttctttcgggtgaaatacgacgaggatcttgcagagagactaagatatgcaatagagaacaagtacttaactgcaacagatagatttggtattgttgttgatgcttctcactcacttcaatcttttgtcttgttggtttcgaaaattaagtagcttaaatcttgtgttgtttgttttcacagggattttggatgatgcgttcgcactatgtatggctagccaacaatctcttagctctttacttaccttgatgagttcttactcggacgaatttgattatactgtgctttctaacttgattactgtaatgttatgctctaaatcttgttttaagttcagttcggttcattttataaaccttagtctgctaattctagtttccttaataactattcacaggtaagctataaagtagaaagaattgtagcttccgccatacccgagcttctggatgccattaaacaattttttattaacctattccgaattgctgcagagtaagttctttcatgcattttcatgacttattcatgttatcattctcattctctttttcattactcatagccaaacaacaccaaagatagactaaggtagaaaaatcacagagaaattgaattgggagggcgagtttggcgctttcccttaacacatcaagaagacgaaattcttatcattttctcattttttttcttctttcaaaattgtatcaggactcttggtggttggcaacctaaagatggagagagccatttagatgcaatgttgagaggagaaattttgacagccttggctgtattcggacatgaacaaactctaaccgaagcaattaggcgtttcaatgaatacttaattgacagaaacacaccactccttcctccagatttgagaatggttgtctctaatgtaacttaaaagcatatctaaataacaacattatatatttgttcattatggattatggtttgaactttgcaggctgcatatgtagctgtaatgcagagaactagcgcgaagaacagatggggttatgactcccttttgaaaatctacagagaaagtgatctaagccaagagaaaacccgggttctaagtataatccagaacttgattaagaacaatattggtcatgcttaaacatggattatatatttatctttatggcaattgtttctatttcgtcttgtaggttcattgacatcttctcctgatcccatcatagtttttgaagctctcgacttttcgcttacttctgaggtaattaatctagagtcagttcgtgttatgaatatctattctatataaagtgtgcttatataactaaattcttggttgatgagaaattcatgggtgtgactttttatttatatttaataaaataataaaatattatttatatataataaaataataaaataaaaatttaaactgatatttgatatttgaactgatattatttatatatatataatattatatattgttctcatgtgatattatttaaaccataaatttactatcctattttgaatttaattaaaaccaataaaatatatatacctaatcttgtacgttctcattttttctaattttttttttattaaagttaattattttaaat

SEQ ID NO: 386250 - DNA, 804 bp, Cannabis indica
tgggaaggtgctcttgaagggaatgcttaaagagggattgtatgtgcttgctgatcaaactcgagaaccagatgctctcaagaacacaaaaccagtcgtttatgcttgtaatcctactgctatgatatgtactaatcaagatggcagtagccttgttaatacaactcccacttgtaatcctgactcaagtaataaaaatgttgattcttcacatagttgtcctactgcctatctttctcacaagcattctaatgttaatacttggcatcaaaaacttgggcatccctctaaccaagttttaagcaaaatattgcagcaagtttcaacatctggttctctacatcaattggaattttgtaaggcctgtcaattgggtaaaagtcacaaaatacctttctccatatccacatccagagcttcccaacctttggaactcattcacacagatttatggggcccctcccatattaaatccaaagatggatactcctactatgttcattttcttgatgaccatagcaggtttacttggatatatcctattacccttaaatctcaagcttttgaaatgttcatcaaattcaaaagtatggttgagaagcaatttaaccttcctatcaaaagagtgcaggcagattggggaggggagtatcggccttttgctaagtttctctcagatcaaggcattgcattcactcatccttgtccaaaaacaagtgaacaaaatggtcgagcagagcgtaaacatcgccacattacagaaatgggattgacacttcttgcacaatcggggttagacttctc

SEQ ID NO: 386251 - DNA, 676 bp, Cannabis indica
actttcataatttatcattaaactataattatgtgtagtctcatttgatatatttattaaatcgtattgtattgtattatattaaattgagttaaatgatatatttttatataatattatgttaaattttaatttatactaaaatatttgaactctatgtatttatttttttatttgaactcttaaatttatctagattaatgttatgtcagtgttatatcaataaattatttaaataaatggtcaaaacagaaattatatttgtaataaattttataattcgaaatgaatttttacaataaaagataaaactctaatgataatacttcacgaataaataataataataataataataataataacaataataataataatgagccttggttcatacatggacaagtatggaaatcgggttgtgtcggacaaaaattgtaagagggaagagaaatgggatatgtcagtatgacaaggcgttgcatgtcaaacccataaaggattagtcctattctaatggatatgacggtgttccttatttcatcgaaacttctcgcatagtaaaatgtatggatatttctaaaccaaataataataataataataaaaagataagtttaagatgagttgtatttacatttaaaacaataattaaaatgtattctacttttttttt

SEQ ID NO: 386252 - DNA, 1162 bp, Cannabis indica
cttcttcatgtagcaatgttctaaaccaaaccattacctaggaatggagcagccgttgggcttccacctccacttctggtaatcagaatctggtctcccattcttctgacaagtcactgctgtactaagataagggcaagtggattcatagagaggataagattgatcaaaaacccatttcccagaagaaaaatcacattttttgggtaagtttttcccactctgaaccataacaactccatcttcctcactgagccaagacccatctccaacctcaaactctgaagacaacccatgaaagaagcagagaaaaaggttgaagaagaagaaccaaagctgaagctttgctctagccatggaagctcatgaaccagaagaagagtcattcttgtaaaatgggaacttataggggtattagtagttactaggaggagtaagagatggtgttggactaaattaaggcctggattgcggtaaagggtgggggccatgattttatatgccatgcagcgcagtgttttctactttttctttttgtagctcattattattgtcaatttggtattgcttcttgcaatcgatgcctgcctttggtgttgcttttcattacaacagcacattctgattgtgattttgtaaaataagaagagagtgtgagagagagagaagtcttttctttttctttctttttttcttctggtggttgaaagttgaaatagaaagacttttggtcaccgtgactagcggtgcgtttgtctttgtgaatgaacttgacttctttttcttttttaggggtaaactacataaaaggttaatcccccaatcgagggcatcctattattcctaactcctaagaccatctcccattaaatattatttgacaaaacaagtaatgatgcattttttcgtagcaaaaaaatgtaatgatatttttcttttcttttttaaaaaagaaaatgtggtaatatattaaaccaaattaattattataggaacatttaaaaatttaggagaagataacctcggataattaattattaggatcagtctaacgtaaaacatattttaatactatagtacttttttatcgctatgtacctggttgctgacttcggaactaagtcgtgagtggctcgagtcgcgtgcatttttggaagcaccg

SEQ ID NO: 386253 - DNA, 1244 bp, Cannabis indica
ttttttatatagttttaataaaaattaatcactatgttgactttagggttaatatacaattgtatattgaaatataattataaaatttaagtcaaaatataatattgagctatttttgagataaatttactataaaatttacactatacattagagatgctcttaattaatgacccattttattaaatgtttttgactaataaaacaataattttaacttattgtctgaactttggaggatctttttgacgttataattaaattcatttaattttaattttgactttgctatattgatctttattaatataatttttttttttgaataacttattattattaatataatttagttttattttatttgaattatatagatccttattccaagcatgggttttcattaattatacaagaacattcaaagaatttttcatttgatttgtggatagggatatattgacagaaaatcaaactcttcaagacgatgaaggatgaacagaagaaacagaaaaccagtcctcatgtacttttctttccctgtatctaatatggcccatatttgtaattttattttttgatagtgtttactttagttaaacatctcttttgttattttcttttgaacaagtgtgttaaaacagaatattatgaatttttaaaaaaattacacaaatagtatagtaatttgtaactacaaggaatatagctgagaaaaagaaaaaatactctggcattaaacttaacgcacattgtttttataaactatgctatttttactgtttcatgttgacttaaaggtggtaatgctataatgagaaattaggtacccatttccaatggataatatttaggtaattaaaaataaaaaatgaatggaatctctctattccgctgccatgtttgcatcactttcgctttaatccattgcttttcacctccacagttttcataaaaggtgcaccaacaaaaagaagaaaaaataaaaataaaaaaaaagtacaacgtgcaccttttctatttttggtatgaaaataatcataattgaaaaactaaaaaaaaaaatacagacggtgtagctagctaatactataaagtctataatttcatgtagatgccttcgttcatcttgaatgctccactatttcattaaattgataaggaatttttacattattttaatgatattgaattttgaatctacacttatttagtattattattattttttttttttactattt

SEQ ID NO: 386254 - DNA, 1491 bp, Cannabis indica
aaccaacatgtgtatagctttacaaccctatttaatttaatttatttctttgaacacgttgagatggtaggtagtacaggatgacaattattgtagttttttttttcttttctaatagtacttctataaaatatttattcatttttattaagagcataacttattttgtatttgcacaataaaataattttaatttttaaaaagggggtcaaagcaatattcattttaaaaagatgtatcattataatatagatacatacattttgttgggaaaaaaaattaaaaagtttaaattttatgaggacaaaattaaacaatacgaacaaaacttttaaaagaaaactatttcaaatattctatataaaattcaaaaaaaatattgaggtaacgttgtttacactacaacaaaattattaatagtagctgaagtagtagcagcgggccaaatccaccactaatatatgctcatgctcctaataaaaataaaaattaaaagttattagcaagggtccgctgctattactcacctctaataattgtcaaattacatttagatattattagcagcaggccccgctactaattaatattaattaattaagaaaaattaaaggttaaaagtattcacgacgtgcaccgctactaataactttatataagtggaaaaaatcctaactccacccattctcttctcttctttctcttttctcttcgagaaaacacccaagtctagcccccgatcatccccattcccaacattccccctcctctttcccgaaggttaggttttatgccttgaaaagcttgtaaagacgttttgattataaaaataagttgaacaatttgatatatgtttgaatgttgaatcattaatattttatgtttaataatttatgtataaatataaaaaacttcgttattcatatatgaggttgtgacttatattatacgaagaattaagataagtagtcgtatgaataaaatggttagcaacatattaagattatagaatctttaatcaacgattgcttatacagttcactaatgcccattatttggtgcaagtaatcttaatttggatcgctgatgtagatagacatcttggtgaaggtgttgtatataatagactttatatatgacaatgaccaaaatatagttaagctttctttattaaagtgtatacctaggactaaaataagcatagttatttttcacgaagcctgtgaagatttctgtggagatcaaacttcaaagcccgacttgtcaaataagatcatctagcagcgacacttttggtccataatgaagaaagattgtattgaatatgttcacaagagtgtatagtactagcgttctgccaaggtcccacgagcttcaccaatattaatcactctcatgacgagtagaggttgtaaacaaaattttaaatatcatgttgaaggaaaaattacaagcttgcatgactcattggccataagagctcccctgagt

SEQ ID NO: 386255 - DNA, 2480 bp, Cannabis indica
gtcatttttggaatttatagtcagaagaaaaatagtaaaaaaataaaaaaaaaaaaaaaaaaaaaaaaaaaagaactagaaaaacttcatttattttccctctcacttgctcggctctcacacaaccaggaatcaacccagccagccttcaaatttctagaattcaatagggattcaaggtgattcaagttgaggtatgccctagaagcctatatcttgtgaactctttatcttttagttgattatgtttttgtaattttgagttatagtggttagattggtttgtggtttggtttctaagttcaatttgagctaagattgagtccttggtgctaatgttgatgagttttgtagtgaatgattaagtttgagtttaaaaactcaaacttgagtcattaatggcatgttgggattttgtgtgtatttctgagttttcttgcttagaatctattgttggatattgttttaggtattttggaaagtttggacacattttgggcaagctttggattgcttggggaaacctagtgcaaaccggttaaccagtttgccaggtcttgtaaaatcggttaaccagttcaggggcaggtttcccgagcagcccattttgtcgattcgtgttgttttcagagtcttggttggttaatttcttgatgcttagggtattgttatagtggttaccaatagcagaacccttagttggagtttaggtttcctaaattagggttttgacatgtcaattacccatttacgtggatgtgactagagcatccatccagcacgagatttttcgttcgggtcggccaactcacttgaatttggaaatgaggtaagactagcatagaatgtattttatatacatgttgtgtttgtgattgtatatgttctgggtgatttcatagcagcacaactattgtgtcggttcggcagtacatgtactgtatttgttaagagtgatattcaccccaaaaagtattaattgacgctatcatagtggcacaaccattgtgtcagttcagcagtacaggcatcgtactggttaatagagtgatatcatggccaattctactttcgggtactattgatgctatcatagcagtatgaacatagtgtcggtcccacagtgcgatcatagtgctgatagtgggtgatatcatggtcagtagcaccaactgttaagaatgttcttaagcatctgttaagccttgtagataggtgtatgagtacctagatacaagtcggtattatattatttgttatatgattttcttattaagtctgttgactcacagttgctactttcatgtgtaggtaaaggaaaggcaaaggctgaacaggagtgagctccgggcttagatggtgattgtacatgacgaggcgacgcgacctggagtgtttggtctcgggacatctggggttgtattttgtagtcggtatgcgaccagattataaatgtattttgataatatttgtaaaagttttaaatacgagatcccaacttatgtaaataaatatatgaaagtttacaaagttcaacaattaaatcagaagttttaatttgacacgattttcaaagaaaattctttaattagcaaaggtgacacaataattggaaaatcactatagcgcacctttttatcagagcgttacattggcgcaccgaggatgctccaacctctgttgcatagacgtctaattcccaacgaggaccccctacaaggacctaccctatgaagacctccttgagaggaccccctgtaggggcctctcttacgatgatctccttgggaggagctaccctgcgaggactccctacagggacctcctttgcaaagagttaccttacgaggaccccctacagggacttccccggtggcaactcgttgtaggctccttgagagtttggtcacccaaaaacccctcattgtctctttgtcttgacaatgcccaaacgattacactactagaggtgtggttggctttgaattcaaacacttaatcattggcaattgaatacaagccacaagctagcaaacttggataagaaaggggtataaggattaccacactaaggtcatcgagcatagaccacgacgtctgacagagcatggaggcaaggtttaagcgagtagtaggattgccacccatctgtagcacctggtacacctgaccaacaataccctataaccactatcctgacctctaggggtgagcggtcagttttttacacaaaaaatctagaattcagttttcagttttcatggttataatctaaaaaccgaccgaccattatataaatgtaaaaaaccaaccattttaatccatgggtaaaaaaatcaaccatcttttttttttaaacttaaacaagtctttaaatttgctataattatttagaaactaaaaaaactagagtcttgtatcaaatatcatataaaataaattttttgtaatttgctcaaattatttgtgctactagtatg

SEQ ID NO: 386256 - DNA, 609 bp, Cannabis indica
atatactttacactataatacatatatgcttcatatatatcaacctttcaaaaatagaaccattatttctataccatccgtcgacataaattttgatagaagagcttcaattattacactcaactttggtgtaaggcagatatcatgagtaatagctaagttgttatctcatgtaattagacccattttcacttataggaataagttactcaacacaatgtgaaactacttacttttgaggattaaggcatataaatttaagcaatttataattttatacctttattcgttaactagaattaaaatattaactatattattttaatagataaggccaactaataaagtttgttattaatgatggtacgtataatagacaaaatattaatattcttataaagaaaatgctaaagattatatcaatggtacctaggcactactatgtatggtataattaagtatatgattttacatactttaatttaataattaaataaccgggaagacaccacattcatacaaaacataattagtatatatatatctttatatattaaaagtgcctatctaacggcatttcttggtttaacattcttggtttaacagaat

SEQ ID NO: 386257 - DNA, 880 bp, Cannabis indica
tttttttttatcacaaacaacaaatcagattgtactagaaaaaaaaatgagatgttgagatgtagaccttcacctgagcagtgagctttaacacttgagggtggtggtgacgaagaactgagcaaagaatctgaagagtgaagacgaactgagttttttccagagccaaaataaaaagaagaaaagcaaaaaaaagtgagatcttgatattatttcctctaagtttttacttccataaaagaaaaagaaaaaatgtagaaacttacatgaacaggggtcgacgacctgtgctacaacaaacaatggagtaatcggtcggagccaccactagccagaggcccagaggaaagaacacgcacgcacggttgggagttggggctgagacctgggacgactgggctgggtgggcgatttgcttgatgctgtctgttagggtttcaaaataggtacgactatggttgggacaaaggagaagaagaggcggactaaaattctaaatgagtaaatggtattagggtaaatggtttttgtctgaatgttaaaaacttaaaaaataaaataactaataattttttttttttatatcacattgggctgggccagcccgggttgggttcaatggtttagaaaattgccaccccattatcaagccaatagtaacgggttgtaagcttttcaacccaacacatattcggcccactaaaagagagcatgctcgacccatttttcgggttgggttggccggtttggttggcccatcgggctaaatgctcacccctagccgccgccaccaaaccctctctgataagggtctcaggttagtctctttcttttgcattttatttacacattggggacaatgtgatctttagtttggggg

SEQ ID NO: 386258 - DNA, 1359 bp, Cannabis indica
tttttctgaatgtcaaaacaagtgtgcatcagcacatctcttttaaatgagtgcattgcagaatcaccttatatattttttaatatttttttttaaaaaataaaaggtaggagtaattatttggggcattgacataaattttgcatataaagtgctaaacaattaaatttagcacaattaaacttgttgttgtttctgtttattattaagatagaaaattaaatggaaaattaaatttacaagatttttagaggagggtgccaaaaaaaaacctttctagcaatgcatgtttatgagctgttaaactctattacattcatatattttacaattctaacatgatctgtgtatctgagtgtatgccctcccagttgaaaaagattctctttcaatatattataattattagtagtattataatgagatatttcacaatgaagaagattttttcttatttgttattttgtagaataatttagaaaggattttcaattattacaagtgtacactataccgatcacacatcttatttatttaagtcacgaaataaaaataaaaattaatgaacaatataaggcatggctcaactcaaccgaaaacaaatttctgtaataaaaaagtgtaaaagcacagtgagtgaggccaggtccactttcattaaggtatggacccaatatcttcaaattgcctaaatttcattattttattttaaaactaataataaataatataataaaaacggacgaattagtggagcttatatataaatgcaattacctgtaaaattaattgagcaataacttggcaaataatagtttttaaaaataatttagtcaaatttcaaaaaaaaaaaaaaaactctgaaatagtgatttataaatcatataaccattaataaattgattcattttctaaaataaataaaaaaaaaaatttgttgttttccttatattatatatcttatacataactttgacttgaatcatcaatcaaataataaataacacttccatcaaattaagatgctgatagctaaactatccattagaatatagtttcttctttcttcacaattaaatatttatatacattatgttatttagggcatgtttgaatgtgattttattattgctaatttgtgttttgtgtagttattaagttagtaattatattattaaataattacataatattttaaaacataaaaatatgtttttggatgtaaagtagaaaagtatatgtgattcttaattcaataaaacctatttgagaatatatatactactaaaaagttacgtgtgaggcaagtatactaaattttatgctagtttttttctatgttatttgaaagtgatacaa

SEQ ID NO: 386259 - DNA, 1878 bp, Cannabis indica
ttttaaaaattaattttaatattagtccgattattttatatttattgcaatactttttttaattttattttaatttttttttaaatcatgtatatatatttattttttctaagaaaaattatattttttaaaatataaattaaaagaaaaaagttaaaagaagttagtacagatataaattttatataaaataaaaattattaaaatgatatatttttaaaagtttttaggatgcaaataaagtttttctagctaaaagtgcatgtataatgataaaatttaaatttagtgttaaattaacaccaaaagagtattattttagcacaattttttttcaattctaactacaatactaaaatttatactctttattataatattgtttattagtataataaaatatttacttcataaatgaattatttaattattaaaaaaaaagaatgtcatgatctacagtgcccactattattagtgcgacactgtagactctcatcaaaatagaataggttttaaggatcagttggagcattttgtggaaaaaattacactatattgtatatataagtttttagtgtgccttggagatggcctaatagtggtatataaagtaatacaaatttattacatgctaaaaattgtgacaactgtagaacaaaatatagcatggactaaattctacatcacaataaatataactttttttatttacatttttgccatttattaatgtagttaattactttttatattttatttttatatttaataagatatttatattctttcaacaaaatttaatgcttttattaaattttttatgcctttttataaaaaacgaagttaattttacgtctaatgtattggagtactattataaaatatgaacttaatataatattgtctcatttttatgagttaaatttagtttaaattatacaccatccattagagatagtctaatatggactcttaactaaataaatgtttcggtgcactccatatctgtttttgaatttagaagaatttttcgatttaattttttttagtgtacattatttaaaaacacttctaaattttagaaaattataatcagtttataatattaaaaataaggtttaaatattttattgtacgtttgactattttttgttatatgcataataaataattatttttatttttagtattataaactatttaattttttaaaaaaaaataaaataattttaaataattataacttacaaaataattaaaaaaaatagaataaaaaatgttattaaatgtcaaaataaatagagaatatactaaaacgcacctctagagatgaagtttccaattttccccaaatttttatatctatatattttggttttatgtggccctattatagccattgacataaattaggagaacaataaaatattgacagtgccccatcattcattcattcttgaatgaatcttgatggtccaccaccaaaatcaatggctgatatcatgcctagtgcttgtggggcccacttaaataactccattgttgttgtacatttctcttcaatatcaccaaaactttataccaatgacataatttgtggctccctttcactaatatagcacttttcttttttactaccaacatcataactatatcatatgctatcttggtaatcagttcagattagttagtattgaaatttgtgaaagaacaaaaaaaaaaaaaaaagggaaaagaaatgaaatggggacattaaccaaatatatttttgggaattttacaaaaatactgctttttgaccaaaactttacatttttactgggacacggcaaaaacaacttttgtactgcccaagcccaatttcattacttttgtact

SEQ ID NO: 386260 - DNA, 2540 bp, Cannabis indica
  modified_base (105)..(105): a, c, t, g, unknown or other
tacgaagaccctttttttcatcaattgaaaaaaaagaaaaatactacattattcatgtacaacaaaaatataaaaggaagctatatatatagagagaaatttaanaaaccctttttttcatatcaattcttaattaatttcacctttataaatatcatgctccacatacatccgaccatgacataacacaaccttgattttgtgttgataatcattcaaaatatttataattttaacaatagacttccaccaaataataataataactaataattattattacatgcatatacatataatttatacataaaataatggattggaaattaacaaaaataaataagagggtgatattaaaagtatgtatatatatagttcaatgaacttggaaaacaaagtgttgggttgataaatgacacttcttcatttcacgttatatcattttaattttaattttatttttttttatcattattattccttccacaattatatatataaatataaatagttgattaaggaccaaaatgtggagaatgccaagtaacctaatttttattttatttatttttcttttcaaataaaaaataaatattaaatgtcaaaaagctaattcttagacttgtgggaaagctaacgttgtttgtttctaagaagaactatgtttttggacggctagctagtgattattatttattattaatattaatgataatcctaattctcttttctaataataaaaaaaatagtatgcttttgaaaataaacaccgtcccattttgaatgatatataattaaataaaaaatgttagaagatattattagtgtttaatatccttttcagtattatactatcatttaattaagtattaattttaaagatattaataattaattataagacgttacctataaacatattgttaatagcttaattaaacatattgttaatcaaatattatctataatgatatataataataaagaattaattaactcaataggtggcacaatctcatgagtgagagaaactattaataacactattaatttgtgcttatatatatatatatattaattaataattaaggttgctttcaagccaataacaaactgcccaaaccgatgggacttgtgtgtgtatattatttttttttccctataattatttatacaaaattaattaagtcaatgaaagcttactcctctttttatttatgtttattaaatgggtatcattagtggtcacttatgttgggtaatgaaaatgacttattcctttcataggagacttaataagggttttatttacatgactacatattatagtaatttgcgatttaaatatttattgttaatttttggttataaataaataataaatttaacttttaacgataataataattaaattatatttttaaaacatcatttacatgtcaagttattaataactacatgttatttttttattaatatatttaaataaattttaaataaaaaataaaaatttaacgacctgaactggactatcatgtggtcattgaaagtttcaaaaatataacttagatattattactgcgaaaaattaaacttaagtatttatttattattgaaaattaaatttaagtatttacactgcaaatcactcatatatataagttatatattttgtttcctattttgtaaaattcggaatgcattaatgttttgttacataaactattttaattaatctaactattataaagctgaacatatttcatacccaaacaaaacaaaattgtttctattatatgtataatgtatataaatatatacatatacatatatatgttatacatattatatacttacattaatattaactttctttttgagaaaatattaatattaactttataaagcatcattataaaaaattacaatttttagtgacaactttttagtcacaacataatatttttgtaactaaatgtgatttttaatcacgacaaaatattacttgtgactaaaatttagtatttaggtacaagttgtcactaatttagttttaatcacaacaagtatcgtgactaaaaatatatttagtcacaacaaattataattagtcataactattttacttttattcataaattttattgtagctaaaataaaaaaaaagagtgtttaaaaaaatatatatatatttatatatattgtcaatttaggttagatataattaggaggcaaagagaatttccagagaagcaagtgcattaattaattgtactttgtctttcattatttatcttgatagttatttgaatatatatatatatatatatatatgggtgtactttttaatgggtattactcatgaatgagtaatattaaaacaatttgagtttttatgcttaatttttctatttaattagaaaaatctctcatttttttcattatatggattgaggttgttccatcggctgaataaaaaataataaataaaaaatttagcaaaaaaaatgataaaaaatattgagttttacataaatatt

SEQ ID NO: 386261 - DNA, 1033 bp, Cannabis indica
ttttaattcaaaaaaaaaaaaaccacgcaacgaacaataccactgcaaaacgacgaaattgctacaaatcaatcaaccctaggctacttcttatttgtcgtttatgtgtttaaaaatattaaaaaacaaaaaatcaataacatgatttgcttctaaactactctaataataatattaatatagttacataaatttcaattcagtgggcattatcaaaaatttgagcgggaacaagttatataattactaatgagtgaagatgactggctgggtctgtttttatgaatagattcaatacgacaaggatcttttcttatctccttcatcacacaacgtacggccttgcttgcatatagggaatttctgctctattatctataatttgccaaatatatcaatttgtattactcataaaggaaagaaaaagtattagtgtcttgaagggttgtccaatgttttaaccattactggagtgagaccattttgattaaatttatagtgatacaacttttctttttctcgattcttcctctcaaagttgataatgtttttttttttttttgtttcttttctcaccctctctaggtgaatcctccatttagtttttatagtgcatttttttttccatccatagtggtgttgtcacttctttaatgctctcaaaaaagtgtgccaaatgtgttaatctttcatgattagttatactgtaagattatcttcttttaactaattttgtttcatatgatttggtcttatttcttactaaatggtagtaggtccttaatttctcggttctttcattcatcttattttgactatatccaatttgtggttttcctttgtttgacatgagatacgagttatctcagatcattgatatattttgcctttcattgatatgagatataataagcaacatgtttcgttttggcttgaggtatcgttttatctctattaacccaaaaaaaaaaaaaaaaaataagtgacgtggacattaatatttgacacgtggcatgaaggatgatgtcacgga

SEQ ID NO: 386262 - DNA, 1316 bp, Cannabis indica
aagcaccaaaacaataaaattataaagctctctcttaacaaaactgcaatattctaagatcggcctgtcctacttgtttgactatttctaacattcagtagtttttttatgaaagaaaatctaatactgtaacatctcatggctcaagcataggctaaatgagccattcaaatggttaaaatgacaaaggagttaaacaatatcaaatacaatataattataacactaagttcagtatttggttctgcttaacattaggttgaaaatgagttttaacattctaatttacttagttttcctcaattgctccatattgtgcaacattgtcttccaatccacaaaattatctttataccaatacacaagctagactcagctttttttacaattatattaaatggcattactcttttagtctacaaatcactcactctctcttaaatttcttactagtaagtaattaagtaagaaaaatgttgttgttaataatttaattattgttattattagaatgaagtgagtgagacttacactggtgatggctctgttgatgcaaaaggaaagccagcagtgaagcaaaatactgaatattggagagcatgttggttcattataggtactttattttgtataaaataatcgtgaattgattaatgttcttgactatatgtaattatataacacaagtgttgaatgttgtgaaggcttgtccttctttgggcctttatgttcattctgtcaatagtgatgatgacactctacccaattctcatagatttaatttttaaaaactgtatctaaaaatgttgtcatctattaaatttattcatgtttaattttaattttgttttaattttttatttgtgttggttatgttatttccgttgaacagtgaacaaagtttgtttttaaataatttttatctaaaatgaacataggaggtaaatgacatgatttacatttggtttctatctggaggaaatttctaacatatttagagcattggtggtatttctaatagagaagatggttatgggcttaatataagagttgcttggaaatttataatttttctttacctacatttatgcttcattttataactgacgcaataggtgaaagaaaaactatttcaacaatttatgtgtcatttttgaactgacggtataagtttttcgtgtcggtttagaaatgtcgcaaacaattttgtgtcatttccaaactgacgctaaagataaaacaaaagtgcgtacattttacgtcagtttttaaatgaagaaaattgttttttgtgtcattttaaaaacgacgctaat

SEQ ID NO: 386263 - DNA, 747 bp, Cannabis indica
gttaaaactcaagttaaggccaattacatgaccccgaaaatgaaatcacacaacactacgtcccatgatgaacaacaatcagtgtcatcttccaagaggcagcttcaaatcggcatatctgagattctagatctaaggaagggagttgttgaattgaagcaaagcagatttctcaaatagatgacacaactgatcagaaggtactaaaggagtagaggaatcaagtaatacaaggttaattagaaacatgatcataaaccatggtgaccaccccatcttaattggattgatattagtttgtggtatattgtgcctacacatatataagaaaaaaaaattaatgatgcatgtaaaattatttgtgtttttaccgtgaaagagaaaaagattgacttgaagtccattcatacatactggccccaaacaggtattgttatcatgacttttgtgtcatgtaattctattcgtcctggttttctgtggtagaaaaatcactaagttcatccaacaaccaaaattaattatatatcaccaagatgtattgtattggaatggtatggtattattcaatactatgtttgatattgacttgcactaatagcttgtgtaaattataaattttttacaatagaatcgacccaaccccctcaccataacctggacttggacccgtaccccgaccccgaccccgagtcagaccgggatcccgaccctgactcggacctggacccccactcggacctagac

SEQ ID NO: 386264 - DNA, 1480 bp, Cannabis indica
agagaataaaataatgctaaaaatcctctgcagaacgccaccagtattgacttctgtctctgaaattcgtactcctttttcgcttcaattgcttgactgaaatcaactccagttcaccctttatacatgcattgagggactaagaagatataaaaacgcacatgttaaatgtctattcgaattgggaaaccaccaaaactcacgtgagagaaaaagatgatttttgtgcagtttagtggggcgggtcgcagcccatgttggtgtttcactacatggcttcgtttcgatggtgatttttctactgcgtcgactgatagtattttggccataactctctcgatatttctcgaaattggacgattcaagatattccgaaaagaaaaaagagagatctaaaactttatgttttaatgttttccaaaatctaaacagaaaatagtcgaattcaggcttaaagttttagctttattttcttacacatccatttttatgtgttgtccatcattcatttttttggttttggaagcctcttccttgaatcttttgatgaagtttttcaacgtttccaccggttgttgcttaatgttagtcaggaccttaacttcaagattaatcttttttggtttctacgaactgccttctgaaattaatttgtaacttattccaacagtccacagatccggggtggatccgggctcgagctttttgaaccattcttcaacaaatcccccttaatgtcaatgggaaacataggcatttcacgtcattgttgactctcatgactgtcattaccttgttgaaccttcacaagtgatcactaggatttgtatctcttgtatactgtcatttcaagcattttgaagttcttttggagctctgtttcaagtacatttatggaagaaggctctcgatcctcgcagtcagattctgaatcatatctattttgccttcgagagacttcgactatgtgctttcaaagaatggcgagtctgtccagaattccttcatttaagatgttgttcaaaattggtatggttttcttttttactctaaatgggtcttgaggtacccgtgctttgcattgagtctctgccttaaatagactggaggattcttttggctatttccctttctctccccaggctcttgatgcatgaacacgctcctctaatcaccccaatcttgaggaccaatctttctcttaagaaatctgctccctgcagacttttccctttagggagattggaatgaacttttcgcgggttcgagcctttttgttcctttccggattagccgtaggatttcccttggggggacattcagaagggtattggatagggcttggctctcaactattttgttttagatttcttaatggttgagaaggtccttctaccatcttgtcttgtccaagaaggccaacatttgggtgcatgtgaatgcctacgtgttgggttttatgccctaaataaaactcttt

SEQ ID NO: 386265 - DNA, 1420 bp, Cannabis indica
attcctaagttaggtgtgctctagccacaaacctaatcggtatatgtttaagattgggtctgggtgatggtggggggtggagagttataaaataaggcagcagtagggatggagaaagagaaggtggtgacagtaggcatatggtgacttatggtgatataatgatatttaggtttttgtggattgtagtgtgatgggggaggagatgtattataagagtaaggcttatagtcatcacttgcagtcacattggtagtagttattataaacaataatgccaaagaatatgctaaatgaggccaaaaattggtaaatttttggcactttaaaagaaacataaaatttaagtctttgagctaagtggatcttaagtacaagcctaacctgcttatactcatggtcaggattgatgtgctttagagcaaagaatgaagaagttgtaagtggctttggtgttgaaagggatggtttcagtggttacaaaactaaagggaggaatgatttttcaattttattatttctcttttgctttctttaattattttgtatattttcaatgatcattattagtaatagagtagtattgatttttataattaatttgcacctaggagtgtaaatggattgagtcgattttaattcaactatgatctgacctgatccagatcatgtacggattcacccctcccttccccattagattagatcatatctgactcgacttatattgatcaaatctgatccgattcgatttttttaaaagacttgtattaatagattgtgtaaagataatatattttcaataaactcgattccaacacaaactacgggttgggtccgggtctaggtctgagtctcaggtccaagtctggaactgggtccaggtacgggtctgggtcccgggtacggggttcgagtccaggtcctgggtacaggtcttggtttgggtccgggtttgggtctcgggtcatggcctcgaactgggtctcgaatttgggtccgagtccaagtttgggtgcccgattttgggtttgggttcgagtcccaagtttggtctggttccgagttcggtctcgagttcgggtcctaggttagagccctaaaccgggtcttgggtccgagttcgagtccaggtctaggtgtcctattcgagttcgtgtctggtctcgggttcggtcagggtttgggtcccaagcccacgtcctgggtcctagggggtatgggaccggggtccgagtcttgatttaagtttctttttaatatattgaaactgaatcgtattagatccgatctgaaaaaaattaggcggggcggagcggacctgatccaagatccaaatttgaatgtttcaaatcgaaagtgatccattgggtcgaaactccgacctgctccaactaaatagatctttttgacatgccta

SEQ ID NO: 386266 - DNA, 1242 bp, Cannabis indica
tctgttttactaacttttccacttggtatcagagcaggtgctagccgtttgtcatggctacagacgaatctcagactcctggaagaggtgctgcacaaaccccttcgatcaactctggtgtcgtcttcactgggtcgtcgtctgcaaactcagcaacaatgtcgacacccttcagcaataccttaagccagcccttcacgatgaagctggatagaagcaatttcccgctgtggaaaacgatggtaatgaccattatcaggggacaccgattggaaggcttccttaatggcgctaaaccgtgccctcctgagtttctggcttcagaaaatgatgaagcagagactctaaacccaaatcctgagtatgaactctggataactcatgaccaactcttgatgggttggctctttggctcaatgacagaaggcattgcctctgaagttataggctgcagatctgctgcaagtctatggacagctcttgaagacttgtatggtgctcattgaagagcaaacatggaagatctcagaaccaaacttcaaacagcaaggaaaggttcacaatccatgactgattatctgaaacaaaaacgactttgggcggatactctcgctttggcaggggaaccatatccggacaacctactccgaggtaatgtgttatctggtttaggtgctgaatacttaaccattgttgtgcctctcgaagccagaaccactctctcttggcaggaactctctagtactcttctcagttttgacagtaaactagagagactcacttcgttctccagcaactccaaacaacttgacaatcccactgtcaacatggctcaaaagccttacagtcctggctatcattctaatcacggaagaggcagatctgggaataatcatagtcaaggtagaagtggtaatcaacatcctggaatggctcgaggaggaggcactagaggaagaggaagaggtggtagacacaacaactccaaacccacatgtcaggtgtgtggaaaatacggtcactcggcagctgtgtgctacaaccgatatgatgaaagctacaccggtcaaccaccaaacagtgaccattctcaagacaaacagcagcagtttgctttggttgccacaccagaaacactacatgatgatggatggtatgctgatagtggtgccagcaaccatctaacatctgaggcaggaaaaatcaacaacaaaattgactatggtggtaaggagaaagtga

SEQ ID NO: 386267 - DNA, 791 bp, Cannabis indica
gtcagttacaagcaattgattcgccaatgaagggattgaaaaacaagagctacttaaaaatcgcccgcacaaccatccccttagccaaaacaacacacatcaagggatccaaaccattgtaacaacaatagtaagaaatattatcgaagtgctagttttctttttctccttaattacccttaacaaataatcttatttggcaaagaatataattattaggtaccccagttgaatattatttataagtgtcctcttttaaatagttattgatgttttataataatttttaaattaaattatgtgtaactcaatatttaattaagctccattttgttaaaactccaaatttcattttccaaaagttgagaatatgagaccattgttctttttattctttcttcaaaatatataaacttaaaagacaagaatcttaaaaagtacatacacacttgcatgtttggagtaataatgggtataataaggtaaggtaattagtaagggggtgagatttatttgatttggatttggatgggacaaccaaaagcaaaggaatcagatactattttggagaagttagttgtggattgacgcccaaaatgaagtgattttttattattcatataataattttggataatgtgatatgatcatttgatgtaatgtaataatcattaaaaaataaaaataaaaaataatgagtaaaaagtgaagtggcaggccagctgcaaattcatttactttgttctgaaatattactctaacctcatactctcacattggtccctgacatg

SEQ ID NO: 386268 - DNA, 778 bp, Cannabis indica
tttttttaaaatgggccgaagcccatagctgattctatattcctttttgcgtcagttgtgcaccgacactaatagtgtatataatggctttctgcgtcagttgtgcaccgaaactaatagtgtatatatttttttatatttcatcttttgcttcaatttttgttttaccatcgaatagataactgacgctaattaataattatttacgttggtggataactgaagcaaaaaagtgtgggttgacttttgcttcagtcaacaagtttgaccagacgcgtttatcgacgcaaaagcccctttttgtagtagtgaatacataattctttcttattgattatttgaggaacattagatgcttgagatcgtttttttcgggaggatcattcacttggacctttggaaatgacataaacaccctcagattattgaccaaacgctgcaaaggtactttataattttattttcgagttaaattttattaataatattacaaattaattgaatctaatataaattattgaatgtaaggcatttgaaagggtcggaggttctaatgagttacttgaaatgtttaaaggagcaagcactacaggatatccaaaaaagtcaaaaggaatagaatgtagttttatgtaggtacatcaatgatattgtgaaaggtctaagtgggcatgctattataaatgaaaaggtaagttaattaattagtgtataattaatttatttaggagaattaccgcttatactattattttttaactttttttttttcaaattt

SEQ ID NO: 386269 - DNA, 1187 bp, Cannabis indica
tcatgaaatgggcatggaaagtgctatccgataagaaagctttggcaaaattcatggaggccaaatatctaagacttcaagcttcctgacttagatataaacccaactgattccctgccctggaaggcaattctgcgatctagatctcacttggagaaggggctctgtcgaaaaattggagatggaaatctgacttccatctggtttgactttgggtgccgggggggaccctccagcctacgccaaggcataatgccacctttggaatgagcatggtaagcaactttatctctcaaggtcgttggaatgaatcacttcttcgacaatggtttcaggaagatgatgcaaagcgcatactcaatataaccctccccaacacaccttgtgaggatacgtggctctggctccccgaaaacaatggaacattctcagtcaaatcgacctacaagatagtgaagaatctacaaaacatggctcacgatgataagaaatggaggacaatttggggtgctaagattcatgagaggcttaagatgttctggtggaaaaccatttccaatggtctactcaccaaggatcgactgtgctatattcttccctcgatagatcctaattgttcgttatgcaatggtgatatggaaacgtcacttcacctcttctagaaatgtaacttcgcaagagccttgtggtttggatgccgctggcaagtccgaacaaccgcgagtcctattgattgttgggaaaattggcttgagtggttctcggctgagtcccataggccacaaaacatccacctgcatcttttcttgggtggggcggccaccatttttgagagcatttggcgcgaaaggaacaacctatcccatggaagctctcctactcccattggggctataattcagcacataaacttaagaattcaagagatctccgatgactccgaacccaaagctgcagtgttgaagacttggctccctcctcctcctggttgggtgatatgcaataaagacgtctccattggcaagtcgcagacagcaggggctgcagtgtttagagatgaaactggggctgtcattaattgcttcaccttcaggctggctgttagtgagccgctccttggagagacaatgaccctatgcaagggagcggaagaagcagccaagaaaggtttcaggaaggtaatcttc

SEQ ID NO: 386270 - DNA, 1533 bp, Cannabis indica
tgtttgcctttagttttgcgctttaaattatgcatcacttcgaaagcaaccattataatatcagaaataagacgccctggaataaacgcactctgagtgtcggagataacacagtcaataatggtcttcatccggttggctaagacttttgaagcaactttatacaacacattacagatggctatgggtcgaaggtcgctcatagaagtaggggctttcttcttcggaataagtataagatttgtgtcattgaggcctggaggaagaatgccacaatcaaagaattgttttaccatagagacaacatcagacccgacaatatcccagtgtttttggaaaaaacccagtcccattccgtctggtcttggagatttatcagggtacatttggaagagtgctcttttgatttcctcatcatacatgggctgtaatagatcttcattatgagcttaggtaacagtaggaacaattccatgtataacaggttgatcatctgtattagtagcagtgtataactgattgaaataatcagtaataactaattgtaagccatctgtccaccctttccaagcaccattggaatcttgtagctttagaattcgattgtttctttttctagagctagccatagcatgaaagtaattgctatttttatcacctccattaagccaaaattactttgagcgttgtttccaatatatctcctgttgagcaagtagttcaaagtagttactctgttctttttgaaaaatctcaattgaattagcatcttgtttccctctagtattatgcagaatttttttactttgagctaacctttttttgaaattaccagtcaactctttaccccaatcagagagattttgacaacacacctaaattttgctcagaattggaagatgagaatttgaggtccaagtatagtggacaatctgggcacacataggttctctggaccacgaattctcgaaccaaaattgatgaatatggactgccgttgctgtgtgctgtggtataagaaagatcggggagtgatccgaagaagagaagcccagatttgtaagagttgcagctgaaaaaagatgcaaccagctatgagtaacaagggcacgatcaagatgaaattctacccactgatcagtacctcgagaccgttcccatgtaaacagatgtccttgcagatcaagatccatcaaatcgcagctattaagagctgcttgaaaaccgtcgattaaggccgcaaggtagggacgtccgcccttttcgtcattggccggtggtgttgttcaggtcgccggtcaagcaccaaggcagactcgaggtagagtgaagattgataataataatttaaactcttagttacattatacttgtaacaataataatttaatatcaaaaattaggtatgtaattagatattcaattaaaaatcgatacaatccaattaataatttaaattaggttagagtgtgtaggaatttacttggtgaaattccaagtttaacctacaccaactcaagttcacagttaaaa

SEQ ID NO: 386271 - DNA, 782 bp, Cannabis indica
ataactcgttaaaagcataatttttttttttgaaaagacttgtgctttaataaaacaaacagcagtacaaagcaaacaaagccacaagctatatggaaggtaaagaaccattctaaactaactcattatctaatccaagacctagcttagccaatttatgagcaattacattactatccctaggaacataacaaattgctagccttggactgaaagataacaagttcttaacattgaccaaaacatcatccaacacactattattccaattacaagaggtaagcttatccactattgatttgcaatccgtcagcagcacatccaaagggaggtgaatcatctgagcccattgaattgcctgaaaaatagccttagcttcagcaacagcaggcggcaccaatccaacgaaaggagttgaaaaaccagctttaactgcattattagcatctaagaccaccactccaataatgtgcctccgattaactgagtcaatggctgcatctgtaaaaattttaagccctgtagaactaggtagctgcactggagtcgaaagagttgcagactgggagcctgtgacatgattttgctgtacatcccaaaaacttaaagaaaaaaattgagactccaatcatacacttccttaggaggaaaggtatgctgcttatgaaaaaagttatttctttgattccataaagcccatatgaaacaaaacaaaataccaatatcatctttgtccaaagtgttgggttttgtgccctaaataaaacccattacaatctgat

SEQ ID NO: 386272 - DNA, 971 bp, Cannabis indica
ggtgcttgaagatcttttatagtagtggtaatgagtgtcgttaattatatgaggtgtggtttatgcgtgttggccgaaaggttatcaagatagtgcgtagccttgagatttttttatttcaaagagtgagaatgtatattcaatttaaatagtctgaactctatatatagagattacttgagagtacttagccaacaaccaactgaaactcaatataattaattaaataataaataaaattacctaacaattgttaatcttccaacatattcggtcaaggtcagtaaagaggccgaaattatttccatgtaaaacaaaatggtttgcataagcatttaattttgaaaatggttaaagtttattaatttaaatttcttaacaaaaaaatataccattgtcatcatttttatcttattatcacatatatacttgcttccaagtaagcaaacaataccctaccaaattctcaacaagctatatgtccaaaacaaagaggataattaagtccaacaagcccccaagagtataaacgttaaactgcatcttcatttaattccaaacatacatcttcaacaccaagtaaactaaatctccaagtgatacacatgatacattacatatcacaaagttaccgaatctagccataatctaaattttaacgtcagctacaatacttttatacctccaaatagtgccatttattcaaaacttattcctttgaaaattccataataattttatgtaatatcactcatataatcaattaaattcactaacaaaactaaaatggacttttgtattagactttaattataagtaattacttgtaaaaatactataatattttactttcgtagctaatacaattttatctctctctaaaaattaatacaattactctataaataatttcaactcactaacaacacaaataaatgagataattatcctcgcacaattaatatctcaag

SEQ ID NO: 386273 - DNA, 1145 bp, Cannabis indica
tccccacttagtgatcggtctgctagttcacgcaaatctaaagaagttattacagacgagccacatgcagggaaacttgcacgtgtggttctaccctcaataacacgttcgatatccacttcgtggtagaattgaaaaagggatagatttagatccaattctttgacatatagcccacggcctggttgccaaagtgtagccattttgttctgcatagcttagaaatcaatggatcgattagttaaaaaacgacaacaaggagtcattgatgatcaatttttgataattcgtccgcacccacatcgaacaacaaaccttcatcgtcctcatcctctatcgaaaatgctaaatattgctcctccatatgtgagctacaggattgtctataactcatatggaggaggtgattattttatcaaaatctctaattgataaacataattttaaattaataaagtttctttattcttttaagtgaatattttacatttgataattacataactattatatatactaataatcatatcatataataaataaatttattagtatatataattaaattgagacaatatctatctataatctataactataataaaagtgttgctaattttggggtcctctaaaaaatttaaacttaatgaaaactttatgtattatttatttattaaaattaattaggtattttatgtattgattatttccctcttaacaaaaatcttaagttttcttaaacaaaaaaaaaaatcttaaatattttattttacaaaaataaaacatgtgtaaaatatcttaaatatttttaagcgccacaaaattattaaataattttggtcttttttaattacattgaagatcaagacaaagaatcactttattactaatatattgaaaaaatatttgaagtaggggctcacgtgcgaaacacgttaaacccaactagtatatattaaatggtgtaaatgttgatcttaaataaataactatgtatgtattaaggtacagtttaaagtgtgtaacactacaaaagatgtacattttgtcatattatttgaataaataatatagaggattgttaactaattataaaataaaatttttacaccaaaatacaaaatacacactttattacatatata

SEQ ID NO: 386274 - DNA, 1297 bp, Cannabis indica
ataaatttacatgtcaatcttctacttatatagttggctattagtttgctttggtaaaaaaaagaaaaccatttagttgactaaaattgtactcatcacaaacatctgtcttagcactcttttaattcttgtaggaccttagattttgatgtttacctcttgtgaagcttggcacatgtgcctattagcatttcttattaacaataataaacataagaaaagatcaatgacaagtatggactcacgttgacatctcaacagttttcatatcggtgccacaaaaaactccatcaagtttcgctgttattctctattagttcagatgtgctcggttactgtatcgaatggattctttagccttcaaaataaacagaaaaaacgaaatcttgtttctctccatcagtgtggtaataaccatttatttcatttgcttcattatcataatgacaaaattactaattgtttaaaggaaaatgaatagcatttctattttctacaacatatttaaaataggcaattaggaaagaaaacgaaaatattgaatttagattcttcatactacatccataatatatatgagagttcaaatgaaaattaacaaaggagaaattgatattatcaattgcaacactaacattgactctcactaataattaaacacagaaaacataatataataataataataattaattaactcacttggtctacgtaactattggatgagtatttttgttcttcctcatagtatcacaaaagagatagaaaagttgtgcagaagatttctttggggaataaatggaaacaggagtaagattcacataacttcttgagaaaaggtttgtctcccgaaatcttatggtggccttggattcaaagatgcgattaaatagaatcaggctatccttgctaagtacatacgggcaatatccactaagcaagaccttctatgggataagtgggtggataataaatacttaaaatctaagtgcttctgggagtatgatctcaaacctgatgtcagctaagattggcggaaactctgccacataaggaagaaatttgagaaaggggaaattcataaagcaggaacgtccacacggttcaagaccacctttttgtacaaccataagttgactaaagatcctgtcaaatattataaggcagtttggagttcacttactgtccctaaacacaggtttatactctcgcaagtcttaaactctcaccttctcactaaggataatttactttgatttcacattgaattggagtcgatgaattgtcctatgtgtga

SEQ ID NO: 386275 - DNA, 1017 bp, Cannabis indica
gttttcaattccttaatatccagtgaggtggttttgcggagtgtgtcgagctcaagctcaagggcagttatattctccttgtcacacccattctcatgggcagcaaccctagacttaccatagtaagcaaccatcatttcttgtagaaaaatcatagcatttaagttagagaaagcataaaaaatttacaagacaaatgcaacacgaccatataaagaaaaactcaccttggtcatttctcgacaaccgagagccactacctcggtgggtgagagatcgtcgagtcttggcattgtttggtcgtattttcccaagaggttttagacatgcgtgcggttgacatacaggctagtggctaaggccgagcaatgacctaccaatggcaatgccgcaacttagtctgtagcagtcaaagctgcgtctaggtctaaggtgacactgagtgtccccgtagcagaaatcacctttccaaacagccgtgaccgggaggaagggggcatggttacatgagtggcctacgcatcagagcccaaacaagaccctattctcctaactttgttgggctgagaactgggagaagttgacaaaggagagccccccttctttgggtaagtcgcatgtcttagcatgctactcatatatgcaaaacacaaaaaaacaattagtaaagtataaaagaatgtaaatcaatgaagcaatgtgataagaaagatgaatagcaattatcaccaagcgagtcacactccttaattggccttctctttgaaggcccaagctcagtgtcgttcgcgatggcattcatggccggcctctgggtcctagatgttgggattttatgccctaaataaaacctattacaatctaatatgatttgtcaacaataaaaagattagaaattatttatgcttacatgttgtattcatgtttatggtttaatttatatatatatatacacaaaattgttggaaatattttaccaggatctagatttactaccaagtatgtttcattaacatc

SEQ ID NO: 386276 - DNA, 1124 bp, Cannabis indica
ggggtccccttcatcatttttttatattaatctaattaatacatttcattaattaattaaggccactctatagcttctttgtcattcttttatctactattccttcatcatatcatcaacaatatcccataatatataagttatatataaatatatatacacatatatatcttctctctatagatatagatgatttttatcattacaaaattaattaagaggtttctgagacctagtccatcagaaaggtctcagaaagctctactaggggtgagcgtggtgtgagttgcgataaactgataaaaaatttaaccaactcacaaaatattgtacggttaatttcaataaattcctgctactaataatatataaaaaaataaaaataaaaataaatattaaaccatttttattattctatcataatatataaaatattaatattatatataggttgcgcatgaatattgtagttttctaatatttgttttacttaattgcaccgtactaccatggtagtaaaaaaattaaccatatataatcacaccactttgtgaggtgcaatgtgaaaatacgagtttcgtgattaagtggatagtttgctaacccctaattaattagtagagttgagaattcacgtcaaaataggtagatagtatacatcgtcaatcatttcttatagctaattgtgagacatttatatatataaatatatgtctagattaatggatattggacgtttctgcactactacaaaattgggcttcagagtcagtttttaaggtctttcagcgtcggttttggcgaaattcgctactgacgcttatccgagtgatgctaaaggagtatgaaataaccgacgccatagggaccctattgagtcggtttttatgaaataaccgactccacactacaagaaaaatgagcattaatgaggacaaatttcgttggtaaaaacccctgttttcgtcagtattgcgcatcaatgaggacatttcgttggtaaaaagtcgttgggaatacttcgttggtaaaaacgattatcaacaacgactttttaagtcgttgggaataaaaattatcaacaacgacattgtcgttgggaataatattttatttatttattt

SEQ ID NO: 386277 - DNA, 808 bp, Cannabis indica
ctatacaaataaaataaaaattatgttacattgttactatcacttccgttaaattataaatatggacacgtggagagtttaaatgccttatatttattttttttatttttaaacttaatattcttaatattagaatttaaatgttaattcttaattcgataatcaggtttcatatactgtagtggtaattttttacactcagctatgataatttggtattgcatctctcttatttatttattttttttaaaacaagtagcatttagtttttgatatcaagaatattaaattttaaaataaaataaataaatgtaatacatctggacctttcacattttatgagttaatggaagttgtagtaacagtgtaagagaattgtaacattaggtattttatctccaaaaataaagatagaatatttaagtgtataaaatctaaaatattaaatatttttgctacaatttacccaaaaatttatatataacttgagattttattttttcaccctctggccacctggaaaaataaaataaaatacatatatgaaataaaaagagaacagaatcaataaagtagctatagcttagggaccaaatcgatgagaaatttctcgtagctatctaatcaaagatcgattggcatctttaatttatatgattgataaaaaatcgaaaaaaattataattaatggggtccccttcatcatttttttatattaatcttaatatatttcattataattaaggccacactctatagcttctttgtccttcttttatctactacttccttcatcatatcatcaaca

SEQ ID NO: 386278 - DNA, 1078 bp, Cannabis indica
gaatttgtatgaagaatcttcggaagacgaagaagatttttataagagtgtgagagataaacagtactttgagagaatccaaatagaaaatcgatctcgactgtaatgtatctcttgctcaatcaataaagatgttacgtacggttgtatttcaaaactgtagtagatatatatcttggtgttgattttattgttttcttgttttattttgtatatggttttaattgctgtattcatctatgttatttctctgtttcttgagttgtgatttcattaatcttgatatttttaatggttttgagatttaattttaattatttttattttgtacattaattataattttcccatatatgtaagtcacactaattaaattgttgtaattttgtgatagattatttccttttactatattggcttcatacattaattaatctagcattacaatgtgccaatgtttagctagaaacgaatttctaatataagtcaaaggtccaaaaataattgtatatataatgtaaagaaacatatatgtatattaatatctgtatagtaaccaatctaaagatgtgccctaagatataggatggaggaaagttgcataaagtatatatggtcattctcttttttagtatataattaaacaaaaatcaatggaaccatcgaagttgcttgcataaatcactacaaattaaaagcaataaagatgtaatgtgacaacgtcatggcttttaaacattcccaattagtgctaattcttttgattaatgttatttggcttgatatatattgtgttgattctctagctagctatagtgagagaggtgcaggaattttattggattaagttaatagctaaaccagtgtataacaccattattaagctttatactataaactttaattatgtcatgatatagattccaaaatactcttcgtgtgtgacgctatatatatagtcaatgctgttcgattagttaattagttattaactgagtggttgctatataatgtctcttaaattaaaggtttgatatataattatatatatatatatactagcaaaaagctacgtgtg

SEQ ID NO: 386279 - DNA, 1448 bp, Cannabis indica
cttgtaaagacacccttatcactgcagcacaccatccaacgctgtcatagatattttcatggcccccacctcaccatcccatatgataccccataaccattgactaaccttaatcggtagctatgtcagtcaagtgaacaatttgaatactcaaaactacaaaatgatttccacaaaggtaaacgatgatcatccagctccagttccaggagcaaccatggtgtgccacgtggtggctttaccatatccaggcagaagccacatcaacgccttaatgacattctgcaaaaccctatcttctcgtctcaatctcaaacacgataatctcaccatcttaatcaccttcgtcttaaccgaagagtggttgggtttgatcgggtcggatcccaaacccgacaacaatatccgattccaaaccttacccaacgtcatcccttccgagcatgttagggcaaatcaattggctgatttttatgaggctgtcgcaaccaaattggaagccccctttgaagagcttcttgttgatttagataatgataaggttcgtcttccaccggttagggttatcgtatcggatagcttattgggttggccagtcgaagtcggtggtcggaggaatattccggtggcttcgttctggccattgtcgggttgtatgttttcggtgctttatcactttgatcggtttaaacaaaacggtcatttcccaatcaaactctctggttagtcttttctttacttttctctattgccacgtcatcactcactattgtctaatttggaagaattatttctctttttagaaaagttattaataatttttgttttgtttttaatcattaattgattctttttaagtttgatgattatacatatttttaattttaaatcatacgtaggctctctacaaaaaaaaaaaaaatcatacgtaggcaaacatgcaatagtataaatattcacattaatattttattttgatagataagttatacagtaacggtttttaatttaatttaatcaaactaatttaatccaatctaattattaaatgttaaaagttgttttctaattggattggatgggttattggatgttaatctcaaaatccaattaaaaatcgatcaaatctaattatatatattatatattaaaaaaagttaattatgatttttgctcctaaatttttttagctgttaaaaatttcttctaaactattaaaattgttgaaattaaggacgtttgtctagtttcattcaattttactaactctatgattgttcatgtattaaatcatgctccttagattttaatatttaccaaatcgtctccttgaactttgacgtgtaccaaatcaagctctctaaactttcatccatgttagacttttcttactaaaattgaaaaaaaaaagttcttttttttttgaataaatattcataagttttatt

SEQ ID NO: 386280 - DNA, 1404 bp, Cannabis indica
atagagggagcacgattggcaactcggattccttataaaatgccattagattcaaaccgttgtattaaagaagagaaccgaaggcacatatgataaagagataagtagagagagggtcaccttggaaaataccacgggtaggaatgattggccccatgacacgaccaccatggacaatagaatatttaactaatgagacacactacaatacaaggtttatccatctatctgcaaacaccattcttttcataacagctctaaggtagtcccattcaacccggtcataggctttgctcatgtctagcttgatatccatataacctttttccctttcatcttccatttcaaatagtgcataacttcaaaagccaccatgaaattgtcagagattaagcacccaggaatgaaagcactttgcatatcagagataaccttgtcaataatacttctcatcctattagcaagaacttttgcggccactttatagagaacattacatagtgtaatagggcggagatcgccctagaagagaaattttttttcttcgggatcaagacaatgttagtgttatagtgagaatttctcacctagaaactcgaaatcagactcttataaaaatgacacggggactcactctcctcgaggagagctgagatgtcagtgagagacctcttgagtgcaagcctcgcctgaaccagacttagcgggatgatgtgaccttgacagtgtctagtcgcattcgagtagctcacatggagtaggaccaaagatcaagttaagactcgcacataccaatatatgcgagaactataaaggtcttcctgtgaagaggaaaagatcatttctatattcagcgagccggcccggatgacccaacaatctcgataactcgataaggactcgcatgtcctaagttatcgacttattataggatgtatgtataagcgactcgaacaggacgcagacatcccaaactcgattggtcttttatgcatgttaagcttgcgagcttatgcaagagcatgaacagacaactcgtactatagaagtcgcatacgttgctgtatttagtgaattgggccgatactgttctttatttattgaatttaagtttttattgatttaattgttatattcaatgtacaaatggattgataatgaattcaatctctgtgtaatcaaaggacacttgctttgtatataaaggagtgatccaacgtgaaatagaggaaggtagaaaacccttgcaatagtggactaagcagaccgtgatctgattgaaccaatatattcccttgtgttctttatatttccaatacgtctgtgtgttcataacttgaatactcacaattctaggttgagtacttgcacattttctgcgtatatctttattatattatttaa

SEQ ID NO: 386281 - DNA, 1177 bp, Cannabis indica
gcgccagtccagcttgccttctacactatagtttacatatgtaacaaacaaagtaattagtaattatgtatatacatgatttgtcccttaaatttttcttttctaatttacaataataaattaaaattatttttaatataatttgaaataaatagtattaattatatattcaattagtaaattaattaatgttttttagtattgcaaattattcagaatttttttaaaaatttacaggtgcttctaaatagctacaatatatgtgattatagaaaaaaaaattaattaaaaatttccaataaatagtcaaacactatttattagaaattttaatttgaaataaaggattatattcattatagattcaattagataaaggattgattgaaagtaccctttaaagagtgtactatatacttaatataatattaattttagtcactatatcaattttattttattttttttatttttttttaaaagaaatcactatgaattttaatattatatattaatctatttgtaataatgtaaatgtatatagattcatgaataattgtttatagaattattttcatcaattgtttttattataattaaaataaataatatatatttagggtatgcattatattcataaagctaaaagacaaaaagaataaaaaatacgatagataaaagaaaaattgaaaggacacggttggaaatagatctaaatattagacgaatgttctgtatgaaagcgtatatggctatatgctgccttagccatagtgtatatgtaccgttattcataaaatacataatttaatctaatctgtatcatctaatctaatttattccgtaaagtgcagatatataaaaaaaaaatagattaaattaaaaaataaaaaatttacacttgtgtaaaataaacgttgattggcgtgtaaaaataactaatttaatctaatatacacatttatatatatattaaaaattttatatatacaatttacattttaatataaaaatataataatttaaaaatctaatacatatccacaaatatatttcaaaacataataaattcaatgtataaagaaaatataatataagataaaattaaatatttttttacattataatttttttccaattttcttttggtattagttattttttatttttacttttt

SEQ ID NO: 386282 - DNA, 1221 bp, Cannabis indica
aacacctctcttcttgaacttttataataaaagggttcactgattcctgaacgggaattgtacgcatggcacgggctcttgatcgagttacatggcccgtgtaggaggtaggcttaacagttgaagtgacttattagtcggtatccctggaggaacatccagtcaccatgttcttttcgaaatgagttagggcttgctttgggaacccttacactgtcacttctagccttgcagttgacagggattacgatcggaggcctaatcggcgtgcctcctattaattccctcgtttcaagagggtttggtgaaggtgaagtttttgtccccctcttgccttttgttgccttcctacctctccgagtttgagaagtcggtgttgcctcagtttcctccgtggagataaccatcactgagtcaacagtgggcaagaaaataggaatggaaccaatcaagttacgctcatggccccattctttttgggtcattacaggggatccaatcttcattagcctcccttctgtcttgacaacctttgtcgtggatcttttcattgccccggcttgcctctttttaaagccctttgctgctttgcctctcaaggcctgcgcagtcttagggatactcttcacacctttccttcttccagccttttctaactggtgtaggtgtcttcacattctctactgattcgggtaccctgcatcaaatgggtgctcgatcgatggagaattttgccaagaaacggttcttgttccctccttaggcagaagagtttgttaggagtttgtggaagtaaattctgacttgtgtggccattttttcctgaaaacggtaaacatgattagcaccataaaattaaagttaaataatagtcatcatagttggagatgaaaaggcgaatgggtcccactgggcgtgccaaaaattatgttaagcaaaaatttcacatttagaatataaaaataaatgcaaaacacaatttcacctatgctaaatttaaaacataagagtttattaatttatgttcgacccatccaagattataaaaaataatctcttaattacaatcctttcatataaaggaaatactttttgattccaattacgatgatattaaataattaaaataatttgggaaaaatttggggtgaatttagaattgcagctgaactcagtcaatttaattaaccgagctgcctacataccttcttggtgaaggat

SEQ ID NO: 386283 - DNA, 1684 bp, Cannabis indica
aacggtataaggtctaattagtaaattattagtactgcctatgtatagtcattttataaatggaatcaatcaatgaaattgaattacaattaggagtatttttattgggagatagacacaaaatctcgaagagtgcattttaggagatttgtcttgtctcgaagaggactattatctaacattaggcgatctttgttctttccttaatgctttgtttggaatttggagttgtgtgtgggaaatgagcaggagaaagaaagagcaatagaattttataatatttcttttggagcttctcttttctaatatatatttgtaaaagttttcactatatgattagatcaaattgaactctctcttaaccaaccaagtgaaagtagaacactagaatttcttagaccttgtttagactttgaatttttagaaaaattaatttaagtgtagtataatttcatgacatttagaacaattacacatatatacagatttgtagaaattattttcctctttattttctcgaatttccagtccaaacaaagcgttagatatcattttatttccctcctgaaatctaagtttcaaacatagccttgatttcttgtgacagtttaagtctagcaaaggtcaaattcacttatgctttgagcttacgcttatacttaataaccccgaaatctttccagggacctaaaccagaagaaacagctacggcaacctctgaggctgcagccaaaccagtcgaggcaactgaggctgccaaacctgctgcctcgacaacaaccactgcttctggagaatcaaaagtatcaaccgacaagcatcgaaactacgctgttgtagcgggtgtggttaccgcttgtgctgctctgggatggtatcttagaggcagtgagaagaagcaagaagttcaagactgagaataactcggtcttgtcccgaaaaattacacaataacctctgcaaatcatatctcttctggttttcgaaaatcggaagtggtagagacacaataaatctgacttacattgttatatctctttgttgttctatagatatattgagttggcaatatatcatgacctttcttttctctgtttttgaaaatatttttttgattgaggagttttttgttcatattcagttcagctaggctagataagttaattcatattatgattaatataaaccagcaatttaggagtgttcatagattggtttggtctgaatttttatatttttcaaaccaaactagtataattgttttttgaatattagaaaccaaaccagactaattctcaaactacaccaaatcaaaccaataagaacggtttggtttggtttaaaactacagtttaagcggaatttataattatttattttaagtaattatattatttataaggtttttaattttgttttcaaaatatatatatttaatgtgatgataataagttataaatgataaataacaatataaaaatattttaaaaagttataattcaatcattttggtaagtcaatgttttaggtaattaatatgttaaattataatataatttttacatcacagattttagatcaaaagaagaaaaattttaataataagaagatgattgtatcaagtaaaaatgtgataataaattattaaattggactttttgaaagaaaataaattatttctcaa

SEQ ID NO: 386284 - DNA, 1463 bp, Cannabis indica
ttattttattttattttctatgtgagcatttttttttcaattatggaacactcttaagcaaaagtacttcagtttaaagatgggaaaaaaacaaatggcatacataatatctaatgtttatcggagttgtgtgtctgtaaggctacaggtcttgtagttgaaatagcaatggcatcccttcctcttctagtcgcagcccatggctgcgctgttcggtctacacctagaccaacggccccagcatttcctgggtttcatcgccccaccgaaacaactcagactcttcctaaacttaatccaaactttcggagtctcactttcaggtatatctacaaatttattgggttttgttaatactcaaaatacagtagtagtcttcgtatcttttcaatttcggttgcctaaaacattcatttaaatctaacttcttttctttgtcaaaaaaattatgaatatctggattagtaagaaacataaattgaaggatgtagtggagtaaatggggagtgtagttactgtgaaatggtaaatatctcttttaacttatacagaatgacacaaaagaaaatagacatcaccaaagttcagagtgaagaaatggtattgtgtgtatatatggagggagggtaaagatgcaggctcttctagtacataaagggctggtctaaatctaagccctgaagagtagagcaacccttcctaggttgttgatttcatgagtagagaagtaagataatgaaagaaagaaaacactctttatatggatgagattttgtgagagataaatagtggaaacagctgatgtgtttagggtttaagctttaaagctaatggatatgatgaagtgtctaagtataataaagtgtatttaaggaaacaatattttacactcatatcatatattttaacaactcgattacacaagaaactcccaagagaatctcacacaaagattcattctaagaaaagtctaagacttttctgataccctaatcagatagctatttaattttataggcaagctttgagtaacagacttaactgaaggttgagtagtaaccaaacatagtctgccatctgtcaaatcagaacaagtggctagaccacttcacaacagatacaatgatgtttaaccgtgaatgtcgactattgagaaggtaattgtatcactgaactcaggagtctaactctgaagtttgactagtgacaaggtaaatggtagtggcattggatagctaggatacatgctgataccctcattcaatataaaagaaccaagaaaatatagtacatattcaggatggtaaaaactactgttgtaacttgtaatgttttgaatacggaatttaagtttgtgtctgaaggaaattctttaattagctatatctttcttggtcataaaagttttttgataatttttttttggtacgttgtgttagtcctaaactcttgagttgtattct

SEQ ID NO: 386285 - DNA, 1021 bp, Cannabis indica
taaaaaaaaaaaaaaaaacttgagtagagcatcacgagttgtattcagaatttaaaaatgaaacaagactttagcaagctagagaccttgggattataatgtcaactttaatttaacaattacttaatcaaatgagtatatccttcttcctttttttcttttcacaaataaaaataagtgttcattcagtattattatatatataataaatataaaggtcactattcaatgttatattaagattgtaattattatagttacatttttatatgacttactactataagagaatctccagagggcatattaaatttggtgtcacactatcacaaaatttagtgtcaagaaatattatcattccaaccataacacaaatattacactaaaaagtatttcttataattatattattttttaaataacattaaaaaataatatcatattaattaactaaaatcaccacaatgcacctcttaaaataaaagagtcattcgtgcaaccgatagtttaaactttattttcagggtgttaaattttttcagttttttaaaatttaacaagatgtcttaaataactataatgtaaatgaccatgaaaaacaatagactaaaaaagtctcttgaatgctgaaataagtaggtgcacatcagtgcaccacttttaaaaaattacattactttcagcgtgtattaattttttttaattttttaaaattttacagaatatctttaataactataatatgcacgattataaaaaaatttggactacaaaaatttgttgaatgtcaaaacagataagagtacatcagtacattacttttaaaaatgtgcattgtaaaatttctcaaaattaaattcttaatttcataaatagatctaattaataatataaatatatagggtaaatagtagcataagtactcaaagtgttatgtttataagcggcataaactcaatgtttatttttagcggcataagtacccaatgtttgtaaaactataatttttctctaattttgt

SEQ ID NO: 386286 - DNA, 4890 bp, Cannabis indica
cctaaaaatattttatttcatatgatacaaatattacatacataatctaatataatatctgtaattaataaattaatcttaatttacctatttgtaataataaacctagcttatcataattaaccaagtaaaattatagtcttactcatctattctcctaatacacatattacttgatatttcatataatatgcttcattaattagaattatatttccagaatattacatttaccatttatcacatttattaatttaatactattttttattttaatagtcatcaaacacaattataatttaaatatatttataaatttagactcagaaagtgtcttaattaatacataatcttttatttatctcttcttctcaaaatggcacaaactaagtgaaaattctcaaataagacataatctattctcgaaatctaattaatttattaaatcaattaattgagtctacaaggtgatattattacagataatatggggaccatgagtctatgaaataatgctctaaataagtagatctaaaatttaccgagtaaattttctaacttattaatttctcccgactccactgtaaatttgaaattagactcttgatacatagaacgctctatatatctaatattgatacgctatgaattatccattgtttcgatttaaataatcattgatcctctatagttgatttacatcgaacgaacaaatttatcattttacctatcaacgtattttatccttaaaacacttacttcttataaataatatttcaggtaactaatataaatactgaaataagagctcttccatttattttgtttggcaaagatctaaaaaaattatcgttttacttctaaatagttatagaaactatatatagattccctatctatggttaacgttcccactcaattgtactagcgagttcctaagagttaagtatgggctagtccaacaggtaagttggtaacgaacaagttaaaaaactttaatactacaattaggctaaagcttaacaatctcaggattgagatcaattgatctaagatcaactaagtgacattgacttagaaaatatataacgataagtttatgatatcttttctactgtcaatatgggtccagtcaggagtgcctttcgccaaaatcatcactggagctgatcaagaagcaggaaagcatcaaggctgatttcaattttttcttagctgcaaatcaagcttgctctgattcactgtgaaagggattgcaagtttctcctcccgttctccgatctgataatgtggtaaggaaccttgaaacctcttttgataagtctaagaaagttgataaggtcaaaattacacttgaagatatagaagaagaaatttctttttggaattctgctctagtttgctatgttttgggagcaaaccctcctctgaatgtgttagatggatttgtaaggaggttatggaaggaaaaaatagataaggttggaatgttgtcatatgggattttcttaatccggtttcatagtgttcaggatcgggatgatatactcaatgggggttacacttttttcaacaaaaggccggttataatgaagccttgggatcctaatacaaattttaaaaggaggacacaagcaatgttcccatttggattcaattggatgatctagaactgaaatattgggggaagaagtcgttgttcaagatagttggacagctaggtgttccgattatggtggatgatgttacaaaggagagggacaaactaagctatccaagagtactaattgaagtctctatacaacaagagttcccagatttgatttactttgaagatgaatttggatccaatgtatcagtggtggtcacttatgaatggaaacctaccatttgctcccattgcaaaggaatggggcattccatgagtgagtgtcaaaggaaggagggtaagcaacatgagtaggtggttaaaaaggataatcggaaaatagaggctaaactgaaaacagaggctgatggtttccaagtggtcacaaatggttggaaagtcaagagtaaggaacctgggaagaatactgaaatgtctaatttttatcaagctcttgatgaattagaaacagctacagatttaagggaagagaaggagattgacgaacaagtagggatgattctggatagcaaaggaggagggggagagcctccttcttctaatggataaaatccttgcttggaacgtctgagggatcaacagtgcgcaaaagcaaaaaacagtgaagaacttcatttcaaggaatggagtggtttttggttcctcaaggctccaacttggagccttatatgtaaatatatttcaaggttggtgtttcacatcgaatatagtgtggcacaaaggagggaggatcatcatagcatggaatcctctaagtttcactgtaagtatattaagatgtgcaagtcaatatgtgcatcttttagtatctatagctgatcataaacataccttccttgctacttttgtttatggatttaatggagaggaagggaggaagagtctttggaaggaccttaaggagatgtctaggactgatccgtgggtcctatttggagatttcaatgacatactagccaaagaagagagaattggagaccgagtaagacataatgggaataatgctttcctggaatgtgtgaatcagtgccaattagaagatgttaaatacagtgggagttattatacatggagtaataagcaagatggggcagatagaattttttcaaagatagatcgagttcttgctaatcagaaatggatagatagatttcaaatggctgaagtgttttttgcgaatgaagggttgtttgatcatacccctgcactcctcaaaattcatcctgagagaccaagtggccgaaaacccttcaagtacttcaagatgtggagtactcatccacaatacaaggctctgctggaaaacaaatggaaggaaaagattgttgggacttcaatgttccaagttgtgtcaaagctcaaggcattgaaaccggtgtttagagagctgaacaaaggtggtttttctgatttacaacaagctgatatccaagcttctgcaaggctggctgagtgtcaatctttgctgcacaataatcccctcaatgaagagctacaacgacaggaagcaatggcgagaactcaatatgttgaaatacatagcaattactgctctttcttgtagcaaaaggctaaattgtcatggttgaaagatggagacagtaattctacaatgttccatgcgtacatcagagaaagaaggaccagaaataatatcctctcgattgaaaaaagaaaagggaaagagttgaagaaccggctgagattactgaagcctttactgaattttataagcagctgctgggaacccgaatgcaagatgggaaggaggtcaaaaagaagttggtggagttgggtccggttgtttctagtcagcaggccatttatcttgaaggaaatttttcaaaagaggaggtaaaacaagcaatttttagtatccaagggattaaagccccgtgtttggatggatttagcagctccttttttcaggataattgggatttggttggccatgatgtatctgaagcaatcctatcagtcttaaaatcggggcagatattgaaagaagtgaactcaacagtgctcactctcataccgaagatcaaattccctaacaaagtgagtgaatttcgccccgtagcttgttgtaatgtcttgtataaaattattaccaagttaatatgtagcagactcaagaatatattgccagatttggttgctcagaaccaaggaggttttgttcaaggtagatatattgcccataatataatgatatgccaagatttgccaaggcattatggaaggaaacattcaaggcccaactgtatgattaaattagaccttcaaaaagcatatgacactcttgagcggggatttctagaggagatgctaattgctatgtagtttcctaagaagtttatacaattgatcttgcaatgtgtgtctaccccgaggttctctcttcttttcaatggctctcttcatggttttttcgaagccaagagggggctaaggcagggagatcccatgtccccgcttctttttgtacttggaatggagtatttgagcagaataatgggagttgtgggaaagaaaaaggaatttggatgtcatgaaagatgcagatccatgaagctaacacatttgatttttgcagatgacgtgttattattttgtaagggtgacttcagtagtattcatctcatgctacagggtttgaagctgttttttcaaacttcttttgcttcctaataatagcaaatcggcaatctattgtagtggcatggaggagaaagagatccaaagagtagttaatgtcttgggtttcactaagcaagaggttcctttcaagtatcttggaattcctatatgttccaagaaaatttcagcagtagagtgcaagatccttgttgaaaagatgactggaagaattaaaacatggagttctcggaatctgtccttcgcagggagaagtgtgttgattagttctgttcttatgaccataaatacttactgaagccaaatactgcttcttccaacaaaggtagttcaggaaatagagggtatatgtagaagttacatatggaaaggtgcaagtcaaatggttgggctaggaaacattgcttgggctaagatttgtaagccaaagtcagcaggagggatcggcttcttgagtatagctgattggaacaaagctgctttaattaagaacatctggtcaattgcaacaaaaaaagacaacctgtgggtcaaatgggcccatagtgtctacatcaaaaatg

SEQ ID NO: 386287 - DNA, 793 bp, Cannabis indica
gataaaatactcgggacgtagcataaggctttctttaatttgctaagtttaaattctttgtttgttaattttgattttatttttcttaagcgtgattgtttaatgtatgtggactcattagtttgtcgggctaggcagctaaatactagtgtgacctttaacattggagaaaaatatactgctgtggatcctatttgttgtttggcttaatgaaacttttgtttctaaaaaaaaagaagtattttattaggggtgacaattcatgatcgtgagtcgtatttgtgtcgtatcaatacccatatataacagttatatgctcgacttaacacgatccgtttaataatcatgttagaaaataaaacccgaagacgactcgtgtaatccgtttataagtatattttatttaaacatgtcaactaatactaaaataattttaaatagattataacgggtcagtttcgtgtcgtaggttaatcaaaacacgacctgtttattaaacaagttagacgagtcaacccgaacacgactcaaacccatttaaggcaaactcaaacctactaactctcgtacaagtttcaattcatgttatcgtgtctgacccgtttaccgaccgtatacttcatactttttttttttaataataatagtggttcaagctttttactagtaaccaaaaacttgttttcttaaaagttaaatatgttaaacattttataatgaaataaaaagttttcaattgtcttaaaatgtttttatcgttcttcttaatttttttttttttttatatttgaag

SEQ ID NO: 386288 - DNA, 755 bp, Cannabis indica
atgtgcattttgctgcgatttccatttgagccccagagaaattccttacaacttttatcaatggcagcagtcatctttaggggaagcataaatagattcatccagtagttttgaactccaaggaggaccgaatggatcaactgagctctacctgcaaatgagagattcctgctagcctaattatgcaagtgtttatggactttgtctaaaattatttcataatctgaaaccctccatttagttggccgaagataaactccaaggtatttgaggggaaagcttccctcatccatttgaaggatgctcaggagcttttgtttgccatcattctgaattcctccaaagtacaccgtgaacttggttttatcggccattaaacctgtagcttcactaaaccgttggaaagcctcgttaacaagatgaacagatttctcattacccctgcaaaagataattagatcatccgcaaaaaacaagttgacaaggcctagagatttacatagaggatggcaaccatatcccttctccttcgtcttttggatgagtaatctagtcaaatattccattatgagcacaaagaggagcggagacataggatctccttgacgaagacccttctctcctttaaaagagccctggactcttccattcaacataagggagtaagtagctccatgaagacaactttgaatccacataatgaacttggatggaaagcaaagcccttaaagatcagcaacaaagttccagtccac

SEQ ID NO: 386289 - DNA, 2694 bp, Cannabis indica
tgtttgagttcttgaaaagcacacacttagatctaacatacaccctgactgaccatagaggtcttgttcaagacttggccagccatgggtcttcatcatggagtctggccagccatagggggtacccgaaaagctggtcggcccatgcctgggcatagggtccctggatggcctttggctgggtcatgggacctagccgaccctctcttaacttggggaccctagtcggccaaggccaaggttccaagtgggtgaccaagtatttatcctcttttgacctcactaagggtctcgtgatgaccttgtaggcatatacaattgtaatctcatacgtggttcccttgggaactctgtataagacttggtagtgagtccattatagtcgaatgcacaacttaggattcaccatttgtctaagtaggaatacttgagactgtacttcattgatacccaaccttgtacaatgtaatttatctagcaagtacccttgggtacgactggccaaaactttgctcataccttgtagctttgtcaggttgctcatctcccattgtctcttctatgtaggtgattttgagtgttggtctgaggaggtgacaaccgctttgtcataagtccagtcagtcttacttttaagagataacatccaatctgtcctctcgccaatttttgagtgatctctggactgatagtgatacactatggccaaaactaggtggtcgtatcgtagcgcaccatcatctaatcctcacattgctagggtggcaacgatgagtagggttgacatagtggaggaggccacacgacctcttgatgatagagatttagaggtcagccaagcagaggtgcctatggtcgaccaaggtgctgagagtctggacaccgagttcaaggtggaggaggttgctcctgttaggaggaagatgtacatgacttgtgacatcttctcaatagccctctaggctcatttgatgatgataggcagccattgaatgggcttggtcagccctcaatgataggtttagaccatgtcttggtacatgcttcatagccttaggttcttgatgttgggtcacagggagaccggtaggtctctccttcatttattattattgttgaggcttttgatagaatattagaaagtggactagtgagaggcgtccaatgtgaggtgccttcgagggatcagcaagcgcactagctagcctttggttggatggcaaagttagagtaccacatccagtagggggaagtgtttcctttgcacccatatttcaaagacatagcagcttacttcgagatgtgtctgacacaaatcaccccgaaaagtatcaagtacctctcagagatgtttgttctctatgaagagctaggttgtcctcaacctactccatatgaggttgggtattattttgatttgaagtctgctccaagcagaactaggcggggtacttctacttcacccaggttgactaccagtggttgggtgacaccaacagtacacctctatcaaaagttaggggatatgcctggaattacttcattgcctgggatatccaggaggttcgacactacctcttctagcgagtgcctacctacaagcgctccatccctactctacagattagggataaaacgaaccacatcctgtccctccccatagagaggaggaatatactacggttggccaatgtagccaacttttagagatatggcttgtatccccttgcatttggagttgtaggggccgagggcccatcaggtggtgtagatggagcctcagctactaaggaggtcaacccaggtggtgggcatgctcctgacatggataatgatgtgcctctatctcgaatagccaaggatttagaaaagtgagagatgcccctccgctagcacttggctcatgggggagggcaccgtggaagatgctactctgtggatccggcctagaggccagagttctgttgggccaactcgccccttacctccatctaaaggcaagggcaatgcggctgctcctgattcagtttattcctcttttgaggatgatggtgtttgatagttgattgcactatcttttatattcttgtcttgcattgaatattttataacttgtattctaactttgttactttcttcctataaatatttcttccagattttgaggtttagctggtggaccttcagatgagcctttaggtcgctcgagggctaaggtggcccagaccacccattctagtgacgttgcgtggtcatcccttcttcttcctcctcctaggcctatgctagttgggtagcccatgattgttgaccctccatcaaggagggatcgaccttcgggcaagggcacccagaagcctagtcgaggagcaggtttagccatggggctgagatccatggaggcagtctgtaggcgtctggacacagcctttcctattgtggataatgagctttaagagcttggtgatggcgagtcaaagaggttttcttcttcagcctttaagagttggccccggtaagttacacatttaattttgctcttttttatgttattgtagactggataaccataggggctattgtatgaagctggccggccattattgtgtctttgaaaggctaggcagccttggtagcaccatagaggggctggccgaccagcgttgtcttctggcactaatcttgaccttattt

SEQ ID NO: 386290 - DNA, 1864 bp, Cannabis indica
ttcaattctctcaccaacacttgcggggtgtaattgaaagcgaacacattttgattggtcaaaagcccatctagaaatggaccaataatgaacagagtcatagcttgataggggcaagactgatacagaagttgcgttgaagaaactttgaacttcttctggatagtgtttgtcatctgaataaactgttaaagaaaaatagctcatataacaagttcgatcatgtgtgacttggaatactttgttagctaaacatcttgtttcttatcatagatgttctgcctagataccaaacatataagttttttaaaaaaataaatggaaaacttgaaagttcacaacagtttaggatacaatctgagcaacacaagttgtaagaactgcaagcagggacaagaaggatcccagggcattgagctgaagatcagtcactgtagcaatcccaacccccataagaaggattataagtgaaaactggatggtcctactgttaacgtcgaaagaagtatcagtaaccagtccagataaataattcattttcatcgtgtctaaaccttatgcaaactgtcctagccagtgaaaatgaatataaacaggcatgatataatattcaaaaatttagggacagaaatagaaatggacattctattgctgatagctacacataatcaaaactgaaaatccattaaataaataaacataagatgcatcaaaaatatggcaaatacatcatgctgaaaaacgaaaaaatgataaatataagttcagtgaattggaaatagaaattctatggctgatagctctttacatagtcaaaactgaaaatcgattaatctgtctgagaggagagaaacaaatcagaacattagagagcttgagatttattaaggaccaaatatcatgccaaaaaattcatcaaaagcatcctaagaaagaatgcatgagaagagctttaagccatgaacattagaagaaaaatgtctaattcaaatcaagggatgaattcctaaactctccacatatgtagaccacattctatctacccataatattataagtaatagtacctacaccaaggttcagatgctaagggaaggctagtattgattaactcatcaatacaaattttaaatttttcatataaccaacgagcaagcagaaacacatcaatagtattacaccaataggttgaagtgtgattcactgacctgaattgcttcctaaagaatatggtctctaaaaaaacagtgcaggggatgattgccaattttgtcatctgaaatgaaaaagttagaggtaaaagttgttcaaaaacttgaaattcaaaatatatacagtgtattcaaaataccttagcccaaaatctcagaaacaataaaatagaagggggaagaaaaaatatcagcctaattatagatacatggagttcaatctatttttgagaactcccgaaaaacaaaatgtagaaacattgtcataccattagagaaagataataaaccaccacaacaaaaaggatatctttagcaatgaaataaaagcatttacaggaaacgaggaagaaaggaaaaaaaaatgctttatttggtctagtaaattgtcctacaattcataatcaaaatgtacattctacccaaaaaaaaaaggttcaacctgatagaaaccaacagagttgaaacccaagctaagattcagaagtccaatggagattccatttagtacaccaaatcccatgacagctcttgcatcaaaaggcttatgttcaaacagtttcatccatagtgctacgtgaagcgagcaaaatgtgaccaaaagatgccagcttgtcaaagttgtagctgttcattaaaattctgaattagaa

SEQ ID NO: 386291 - DNA, 903 bp, Cannabis indica
ttttttttaaaaaaaaagtgggtaaagacgaatgaaaaattaagaaatggggctaaaatgatggtggttggcgagggttttcgggtagaggctatggtttgaggaagattaagttgtgcatggggttatataaatcctttacggtcacttattaggaactaaccaacgacataggggaaatgtgtcaaccaacgcgtatccctatgtcgtcgattatttcctaataactgacgctatattccttctcatttccaaaccacattgaaacaaaaaagaccataactatagcaattaggtacactttatagctacggtttttatacataactgcatctaaatctcaattttcaatgagcaagagtattaggatttttagcttccctttttaattaatcttccaaaagaactacctctaaaaggttgttttgtagtagtgctttgagttttaacatcaaaattctaaaataaattatttggtacactagatgtgattatctgttggagaactaaagattagaaaaaaaaacaaattgtgaaaaaacagtcaataatcatgaaaatggattcggtcacgatggttttctttaaggtttttaaggtttcagtgaagagagtgaaggagagaagagagaaagtgataagggaaaaggccgcaaaagacattataaaacacctatgtatttggttatttgggaataatcgaagataaaagcgccatccaaataatcgaagacatataggacttcgattagcttttcagctctgtgtgcaagcctttgaaattaccctctttccttttacctttaatcttttaaaaaaaatcaaagattaaactaaaattttattgagcaccgatcgagcaaaaatctatgaaacaagcctatgacctatgtctttgatttt

SEQ ID NO: 386292 - DNA, 1248 bp, Cannabis indica
aaaaataaacttaggaaactctcacattcacacaatgtaagtgtaataaagttcaacattaaaatcattaaaccaataatatttactatcacactattttaaataataataattaataacaaagaaaaataaacatatgcttaaaatattgtttttagaatgatgacaagtcataatttcccgccaaaagctgtacctaaataagattagcattgcctctaaattctagccttttatgtctcacaaattacctaatttggaatacattttttttttcttatacattgaccacctgaaaatcatatttaaaactatctctaggttttcataattttcttattttgggatttgttgtatcaccttattgtaaacgatgatcattcgatgaggtaagatcaaaagaaaaattcaacaatctcaaaatcaagaaaatgtttttatttgtgttataattattattattttctcctagattacgaatatgatattgttgatttttgttaggaaagaattaatgtgcagaaaaggtcagcctgctcaaaccaaaaggtgttttagagatgaccatcatataaaaatgtacatatatttctaattattggatcaaatgggattaaacttttccaaacaagaggtaattttgaaggaagatctaagcttacaacatcatgtgatcaattatgtgagcaaaagtctttatattcgaaacttgatatcaagacagagaaggagaatgttggttgaggggtatgatcttgacatgtcttacattacagatcgtttactagccatgtcattccctgcagaacgaatgagagccatgtttcgcaatcctctttggcaggtcaagtctgttcttgacatgagacatcatgaacattacaaggtcaattttcaaccataatatcatctctttgtttctttgtttttaatggtacataaaaaatctcttgttttgatgatattttgatagatctacaacctctgcattgaagaaaattataatccatctcactttcatggccgtgtggaagcatttccttttgatgataatcatgttcctcagcttgaaatgatcaaacttttctgtgaaaatgtgtcttcttggctttcatctgatcccaaaaacattgctgtcatacactgcatggtaatttccttcctcaattgtttttcttttgggtaaataccattttcaactcctgttttgttaaaggacaaaatggaccctatattttctaaaatagt

SEQ ID NO: 386293 - DNA, 2445 bp, Cannabis indica
cttaacacctccccgcaaactcagtattggagcaatcgacaatgttgagtttggatcgaaattgaggaaagtgttggctggaaattgccttggtaaagccatctgctagctgatcaatagcaggaacgtgtttaacagcaaccttgtgttgctgaaccttttcgcgcacgaagtacaagtcaagctcaatgtgcttggtacgagcatgaagaaccgggttcgcagtgagcatgactgtacttagattatcacaccaaacaattggtggttgtagcagctgaacatgtaattcaaagaacagtgactgaagccaagttaactcagctacaacattggctaggctgcgatattcagcctctgtacttgaacgagaaattgtgtgttgtttttgtgacttccaggcaattaaattcaagccaaagaatattgcaaaacctgaagtagatcgacgatcatcaatgtcagtggcccaatcagcatcacaaaaggctttgatttcaaggctagaagacctttgtagatgtaatccaaagtgtgtagtgccagcaacatatcgaaggattctttttactgcaagccagtgagattggaggggcttttgcatgaattgacataccttatttacactatatgaaagctcaggtcttgtgatagtaaggtattgtaaagcccccacgatcgatctatacatttgaggattgtcaaaggcttcactgccatgtgcagagagcttttggccactgatcatgggtgtattgattggctttgcatcttgcatctgagcacgagatagcaagtcttttgcatacttgttttgacacagcagtaaaccagtagttgtaggcaatacctcgattccaagaaaatatttaagtgtgccaagatccttaagtgagaaattctgatgcagattctgaattagagaggatatggcttgagaatcactgcctgtaatcaaaatatcatccacatatactaaaactaaggtaaccgaagttgtagtatgatgaatgaacaatgaatgatcagattttgatgagatgaaaccaaaggacaagaggcagtgattgagtttgtcaaaccaggcccgaggcgcctgttttaagccataaagggctttatgcaacttgcaaacaagatgtggttgtgttggatcctcaaacccaggtggctgtgtcatgtatacttcttcagtcaaatccccatttaaaaaggcattgttaacatccaattgccttatgttccatccctttgatatggccaatgtgagaacaactcttatggtgacaggtttgacaactggactgaatgtctcagtgtaatcaaagccaggttgttgatgaaagcctttggcaaccaaccgagctttgtacctgtcaagagagccatcactgttttccttgattcgaagcacccatttacatccaataggttcccttccagcaggcaaaggaaccaatgtgtatgttttgtttctcacaagagcaagaatttcatcagacatagcttgtctccatttctcatattgtaatgctgttttaaaacttgttggtatcttttcagagaggtagatttttggtttgcgaatgccagctttggctcttgtggtcatggaatgagtattggtggctggaatagattcaacaggggtaggctcacttgtattggagggattattttctggtatagggatggaaacagaggcaggtatggaatgagaattgagtggggaattaggaggttcattagactcggttggaaactgagacacagagctagaagactcacctgcttcagacctggaaggatgagagtgagtagatatggattggtcagtcacagtagttgatgagttaggtggcacaggtattaatgcagatggtaagtaactgataggtttagctgaggcagcagaggttttgtgtgcatggggaaacactaactcatcaaagataacatccctagagatgtagacacgactattagaatctaaacacttatatcctttatgattgatgctatatccaagaaaggtgcagggtgaagatctaaactgtaatttgtgtttgttgtagggtctaatgttgggaaagcactgacatccaaaggttttgaaggttgtataatcaggtgtgatattaaacaacacttctattggagatttgtttccaagaactggtgtaggtaacctattgtggatgtagacagctgttctaaatgcttcatcccaaaattttaatggcatggaagcttgagcaagtaaggtgaggccgttctcaacaatatgtctgtgctttcgttcagccaaaccattttgctcatgggttgtgggacaaggatgcctatggattatgccacattggtttagatatgaagtgaaggacctatattcacctccccagtcactctgaaggcttttattttggtgctaactgagttcagctt

SEQ ID NO: 386294 - DNA, 3141 bp, Cannabis indica
ccaatcacatttagagaatctgactcaaagcatgttgttatcctcacaacgatcctcttgttgttaaggtacgcatagccaacatgatggtggatagagtgatgtttggcgatagagcatcgtcaaacatattgttcaaacaaaacttggagcggatggatttgtttctccaggacctggagccatgcgatcagttcatgtatggctttagtggggatgtaattgctctatataagaaaataaaattaccaccgactatcaacactaccctaagtcagaagaacactatggaaacgttcatagtagttgactccaagtctacatactatgtgatgatcggaaggccagtcttatacgacctccgagccatctcgtccatataccacctgtctgtcaagttcagtcagcaacagacattggacgcctacttggcaatcaaagaatcgctcgtgagtgttacaacacctcactaacacttgcaaagaaggcctccccaactacatcaatagctaaggggatgaccaagacctctcccgccaaggctagagagacaatgaaaacttttgaggttacaaccaaggagacgacggagaccgcacctaagactacttgaaggtgcacccaagatggggaggacattgatccttattttagggatattgaattgagagttggtccgaccgaggaactcaaagaaactcccctcacaatgatgacccagccaaggttgtcaagattggaacaaacctggcagaggctttaagtgagatgcttatggctagcctaaagagaaatcaagatactttttcttggtcccatgaggacatgatcaggatcgaccccaaggtcatatgtcatgccctcaacatcaataagagaacttcaagcctgtgtagtagaaacgcaggctccttgacaaatagttttccaaatctatcaaggaagaagttgagaggttgtgggaaaataacttcattagagaagatttctaccaggtctggctttccaaccctattttggtgcccaaacctaataaaaagtggaggcatgcgttgacttcactgacctagacaaagctttccctaaaattttttttttactccctcgaatcaatcaactggtggacgatatagtcagccatttactcctcacattcatggatgcttactccagctataaccaaattaggatgtatgaacctgatgaagagcacacaagcattcaaacagacattagactctattaccacaaggtgatgccctttgagttcaaaaatgatggtgctacgtattaaaaattagtcaaacataatttccacaacttaaatgggaataatatggaagtctgtaacgattatatgctggttaaatcaagaagatcataaaaccatattcatgatttggaggaatgctttaacatcctacagagttacaagatgaagctgaataccctgaaatgtgcttttgacgtccaaataggaaaattaatcgggttcatagtcaattcaaaaggaattgaggagaattcaaaaaagatcaaggtactgcaagacataaagtcaccatcacgagtgaaggatgtgtaaggcctaataggacaaattgacgtactaagtcaatttgtctccaagtccattaacaaatgtattattttttcaatctactaagaggaagtaataagagatttgagtaggctgatgaatacgagcaagccttccaagctcccaaacatcatctatcaaagccaccaatcctatcaaaactagtaagtggcgaagaattattcatctacttggctatcactgagcatggagccagtggaactctagtgtgtgtggaagaagggacacatcaactagtatactacgtcagcaagtgtctcattagggtctagtctaggtattgccccatttataaattagcttaatgtctagtattggtctctagaaatttaaggtcatactttcaagcccatccaattgaagtgttgactgaccaaccactcaggcaagtcttgatgaagccagaagcattagtacatttactaaaatgggcagtagagcttggtcagttcgaaattttctacaagcctcgcacgacaagtaggggccaagcattagctgatttcattgttgaatgcactagcctcaaagaagatgatcccatggtttgtgaagaccagaaccccatgcctaggactacagcccaggaaggttctagacactctttgaagctttaggtggatggatcctccaatgaggatggctctgatgcaggcctcatccttgtaactctcgaaggactttgcactcactgtacactgtggtttgaattcactgtaacaaataaagaaccagaatatggggcactcctagtaagactttcattggcactggcgccatcaaagctgaatcactaagatcaatagtgattctgagcttgtcgtcaatcaaatcattgaaaaatatcaagtctgagggctcaaaataatagcataactgagcaaagttaaagatttgttaactcatcttaagcactacttcattgaacaagtgccacgcaaacaaaacaccaatgttgatccccaaagaaaaaaaaaaaaaaaattgtggtgaaaaagagtgagaaaggcagtgagagaggcgatatatatgtttgtatacactgtataaaaaaatgtgattactatagataatttggatcaccttacttttggaattatgatccgaaaagaatagtgtcatgtaaaaagtatgatttattaatttatttattttgctaaaatgaaaacaattttattaatgaagagattaaacctcaaatacctaaagggtcaaacaacacacatccagatggagtattctcaacggtgcaatatacacaccttcaatctagtaacataaaaagcttctccaattcattcttcttcataggattgagacactaaatcagtgacataaattaattttgataaaaaatcaacatcatactatcaaatagatgatagacacccccacatacaaagaggttgactaactaaacccataacaataaaactcttattcaaaacataaaaacaaagaatcaaaaaaaaaaaaacaaaaaaacaaacttcgcgaaaaatttcaagactatttattct

SEQ ID NO: 386295 - DNA, 2083 bp, Cannabis indica
tagtaaaaataggaccatgagcttaattttttgacaactttttttttttttttaatacaaccaacttcaagacaatgcttaatacgaacagatacaaaaaaatataaacagttttgtcatagcacttttagatcggattataattaaactttattttgacaaaaaatcaattcaaggtcctatttgtactattttagaaaatacaaggtccattttatcatttaacaaaacatagggtccaattagtaacttttgtaaaacagaaggtccaaaatggtatttacctgcaaaaaaaaataagttttattgtaaatattataattaaatagcttcattcctaaaataattagagtaaagatttaaatataaataaaaaattatttaaaaatattaattgctaaaagaaatcttattaaatatttaattaattatttaaaaaaataattaattataattaattaattctaaaaaaaaaatatttacctattagtaacctgctattacaggttaaaaaaaattgtaaccataaaatgtaacattgaatagtctaacaactgaaaaaaaaaaaatagcactctatctatctcagtagaaaacgaaaaatataaaataaaagttgccttctcacatcacatggatcactctttaccaaactactcttggaaactataaaatacgtaagatgtaagattatgaacaatcaatgacaaaattgctcgtgaatataaaataaaaaatatatttatttattttatttaaaaataaaaataaaaataaactctgggcttgatcttaatctttcagctgtagtgactagtgagggaagtttctaatccaacaggaagcttttagtttttcctcgtgtgttgctttgaagtggttttgataataactgggtacactgtctttgctgctctcaattccaacattcaaataagaacttcagtactaaaagaaaattgttaatattcaaaacaaaaaaaacttacctggggcgcaacagacgaagagattttagggagtgcttgctcaaaatgtgttgttttgatactatcttcatcaaaatcttcaagagcagccaatgcagcttcgttaacctacaatcaatacaaattttataaatgtcacaacccgccatgaaataattttaagttgttttgttttgtttttttgtgagtgtgtttagcatagacaagtagacaaccaatgcatgtaggtcagccccgctgaaattatcgcagcccttcatccgtccaatagcattcaaatcaacagtttcatctaacggcttatcccttgtcagggctttcaagatcaaaccacgttcatcaggagttggcaaagacacgtacagatgcttgccaaacctaccaggtcgcaaagaagctttgtccatcacgtccggtctgcaaaatccggtaaatccggtaacaactctaagaaacggataaatgagtgcatttgataaagaaaaatttacataacagacaaaatttcatttgtacactttcaacttttttatttacaaaaatacaataataattgtttttttattgttttataatttatttatagttgtattatacttatcatgaggttgtttttctgattattttatagttatcgtgagattgatttttcgttatttttagttgtatttttactttttattgagcaaaatatatttttatattaaaaaattttacaccgtaaaattataaataaaacataaaataaatgtatttttgaaaattccccttttgataaaatgtactttatagcatattttattattttatataatagtaacattagtattgacttgtatttacatacaagtatataacattaaaaaattctataatgactccctatttgtttaattttttaggcattttttttttcatgatcttctacattgtagttatttaagacattatgcaaaatttaaaaaaaaattaacatgccaaaaatatgtttcaaaagtctaattcgaatacataaaaaaaaaaagagttgagtacaacaaactgttcgaacactattttcagcgtgttaaatttttactaatctctcaaaattt

SEQ ID NO: 386296 - DNA, 904 bp, Cannabis indica
tgcccaatgcttgggccagccctaactgagtgtttaggtggatatattagttatttactttattagttaataaaaataaaaaaaaaataaaataattttataagaaggttatttagtaaaagtatatggcttccaaatgaagaggatatttttgagttaaggatattcgaagtattaaatgcttatatttttataggtagaatacgaaaaggcgacgcacaatatttaaccatgaatggtcaaatttcttactttgtaattgtttgttctaacataccattttttttgaatggaaaatcatactttattaaccattaaatttagccaccaaagaaggtaacaaattaattgggacagaccccaaattgaaactgcaatcaggataagataaggaagctctagcaaagttatgagtcaccttattagctgatcgcctaacaaaaaatacagaaacatgttgaagttctttcaataaaaccttacaatcattaacaacttgaccaaacatggaaatcatttcaattgaactacgcaaggcttgaataaacactaagcaatcagtttcaatgacaacttggtaagatcgatttcgcttgatccaacttaaagcttccttaacacccaaagcctccacaaattctggtgtagccgacacctgaaaaagcttggtaattccttcaataagcaacccttgtgtattatgaaccacaaagccgaccccaaactgattcgtgtcagcaaatatagcgacatcgacattaaccttaatgctattttcaagtggtggctgccactgctcagccccgtcgcctagcacaaaaccagcactcgggtagattacattataactatgagcaacaagccattgattaaggtaagtttttgccgaataaactatactttc

SEQ ID NO: 386297 - DNA, 2238 bp, Cannabis indica
aattgatgagtcatttgttcagggagttactgaggttgttgtaacagctgctgtaacaattgctaaaatgaaagtggagcctgctgcaactgttgatgctaaaaactcattggctgagaagatggaccagatccatctccatgcatataagagtgagacgattgtggaaggtattggttgcattagagtagcctcagtcatatcattgcctccatttgtgtcattatttaagtcatcagttgaagttgcctttgcatctgagttacggtttgccttaagtcgagttggtcagtagctgcagttgtgagcgtcgtcttgatgatttcccttttaatttgtgacccaatcctcactcatgaccacgcctctctctaaaaatctcacgaagtatctcaatcagtgtgttgtgtacaatcagaaggactagattgactgatcatattttgtctacatctgtacctattgtaagaataagtaattagaaactaaacaaacttataattatttgaatatatttaaaagtaattagtttacataatgttatatattcatttttcacatactcgttgacaaatttgtttgtgcccttctttgtttgacaaaccttccagttttcaatgtgacccatgttttgctgataaatataaattataagaaaattacaattaaattaaacttcataaaataaatagtatatatattaacttacattttcatgaagggtctcagccatagtcatcgacccttgtgttgaagggaattatcatcttctgccaattgagagcattttgcatagaacgagcaataaactcaggagatgtgaataactgacatattagtcgtcattgtttttcattgagttcattgggggggttcttgactacaatttcatagtcttctagttttttgtaaaaaaaaaattaaaatgtacgagtctaatgttctttctaatattgtattttttggccaattcagttaacgaaatagctagtaattttgaatcactgtcaatttggtaataatactgcatttgacaaaaaaaattgtaataacatactaataatttcatttattaatttagatataaatttcaaaaaatttactcgatgtttggttaaaatgaagtgttcgtactgctccgagatatttgcccaactagaaaattgtccaggttcatgcaatgtaacctctctccctaccaaacgagggtaggctttactctccaaccctacaatcctgttggagacgttgtcaaatgctaatggcaacggcgtcccagattttttttctatcttccaagttagccaaaacattcctctcgcggctttttctcaattcaccaaaagtctcgcacgaagcaagtacactagtaggatctaatgggtcatccccactaccatctctaccatgataactaacaacatctatcgaaatttatgctgaaaggaataacaaaatcatatgagcctttatttaagagaatcaaaacaactaatcaacttagattaaacaataataatacaattagtcattaattgataaaaaaaatgtaggacataccagaaattatcgataaaccataaataagtgtatcgatattacatcaataaatacctaatctacaaaataatttaggcgaaccagaaattgtcgataatacatcgataacatatcaatataatctatcgataaataccaaattgaaaaaaaatcatagaaattgaaacaaacctgaaacaatcactaacccatagatatgtgtcgataacctatcaataaataccaaatgtacaaaaaacggttcacatagagaaaccatcgataacctaacgataagcacagtcggaaaaaaccataaccaccaccatctaaggtctcaaataaacacacacaaaaaaaaaatccaaaaatctcacaaaaacaaacacaaatccacacccaaaatcctaaaatctcataaaaacatctaaaatctaaacaatcacaaacccaaaacaatgttctttaaaatctatttcttaaaaaaaaaaaaaaaaaaaggtaatctttcagagtcttgtttgggcttctcgggcggggaggagtggggcttctcggccaattttttgggataagttgaaaactaccccttttcattacacattaaccaaatataactctaaaataattttaattgataaataccctttttttataatcaaagtaccaaatatagcctcacaaaacttatcaaaatta

SEQ ID NO: 386298 - DNA, 1112 bp, Cannabis indica
ataaaaacaaattaaaaaaaaacgaccaaaactaaaattgcaccattaaaaaggaaataaatatcataataaaaataatcaaaaaaacaaaataaataatcataacaaaatcttaaagatacgaaaaattcaaaacagttcaccgcaaaaacgtgctagaaataaaattataaaagtagtgaaaagatctccatcgacaaaaaacgtgaagctcagcaaaccgaaaaaaattgtaatggagggaaggaagtcgttgccgataaagaaaaaagtattttaagataaaaataaaaattagaaaattgttcataatttacaattactgaacatcataacgcaagactcaaatcaataaaacattcaaaaatatccatacataaaaccaaaaacgaccagagaaaatattcaaacccaccctcagaataaaaacaagagtataaaatcatataaaccaaaaaatatacatataattgttgggaatattttacaggatctagatttaccaacaagtatgttgaataaatatcctaaatatgaatatctctaaaacaatgaaattaaacacataagagtttagaaaatattacattagttgcagcgaaatataatcactctttctccttagatctctaactcttgtttatttatatcgcagagtattatcaagatctgagcctgaatctttttctctcattcgagtttggttaccaccgttttactcactatgattgagtatttaacttgttatgtgtgggcatgacactctttcactaagggttcgaatatgatgaagaacaataaagtaggtgaaatcattatggaatgaattctctcatctactagttgtctgacagaaaaaattagatttgatttggttgaagacaatagttaaattgtcaaaaatagatgagatgagagcatcatgttccttttatagtatttcaactagggcttaaagttgaattatatggattaaaaaataataaaatattgggcaaaaataacaagagtggtcggccactaataggaccaatctctagttacaattttgccattttatttcaactacttattcttcttttaataataccatattttccaattcaatccta

SEQ ID NO: 386299 - DNA, 799 bp, Cannabis indica
aagtccatgtaatctaaccacctctctcatgaaagaatcagctactgttggagcagaaaaagggtgcttcagcttgataaaatgggcatattttgagagacgatatattaccaccataattgcatcccatccttcagattttggaagaccctctatgaagtccattgtaacctcgtcccatacttgggctggcagggctaagggttgcaagagacccgctggtgaggttgtgagcaatttgttttgttgacaaatggagcagcttttgcacaaacttgtgaacatcctcacgtaaaccctcccaaaaaaactcggcagccactcacttatatgttttaagctcaccagaatgcccgctaaatggggtagtatgaaattcttccaatattcgtggaatcaaggtggacttcttgggaattactaagcgattcttataatgaaggcggtcgttgtggacttggaacccgtgatgtggtttgctaccacttttgacatcctcatgtaattgggataacactgggtatgctgctatttctcttgccaactcaggccataattgccattccatagtgaccatagtgtcaagggttgctggttcgacctgcctggacaaagcatcagccactttattatgggctccgggttaatattcaatatcaaagtccattcccatcagtttcgaaacccatttctgatattcatatccgattacttgttgtcgcaagagatatttcaggctttgttgatcggttcgaaccacgaacttgcggcctagtaggtaagtgttgggttttatgcc

SEQ ID NO: 386300 - DNA, 1449 bp, Cannabis indica
ccatctttgtcccttctaggaccctagttctctccaactgtgtatgaacctactgcatctgatctcgtccctacgcagacccatttctttgggtacgagactgggtccagcatggctcccgaacaatccaaagctaaagtcctagattctagtacggggcattcacatggtaagagtcacagtcgtaatgattcagtaaagaaactgagagtacgatccaaagtacaccgagtacaaaagtttgatagatactcaggagaatgtttataaggaaacatgtaacatggtccattatcgaaagctcccgcacatgttaaatggcaagagaaaccagcgagattagaacaagaaatgtgaataccatggagacaagggccacaccacaaatgaatgtgaatatttgaaagatgagattaaaatgtttgtttgagtggggcatctagggcagtgggtctgcatcctaattatttatcttagacaaggggtagtctagggggcacttgatgcttctcagacaataaggtggcgtaaatcccagaaaggggttgtgccccctccagctctcaaaacatcattacttgctcttccttctctgccagctctggctagggtggctttgcttgctctaggaccaggaactccatatcctcctggaactgctttgccacctgtggacgggcatgttgtaacaatttgggtggaccccacctcaccgaaagtactcgtaacacactatagagatatctaaaagaggtggaggagggaataatgtgtgcaccggtacagtctctcgcacagcgcccaaggatgatgaatctcctgattaccttcattgaggaggatgctaagaatgtacattttccttaaaatgaccctttattaaatgacacatagattgccaacaagcgagtctccagggtcttgatcgacaacagaagttttgtcaacattttgttcaagttcgcattccaagatgttatccacattttcataagcatgacacgtgaattttaatcaagaaaagtcaaggagtcattagctacccaactttcctgactgatgctccaggaagacaaagacactaacttcggtagaaaattctctataaaggggagttccctgactgccagctacatggagggtatccgtgagccaagccctgttccgggaactaaagccatcgactccaacaacaagcagggttttcccaaaaaggccaatacatttcaagacacactaaactgggatacgcctttagcctgcagaagcctcacctacacgtgtcagcctatggacctagtgactaggatttttcgggtacaatgtcagaggttgtctcccacgatacactatcgtacagagcatgagtgtccttgtgtacctgagcaaatgatccaacagctagggataaagggaaactcaaataggagaagccctgaggtgacacgc

SEQ ID NO: 386301 - DNA, 834 bp, Cannabis indica
aatatatcttgaaaaattatcaacaaaaattaggaaatacctagcatctcctcttgattttgttctagatggcccccacaagtctaagtgtaaataatccacaatctccttggtagtgtgcttccagtgccaaacttcactttggtagccttttcaagtatgcattgctcacatagtcccatctgttgtatcttatacttgccaaataccccatgcttgctcagaattttcacaccaccatagctgatacaacccaatctcttgtgccaaactagtgtctattcttcacttgtaggagcaactgtattcacctggtccctgaaagtattgccctacaacacataggtgccattcatcacagtagctttcataacaaccattgatccttttgtcactctcactgagccattcccaactttcactgagtatccatcctgatccaacattgccattgagatcaagtttccctttatctttggaacatgtctcacatgttctagcattgtaactctgcctccatccattttgtaacttgactgatctaattccaacaattggacaagagtgattatctcccaatttgacattgccaatgttgataattctataattgatgaattatttcctgtcaggacagatatggaaggagcaccctgaatcgattatccaaccagtctctgatctagcctttgaaattaccaacacactagaactagggttgtacaaaaaaatttgtaaaccgctcaaatcgaataacccgccttaaccaaatcaaaaaaatcgataaaaattacaaaccaaaataacctaaaaaaactacaaaccgcccaatct

SEQ ID NO: 386302 - DNA, 788 bp, Cannabis indica
ttaggagaaagagagaagagagagaactgcaaatgaaaagaaaaaagagaacaaaaaagtatattttttatttataattttttgatttcaaattgatttagttttaattttttaattttttttaataattttttacgtggatcaataaaattgtattgtacgtcctatatagatatacacatggacagtccaacattacatttaacacctaaaatagatataaactgtaaatcgctaactgtttcctaattttgaaggttttaccgctaaaatttaagttttgaggtaagtgcaaataaagtaaaagcattgaaagttttgatgcaattaaccctttttaatatcttctctttctctgctcacaattataattaatatcttttctgttatatttctttatttatcttttttcattcttgaactagctgggagtataatttaaatttatgaggatcatgtatttgctgagtttttgttttgcaaagctaataagggtttacttagtttatttataaaactaagctttagcatatatataaaggaaaaaaaatagttgaattatttattctaaaatacaagttttccgaatgagaatctttatatttgaatagacaatgttatttctcgaaactaatatattttgagaatattagcaaattaattgatggcaaagtaagttccaaaagcttaacataaactcaataattaagaaatcaagaacaaaagataataatgaatgtaggtgagaatttctaattacagcaaattaactaactcaacttctctaa

SEQ ID NO: 386303 - DNA, 1095 bp, Cannabis indica
caccgaggagggtaggtaccaataacgctttttagcaattctaggctttttgtcacctaaattttgataagtatcaaattatgtcatatgaacttttttggccgttaaatttttttgtgaattattgaaattattgaatttaaggaattttatccaattgcattcaattttaccaattcagtgattatttatatactaaattatgttcctcagactttaatatctactaaattatgtctttcgaattttgatacgaaccaaattatgctcttaaacttttatttatattaattgtttttactaaaattagacaaaaatctttaaatctaacaatttcaatagtttaagagagatttttaataactttaaaaatttaaagtacataatttaatacatataaaaatttcggtaaccaaaatattaattagcctatctataattatctgtacaaacttatccagagtttgattgattacatttattgtttttaaacatgacgtgcgagtggaccactaaatttcactatctttaatggagtgagagagacagaaattaaccactaaatgacagagagaattattataatttttttttttttggaagtaaaagatgcagaacaaaccaaaccaggaccctcacaaagaggaccacaagtcctgaacagcaacagaagagaaatgttgaaggacatcagtggtgcctagtaccttcctacatgtcaatatcgctattggtccaactaaatatcgaatcctatataatttaatataataacttttaagaagtattgctaaccaatcactacgcgacataccaagaaaatgctaaacaccaccggtacttcatagcaatgctcgcaacagaactaatagaactagggacctcccctaaccaacaaggagtagctatagactctaaagcatacttggcaatacaatgagtaagaaggttcacatctctacgctcaaaaataaaactacacccaaacacaacagatctgagattattataatttatttgagggagagaaatactgagatttcaagataaatgcaagaaacctgtttggtggtggtacttaaataccttttgatg

SEQ ID NO: 386304 - DNA, 1231 bp, Cannabis indica
tttctttagcaacctcatagccttccttaaaatcaccaatagtgtttttattaaaaaaaaatcaacacatttttcaatcgtaacaacttttgaaccacaaaattgaagcatctcccctaaataggctgcacctactactcaataccacatccttaaagtctaagtgagaggatcaactattgaagaaccgaaaaggtctcatgcctatattactaatcttcaaactcttaactaggcagtaaatgatcagagataatatcccattgaagaatagcttctgtattgggaaacacatctaactaggcctcattcttaaacattctatccaacttagaaaaaaaattatttattagtccaggtgaaaaaagaatttgtggaatgaagtagggctgaacatttagacccgcaaacctgaccacctagcccgacccgctgccaaaaaaatccaaaaaattaaaaacccgtgttgtggggtcgggtccaacccgaaaatgctccacacgggtatcgggttcagattttaaaaaaaggcaaacattaattctgtgttaatccgaaacctaaaaattaggcacaaatttttgtactacaaaagttgaagagacagttttatatttattataaaattaaaaaagtgtgagagtctatgcctctgtcacctacgagagtaataggccatagtctccacatagttatttttcattcaatatgtctattcaagtcactttacttgggaaacgagtttgttggtttgttttattttttatttttttatttgtactttccgtccacagtaaaataagagtcaaactatttattttatttttgtttagagtgcttgagacatttaaactgttcactatatgggttttttttatgcaaatattgatacgggtcttcatccgaacccaaccacagcaaacccgccatacccgacccaaaattcgtcaaaccctaccacctgaaaatcaggttttgttgcacattttaaacacccgacattcaaaaacccgaacttgacaacccaaaaatctgacccgtgtgcagccttagaatgaagctcatcagcaagccctaaagacaaccaattttaagcatcaaccatctcagtagacgaaatgatttggcctccactacgattgccaaaagtaaacacaatattaaaatcccccatcatgagccacgatgtcatatcccgaaaaataaataatatttaaataggcatatttta

SEQ ID NO: 386305 - DNA, 1417 bp, Cannabis indica
tgtttggctaatcggcttcgtcactctttggaccaagtagtgtctgattcacaaagtgcttttctaaagggtcggctcatacatgataatgcaatagttgggtatgaatgtttacatgtgatgaggaagaatagatttcgcaatggtacaaaagtagccttgaaactggatatggcgaaggcgtatgatagagtggagtggcgatttttggaagcaatgatgttgaagttggggtatgatgtgccgtgggtctcaaagattatgaggtgtcttacttcggttcagttttcttttctcattaatggtgaaattcaaggaaaagttatgccacaacggggacttagacaaggtgatccactttcgccttttttgtttcttctttgtgctgaggctttttcctgtttgatacaacatgctgaacattcggggcagttacatgggattgggtttggaagacagggagtgtcggtgtcacatttattttttgcggatgatagcttggtgtttcttgcagcgaatgaggatgagtgtaagggctttaaggagctgttggaaaaatattctaaggcatctggacagttggtaaattttcataagtcagagatgtgttttgggcgtaatgttacactgccagttagaactcatttagcaaatatcatgggggtaaaggtggtagataattatgggaagtatcttgggctgccatcttttgtgggaaaaacgaaaaagcaacattttgagtttattaagaataaggtgtggaacaagttgaaaggatggaaagggtcgtttttctcggcggccggaaaagaagttctcataaaagcagtcattcaagctattcccacttatacaatgagttgtttccgcttaccgaagaaaactattaatagtattcatagtatggcggcaaggttttggtggggctcatcggagaaagattcaaagatacattggtgtaaatgggacgtcttatgtaagcacaaagagcaaggcgggttgggttttcgggatttgggactttttaaccaagctctcctagctaagcaggtttggcggtgcatacggtttccagattcgttatgtagtcgggtgttgaaagcaagctattatccaaatggtggggtgattgaggcaaaaagtgggaatcatgcatcgtttgtttggcgaagtttggtttgggggaagaagattatacaaaaagggtaccgatggcgcattggtaatggcaactctgttcgagtcattgaagatccttggttacctcgcccggttacctttaagatatatgataaaccgcctctaccagaccagttgtatgtcattgatttgaagaaaggtaatggggaatgggatgaggagtttattagagctgtcttcaatccaactgatgctgatttaattttgggaatggcta

SEQ ID NO: 386306 - DNA, 828 bp, Cannabis indica
tgtattccatagctccccttttctgtaaagtagtcaccacttgagatcatatgtcaacctgggtgttcagagcataatagccttcagtaaaacagtcataactcacttaatattgatctgattgacccaatttaacttgtattttcaagctatttcaatctctatcaagttatgtctcacactccaatcacaattttgaagttatttactctaaatttcatctttgagagagttacaaattcaagctacaacttactcaaagtgggttcgcgacgcgactcaagttccagaaattgacggctgacctccaaagtcaatttcacctatggatgatcatcaattgttaaaaatagcctaaatgtattttctatatttttaagaatattatattattaatttaataggatctccttccttataaaaggagagctccaccaactcattttttaagttcaaaaaagtactcataaggtcaaagcatatctctctagtttcgctctctagaatttagagcatccagacttagctaatgttatcctaatttgttcccacatgatgtggcacctccaggtggccaaaagtggaagacatgtgggagacaggtctgcactaaccggccaagctattggcgtatagcccttatccctcaagatctcagggttgcaagatggactcaaactagaagagcatggagacttacaagatccacatcttcaaggttctaaagcaaattcatcctgatatcagtatctccagcaaagacagagatacacaagcattggcaagaccctggacggacctctagtgtttttatgccctaaataaaac

SEQ ID NO: 386307 - DNA, 968 bp, Cannabis indica
tatcgaatgtatctttgtggaacagtcaccacattgggatcctttgccaattcttgaacacttggcacaactacattagggctttcaaagtccataatataattttctactcaatttgggttttggctaaagtagttaattagctctatctagatgattttgaataacatgtccaatatgtcaatatttatatatacccaattcatatgcacattaaattttgtcggactttggatggtacaccttatctatctaactatctaaataaatgttattagtcccaagacataaatgacttgtaatatattattattgttaagtttatgtatttttttttagtctaaattagggtgttgttttagtatttttattattttattgtggagatttatatttggttttcgtttttcatttttttaagaaaaatatttggagatctttaattttagtaattttgatgttctgtaagtctttttgaacaaaattgaaaaaatataatgaaaaaataaaacttctttagcttggattaattttctatttcttaaaatgggtcaaaaattatattttcagctcttaaagtcgtggtcaaggtcaacaatagtcactttccaaaatttagatggaaaatcaaagaaaaaggaatgttggccctaaaggtcgtgactttgtaaggaaggtcgcggcttgacttgttcgttggaagaaaaatttaaataagaaactaccaaaaatcaaaaaagaataaaaaaagggtaagtcacttgtgcacggatctggccttgacagaaaaatggaaacttgattttttttcactataaaaagaggttggaggcaaagctttgacaccattcgaaaattgggagaaattttaagtgtagaaggagagcaaggagcaaaaagtaccggtggaggactccaacagtgttgtatctctttatctctatattttatgtttttaattgaatttt

SEQ ID NO: 386308 - DNA, 2206 bp, Cannabis indica
tttcgcgattgacagctgtgtcatgaggaaaactataagcgagaggcaggcgaaaggttgtcacgagatggtgacttttggatgtctaatcgagggttttgaaaagacagttgtaaattgtaattattacttttaatctatttggggtgccacgtcattaaaactcttcgaagttcatgcaggtgtggttatggataattgttggattgtgagactttaggcattcccttgccacgtgtctccatttcaataaatgagggatattaatatttaaacctcttgagctagaaaggagcgatagcttcatacccaccttgatatttgaggaggaggcccctaccgccaggacccgttagggctcgctatctactgacgagatagataggatggttcaagaactcgctgaaccgataacggttgaaatacgcaatagcgaatccacgatgtcagcccaggattatctcattcattcgagacatgcccttgacatcaaggttgaagaaatgggggaagactttgaggtacctgatcgcgattctgagtaagagggggatgctgatggaagtgagacagaaatgaacatccaactgaacgaaccatttttatccgaggatctggtctcgcgagtcacaaaatcagacctgcacacatttgcatggctgaacttagtttgtatagggactttacgtccttcagcatctcagcgacctcatcttccattcactagccatgcgatcatccctacgcaagaagtggtggtctcgattcccattttgcgatgcgaggtgacactgccatttcatctattcgtaaaagccatcctcagacattacgatgtctcttctttccaactaactccaaacagttattgcataatattggggttttgtgcaatgtatatggagtatgttcaaggggagccaacgatggtgactttagctatttttatgacataaagagcgttggccacgacaacaatttttattgttttagcaaatgggccaactctgaaattaacggggtagaaggtacaatttccaatatgggagattggaaatctaaatggttctatgcgtttaaagtaccaagagttaggactaacttcaatcatcgatctagtatgtcgcgtaccctaacacttagtatagattttttattaccttgtatagtcgctaatgtccatttttatcaaatgcagatagaccgaattgacctgtactggattctgctcgtagggagatcgctgaagttttaggtagcttgcccattcaagatcgtgattggcgattgttatgcactactgcaaaattgcgagaacataagctcatacctgagaacgccagtctttagcgagaaccagtatacaaggagccttctgagaaacaaaaggaaagaatagacaagcacctatctaaacagacatcaagaccgacatcaggtaatgcgtttaacatatacatgttctattatgttatgaaaaatattcttatctcatggtcttctcgcagaattgacattcctgaagcaagctcccattctgaatggaaagtctaaggttggaaatgtgacaacttctccaattatttcgcagaagaggaaaagcgatgttgcccctacgcaagtggccgactcgtcgaagaagtagcataaatctacccaagacaaggggaagaaggttgtgatcgatcttgctgttagggcccatgacatcatagctcttcaagacaaattcgtgagcaattagttcgtctctaaggtcgaaggtgttcctattgaggacttgatgccacgatctgcagaattggcctcataatttatgaccatattctcgtgggcttttgtcgcagtttctaaggagcttgaacttctgaggaagcaaacacgcttcttcaaaatggcataaagaagctgaagctggatgtgacctcgtagtacaaagacatcaaggatcttgggaaagccaaggagcaagcagaggaaaaggttaaacttttggaatcgcgagttcgcgaactcgtttgtgaccttgaaaatgaaaaagagactggaagaaacagtatgatcaggccgtctctgattatatttatacgaccttgtctaagctgcctgactttgacttcgcaattcttggagcggaggcagttgaaatagtcgatgcatttcgtgctatgtcgcctactgagacccaaggacttgggggaaatct

SEQ ID NO: 386309 - DNA, 1817 bp, Cannabis indica
ttgaaagtgaactttggatccctattggaaacaatggattttagacctccatggagacgaactatctccttcagatacaactctctgtactgatccactgtataagttgtctttactggcaaaaaatgtgttaattttgtaaaacgatccacaacaaaccaaactaaatcaaacattcttgtagttttaggtataccaactacgaagtccactataacatcttcccattttcacttgggaagtgtcaaaggttgtagtaaccctgctagtttctgatgttgcactttaatttggtggcaagttaaatacttagacacataattgactacatctttcttcatcatgcaccaccaatagtaaggttttagatcttggtatattttggtggtacctggatgcaatgaataaggtgtagtatgagcttcatccaatgcatcttttctgagttcaacattgctcgaaacacaaacccaagttttataaagtaacaatctattattcaagattgagaagtccttagcctgaccagctaatacctcctcttgaatcttgattaactcaaaatcttctgattgcgcacatttgattctttctagcaaatcagactgaagcattaaattattaagtatgcctaccacaaactcaatacataccttaatcaagtctgacgctaatagaggagatcattatagtattgaaaacctgctggggattttttcttcttaaagtgcctgacactacgttggctttcccgggattatataaatctcacaatcctaatccttgactaacttcaaccaccatatttatctcatatttaaatctttatgattaaagaagtacttcacactcttgtggttggaatagatctcacatttcttgccatacaagtaatgccgccaaatcttcaggttaaacacaacagtaacaacttctaaatcatgtgtcgagtaacgttggtcatactgttagggtttatgccttgaaaagcctataaagacattttttgattgattattaataataagtgtttaacattttgatatatgcatgaatattaaattattaatatttaatattgaataatttatatataaatatcacaaaattccttattcatatatgaggttgtgacttgtagttgtacgaagaatgaagatcacttatccatgaataaaatactcagcaacatattaaagtttgggaatctttaatcattagttgctagtacggtttactgatgcccattattcagtgcaagtaatcttaattcggattactaatgtaagtgaaggtgttgtatataatagagattatatatgacaaggaccgatatgaataaagctatctttatcaaacttaccgtttactataaagatctaattcatatcataaaaatgatcaatagtagattggcctaaatcccgagtaattatgaactcatgttcatgttattagtttctttgattcactcgttaaagtttctcaaagaagatgattcttataacttttggtttaggaatctaataatgtggatggctcggaacatgatctataataatagaatcctgactttcctaacagatcgaatcactactacaaaaacagatttcagtgagccttattgagggactctaaaaccttttagtgactctttgtcgcgcgtcactaatgtgggtgactggaaagattgtacttattgggttgtatgccctaaataaaactctatttcaatgtaatccagattattcaatatcaataaagtaacagaagtatttttttcattcatttgtgtatgttttggttcacttaatcaa

SEQ ID NO: 386310 - DNA, 643 bp, Cannabis indica
ttctaaaaaaaaaaaaaaaaaaacttttttaaaatacatttcgaaaattatacttatctcaaattttaatatattatttttttcatatttaataaatacataatattaatatttatatatatctacatataaaatatatattttgtagggatataaaaaattattaaaccaaaaataatttataaaatatgtttaaagtaataaataatattttataactataatatgaataataaattttaaaaaaaatttaaataaaaaataaatttaaaacattctgtttttagtttagttattcaaatatttaaaatatttgtattttagaggataatacgagtgctcaagacaatacaaatgggtgacatgacttatagagcaactcaaaaatcatcgacatgcaggaaatgagagaagcgaccacatgattacgagtgaagacactattatatgttttttatatacaatatacacatataaatatataatacatatgcatgaaagacaaaagtccacaaaaaaaaaatagaaaaagggtaatatagtaaaacatttcaatattatataatgacataacaaagataatggaactttctgttataaatattaataattatgtggatgtccaaatcttttatttattacc

SEQ ID NO: 386311 - DNA, 1590 bp, Cannabis indica
aattataaaaaaaatattaattactttattgttttcaaagtttactttgaaccatttgattagatcaatggttaaaaattgttatacctatcaataagtaaaatactcaatttttaacttactagtccccatatataatatatagggacacgattttgtcccgtgatgtactttcacagaatgtattccgtggtatattaagatgggtcttagggtacattagatgagtgtcagggtacgtttacaattttttaaccctaattacccttagatcaatctcactcctcagatcaaataactctctcatctaacagctaccgtacatcacgaaatacattctgtgaaagtacaatcatggaacaaaatcatgtcccataatatatataaggttaattgtggcaaaacccccaatacttttactttatttgcacttaacctccaaattttagcggcataacccataatactggtattctattaacagtttactacttccattcaattttttctgttaaatgccatattagattatccacgtgtacatagtgtacacgtggcacaattttattgatccacataaaatttgcaatttaattatttaaatatcataaaatatatttaaaaaaattataaattttaaaatgaaaaaataaaaataaatattaaaattaaaattaaaaaattacatattttttttcttgtctctcttcgtaactcctaccacatccaccatttctctctccccaaaaccacttctctttctctgcaactcacactctccccaaccccactaccaccataaccaccactactgggactgaacattttgactgggtttgacccggacctgaccaacttgcccggactcgacccgctcaacccaaaatttttaaaaaacttgttctgttcgggcaggtcaggttcaactcggtacaccatcgggcgggttcacgagttggttttatatgatcaccgggtttcgagttgaacccgaacctggccgccaacccgatcactttttattttattttttatttttattacatatataatatattaaaaataaaaaaaaaaccctaaaatcgaatcattttatttttattacataaataatatattaaaaacaacaatatataatatattatatacagtttggaacttgacttttgtattttaaatttaaaattaatgcattttttatttttttaatttaacgaatatagattatggcgttataagtttataacttgtatgcttaatttaatatataaaaaacttaatttaatatataaaaaaattacataagatttgaattttttttaaaaaaaataataaattaacgagttaatcgggtcaacccggtcaactcgaacccgtagacccgcgaggccgaaacccgcaaatccgaaccatttcacgggtcgggtccaggtacaattttttgaacccgaaacccggtcaacccgcctgatgttcacccctaaccaccaccacacaagactcaaccctaactcctctttcccataaccaccaccataaaatacaccatacagaaaccaccaccacccaaccaggcccggccctgggcat

SEQ ID NO: 386312 - DNA, 785 bp, Cannabis indica
agtcttctagacattgcagcattgagaaagttacagaaagagaaagaaagaagaacagagagaatgagaaagaaaaagagaaagagagaaagaactcttcattgattaagcacacttgatacaagacttatatagtacaagaaccaaaggcacttaaccaatacactaaccaaaaccagtaaagacttgaaaacatgttaaccaaagttaaccactaaccaacttaacaggcacaacagaatgatagttacacctaactgtcataattgtccttacaaactgtgatgttaaggttggtaacgagtcatgtgtgtggcggtgttagctagggatcacacgaggacagttttatgggtagcagctaacatgctcaacttcttggatctattgattggcgaagctgcgacgtgtcggttagcgttagaattggttgtttcgatgaagcactgttttgtcttgattgagagtgattcggaaaagattatcaaagcactaaaaggaatctactccatttggaacattgataattatattaatatttgtaatcaattctctaatcattttttatgctgtaatttctcatttatttctagatgttatcgttggatttatttttaccaggatcttagatttactaataagtatgttatttaacatcctaaatatgaacttctaaaatgatatgaaataaacacatataaagcataagaaaccttacagtggttgcagcggaatataatgtctccttccactcaaatctctaatccttgtatcctttatgtagc

SEQ ID NO: 386313 - DNA, 2117 bp, Cannabis indica
ctttcttcctactcccaatcactgggcaactagtccgaaggaagggtactatgcctagtcgggtgcccacacaaaacaaagggcgatgctacctttgcacccgtacttcaagagggttacagattactaccacctttgtatgacccagttcacacccagggttacaaattactaccacctttgtatgacccagttcacacccagggttacagattactaccacctttgttatacccaagttcgtgaaggagaacaagaggaaatccaggttaggccaagctgagggcgtcaagcaggagaaggagctcattcatctaaagcgtgaggctaagttgaatggtggtttcgaagccaaacagtatgtttaagaatattctaagcaggagaaggaggctcaagaatattcagagcatgagaggccgtgcaagaagacgaaaactctcccgaccgagaaagtgcccatagaacatactatttggattaaggacctagtgtgcctgctcggtcatcaatccctctcgaaggaaaaggaaaagctatcctggaggagcaggaagactcttcggatgatgacgctccatctgtaatcgttcgggagaatgctcccgccagtgtgcagagtacttcagcaagtatttattattcctattttttatgtcttctcgttcttcatatcttcttctgactgtattgttttgtccatgcataaatgtctcagaagatgattcaggctctgaataagagaataggggattgctcgggtttgtctcctctggccaaaaagtttagaggtagtgagagtctgtccaaggagaagatgtcggttgacgaggtcattgatctctctgaggagcaacctgttgtggacccttcaaccctgaaggtctctaagtccaaaaattcctaggggggagttcggacggatcagagcaagctaagactggatctgagcaagttaagggcggagccaaacaggttagggcccctgccctaactttggtgttgtgcgcagaggccaggagaggcaaagacatgcttcagcactacgtggctcggtcgctccctgaagtgagtgaacaactgagtagggcggacagtgaattatccccggagctggtcttgggagtagttctgaaggaaatttctcgagtaagttccctctatcacttttctttcattcttctatgggtagttcagaatttaatgcattctccgtataggctagtgtgaagatggcctacgcctactctcgagccaaatcgactgctgtcaagaaccttgccacttctaacacgatgcgaagggacgtggactttgccaagaaagacgttgaggatgcgcgggcccagctcgaggtcgtgaggaaggaacttggagaggcaaataagaaactccttgctgctaagaccaaggttgccgagctgaccaaggagctgcaggatatgccatcgaccgtgcagcttgaggcagacaatgtttctttatctcaagaaattaccagtcttaaagatgagagagagagagagtcttcggactcttcttcccaggttggaggatgaggccaaggacaagaagacaagggagaaggaactgaggcagaggtcggaggacctaaaaaggaggttgagagccaaaagtccaaggtggataagcttgagagggatgtggataccttagagacaaccagtctcgagaatttttaatcacttttggaaggccaatcccaaagggaattttgactacctcggcacttctaaagacatgtatcttgattactgcatggctcaggcggccaatgagaaccctgaggcgaccacttccacttttcctaccgatcagaacattgatgctccttccacctagatcgatgatcctccggctccttcagacccagttgatccttaccaagagcctgggactcccgctgtttgttttccttctctttgtacatatttttttaatatgtctgttcggcccgtagaccttcttttgagacaaagagaccggccaagcggtctttaaacttggaatatatctttcatttttcgaacaattgcctgaccaggcagcttttaatcctaggtttaaatgctttgttatccttaatgaattttatt

SEQ ID NO: 386314 - DNA, 1545 bp, Cannabis indica
aaaaaaaaaaatcttcaactatataaataagaacgtatttattttattaggccatgtttgtagctgtaactgaaatcaagagaattgattatcagtgttaattctttggtattgaaacacataattgagggttccaaatttctaaatttgaagtttataaggacttgttataacggaagggtgaaaggatcgaccttcagtagagcatgtgaggtcgactcttgtgagtcaggaattgtttaaatggatcgagtattatatcacacctttaagaacaaccacgtgtttctcttttttgtttcgttttttttttcttttttccatatttacttttcaagagaaaaagggatcatattatttaaggggtaacaaaaactgaccatcaaaatattgcaagcaactgggtaagctgtacaatccagtcaagtgtaataattttaaaactgcgtaattatcggtctatacagtaaaaaagagctaacatggatggatgtactatttatgccacaagatgcattttctattcaatagtccatcacttaaaaattctaaagttaatcatgcttgactttgagcaatgttaatcaaaccaaaaaacatgtgaagacaaagcatgctagaaaactccagttggtcgtaaaatcagtcatcattgcaggaagcagcacccgtgtatatacaaggacttagagtagaaatatacactatcagctataacccaaaataaacactagttaaaaaatgtgataaagttacaatatcgagctttcaccaggctcgtttctccaaattcccaatctttcgagaggattggtcctccacatagagtctattcctatttaattccaatctagttgaaatgaatccctcacccctatatttatagggttcaaccatagtacagggttcaaccatagtacaatgggacaactcagccccttaattttaaaacaactactgatacaaaaatagggaaaaaaaaatactaaaagaccagaatgcaaaataattccatgccaaagccattcccttggtctcctagagtaaacaaagtgtattgtggcttataataccccaaaaaccttcattttgccttaaggtaaaaacgtggaaattattctttaatggaagagatatcttcctctgtagcttcaaaatctaagatagagagagagtgccacttgatcaacaatccatatattttcgatttgtattctcctttctattgtttttccctcatcaaaaatccattgaatgtaaaaaaactctcagtgtattatgcaccccattcatacaagtttcttggtcgacaaagatcatcaaactctaaaatcttagcagttgtagtgacactaccagtggcatctttctctcttcaagcagcagctgtccattgcagtgctacttggtagagagcaaatgtgtctttcttgcaacgaacaagtgctttatgaacaatatgcaggggcataagctgagataaagacttagctagtttgcggcatgttttgtgtttatgggaacactagtgttgtatgggacact

SEQ ID NO: 386315 - DNA, 937 bp, Cannabis indica
cgaacctttccatcttcgaaatctttggtccgctctctcctcttctcttcgatttgctcgtatttggggtaatatttattattcttctttcgcaatatatatagacgagagtgagaggggatttagttcaggataaattttatttagacccgaaaattttttaaacatacttcattttagtaaattttatttaaaaccaatacgataaacaataaaaaaaaaactacataaaataacatgaaaataacaataaaaaaataacatacatataacatacatataacaaaaaatcaacaacaaataaacaagactacaacataaaaagaccgtatttttttgtcaataaaaccaaaaaaatcataaaaatgtttaaaattccgtaaaaccgtatttttgtaatttttttactatttttgtgtatttgtgaaataatccttttttattttatataaaagttatatctttaattatattaaattttttaaactttttttaatataaccaacttgaagacaatttctaacacgaacagatacagaaaatgtcaatagttttgtcaagattatatttaaattttattttcataaaaaatcacttactatttataccattttaaaaaatacaaagtctattttgtcatttaataaaatagagaatccaatgagtaacttttgcgaaacatgtggtctaaaatgatatttacttaaatttatatcaaattatttttctctctcatttttaagtgatactctacattctttaatttttttttcatgctttctttttcacaattacagttaaataattgagtaagataatttggatgcctttaagtaatgatcgcataacttaatttcaatagaggaagatgaattactgtgaatatatgtgggaaatttacaatgtatactaacttttgccattttttacaaaaata

SEQ ID NO: 386316 - DNA, 1134 bp, Cannabis indica
gggttacatgatcaaaacaatcacttatctcatcaatagaacaccctatgttctattgcatgacaagacatcatttgagcttctccacaataaagctcctaattaccatcacttaagaaactttggttgtctagcttatacttctcatattaaccatccaactaaattttctcctagagctcgagcttgcattttcataggataccccgataacatgaaggcttacacactccttgatattcaaacaaactacatatttccctcaagggatgtaatcttctacgagtccatttatcctctcctcaaattttctaacaccaacaccagtcaaattgacaacttttttccccacattccactcagcatccacattcagatgccacatacaattcatcaacttctactgcaccattaaacacaactacaacaaatctcaatcctgctgcaccacactcaaacacccctattgcaacacactcacccgtatttactgaacaatcaacatcaacacccatccaatttaccaaaactggtagatccataaagaaacctgcattcttgtaggattacatctgtcaaattcaccaacaaacctttagtatatcctatcctattaccaactacatatcctatcacaggctctctccaacattttgagcagccattcttcttgctcatctaattgaacctcgatcctatgcctaagcatgcaaggaaaaggtatggaacaaggcattggacaatgagatagatgcactagaagctaataacacttggattgttgttcctctcccaccaggaaaacatgtcataagcaaaaatgggtgtacaaaatcaaatacaacccaaatggttctgttgagcgttgcaaagcaagattagtagccaaaggctacactcaacaacaaggggtcgattactttgaaacatatgcccctgtggctaaatttaatactctcaaactcttgtttgctcttgctgccattaaaaattggcaccttcaccatatggacatcaacagtgcttttctccatggtgatctccatgaagatgtctacatgaagcttcctcaaggatacacacctgaagcaccatgtaaaaccctaactaacataggcgtattacgtgagtttt

SEQ ID NO: 386317 - DNA, 2657 bp, Cannabis indica
aacctaaaacaattgtaaaataataaaataggaaaattaaaaataacagcagaataactaaaaagcaatcgtggaacaatagtaaaaacttaacacattatacagtatgaaacttacaaagtgtttttgaaaaaaattcgccccacagtagaaaagaaaaaaagttggaatggaaatttcagtttgtagtgtaatcctgttagaatattgctcctactagtgacaatgttttggtagcccgaatcctcaccacaaaaccggtctacttgtctactttgacaaaagaaaatgaaggaccattggaatagcaggtaccacaacaagatttttgaaaaactatctgatttgtttgtatactcacttttggctatgaagggaataagtgcagggtgcttctttgagagccatttcattttcaaaatcatcatattgtgttatacacaccaggtaaaagttaggtttcattatgtaattatgagttttaatttttgtttggacttggtgatgttaaaactgagttatgaggttttaattgggtttatttaagcttcttggctgttatttgataggctgtagcaggtttgaactaagtttgagcttttaaaggtcaaatttgactctttaatggtgatttgttttagggggtttttgttgcaattattggttggatttcctttcttatgccttatttaagtgatctggaaggtttgattgaatttgggagagttcttagcaagattttgaagttggaaattttctacatgaaaaaatgattcaccgtttctccagaaacggcgaaccattttttctggcagaatcccagaaaatagtagactattttggggattcaattcatcgagtttttcaaattctaaggcctagtttttcatattttatcgatatttagggtattgtcacgttatctatcgataaagaaacttttagttttaagtttgagtcctcagttttatgtatgttgtgacttagggacctataaatcgtcgagaagcagtttccacttagggttatcagcatactgcattcaaaatcaaggtaagattaatataatagttgcatatatgtatacatgtttagcgtgcatgttagttgtcgtcagaataacatatcagggtatcagtgaggtgtacatagagttgcaccaagatcataacctatatatgttaggcaaatcagtagccatcaaattagtatatcgtgatattagtgaagtgtacatagagttgcactgagatatcaacaaatatatgctagacttttagatagtatgactttacttgttctcattcccaaaatagtaaaacttacaatcactttcggcctattagcttatgtaatgtgctctataaacttttgattgctaacatgttgaagcctttgacggtgaagatcattactccggttcaaatgagagaacactttgactacgagggcttcctctcacccctaattcacctcccctggggatcattaaggggtattgaggcccctcacaatccatatcaaggtatggagccaccgtcgttttaaatataggatgttgaatgactactcctacggttcaccactccctagggctatagtatcaacattgtgttaaataggtagtttttacaattgaaacactgaatacacgaaattgggatctctctcgcatgcagctatttctatcgagaaagcctcgcttatttaaagggtggattatttagttccctttttttgcacataagtaagtgagcgttggtaggagcagcgggaggatgagtaaaatttgttgaaattcttgactttggagatctaattcggtaaggttccgtaaaatagcgagaaatttctccaaggctatttttccctaatggaggtaagttgcaatgtctcgaatcctctgaccagggggaagaacaaaaggagcaggaaaatatagtggagcaaggtgttgattttttcggttatttagtcctaaatcgtatcgatacaaactaactcctactacatcagtatgactagaatagtgagtatatgctggatttgtaattagtcatactttatcgagaatgttcgtgacctagtttttagatcatgattaggtgtgtggccacctagttatgatctggatatatgtttatacttttcttactgagtctgtcgactcatagttattacgtgtatgtgtaggtaagagctataattgaaccaaaatgagtctagagctggatgaagattgtacatatcaagacgattagacctggagtattcaggatatttggggcagtttaggctcacttttgatagtcgatagacgatgacttttgtaatacaagtattttgtaaacttatgtaacttttaaaacgggatatcctaggctatgtaaattattattatatatttaagattaaaatttaattatgtaaattttaattatttactgttgaccgaggttgtcgacaaccaatataataataataattaagaaagctataaggaattaatgagagagatttttacgtggttggggcattaatgagccttagtccacgagtttgtgtatttatgatagtatttattacaaagaatgttcttggtggatttttcctctctatttcttaggaaacccataattctcgacccctgccttaat

SEQ ID NO: 386318 - DNA, 870 bp, Cannabis indica
acctctttttgtgtgtgttgcgttgcccccatctgcttcgtgaactttttaaagcaactaaaaagctttttggaaaatttggctgatctctaaacaaatgggtcgttttttaaaatgttttttgcttgtttagggatatctaccgacaatgtaaggcaattttcgtataattcgttgagatcagctacaagggacttccatccttcaaatagaataggtggtggaggctatggagttgttcacagggtgagtcctttctgttgttggtgtttttattttacttgttaatgttcggttggtggagatgatcgtgagtttgaggcttctttttacccatcctgctcagtacttgtactgattttccattacatggtaacagggagtgctaagagatggtactcaagttgccatcaagtctctttcagcagaatctaagcaaggatcaaatgaatttttgacagaaattagaatgatatctagaatacaacatccgaaccttgttaagcttgttgggtgctgcgctgagggaaattctcgaatattggtatatgaatatctggagaacaacagtcttgccacttctttgcttggtaattgtctgattgtttgttgactgtcttttgtatgagttgaaatgcattataagtttttcaaagagtttcgaagtttgaagaagcatgggaaatgttctttttttaccaagtcaataattttgttctaccatttcctcaaaacttgactatttgacttgattataagtttggcaatccattactacagaaagctagaggagaggtggggagtagaagaaccaatcaggaaaattgataacaaaagaagaaaggattttccaattttgagaaagtaaag

SEQ ID NO: 386319 - DNA, 2456 bp, Cannabis indica
ctttgaaggactacattcaacggctcatggctaaggccacgaaggtcaaaggcctgatagaagaaggttgatatacaggtatactcagaggaatccaaccgttgagtgactttttcaaagatatcgaaaggatcttaacaaaaaacatgaaggagttccttgagtgagttggtggcttcataaagattgaagaagctgtctagaaagcccaaatgagagggaaggtcaatgacgaagaaacacaaggcctcatagtgcaccaagcattatccgacatgtcagccaatgtagacgatctctgttaattccccaacaatgagaatggtggaggcaagcgcaagaacgatggctccgaccaatataatggtaaaagagggaaaatcaacgattcccttacaccatgaataagggagaaggaggagaagcgcacatgcttcaatctcctacaaaactcccaaagaaatgcatgccaagaatggcctagaaagggaaactcaggaacaggcagtcacaaggcatccaatagccccatgacttggtaagagcatagaaggtaccagaaactctacccaaacctccaatggcaggacacttaagggacatcatctgcagatcccaaattgtaggtgagaccaacaaagctagggagcgttatgcttggaccctctattacaagccgaaaagtgacatcttggcggtcgaggaatgagactctaagcagccaaagcttggagagccgacgatctctttctcaaaaggagatactacccaagtcaattccctcataatgactcgctagtcattatagcatcaatcgggaatatgactgtggcaagatgcatggttgaaaatggagcctcctccaacattcttttcaagtcaacatatgggaagatggggcttcaactcgctgatttggcaccttgtagtcaagtgatgtatggcctctttgaccaaggcatcacaccaattaggtatatcagattacacctcactattggagaaaatctaactaccagaattctgatggtggatgaatcgacgttcgttggctttcaatgctacgacaggccgatcagccctatacgacctgaaggcaaaaacatccatctaccacctctacctgaaattcccaacatgggattgggtaggatgtttgagaggataaaaacaatatgcatgttacttttacaacttggccttgtccaaagcaaggaaaaaggagatgcatttgccagatcaagagcatacaagcttcatgaccgacttaatcatgcaggggccacatatcagaggcttgagaacaaaatgtttgaaaatcttcttggcaacaacatggagttgtatgttgacgacatgattgtcaagtccaaaatggtagggggcttgtggaggacctaggtgaatgctaataaatcctctgcagctacaacatgaagcttaactccctcaaaagttctttccgagtaggctcagataaattcctttgcttcatagttaatgataggggaatagaagcaaactcagacaagattcaagccctttttgacatgaagtttcccacaaccattaaggaagtacaaagcctaacaagatgcatgtttcactaagcaggtttttttccaagtctacagacaaatgtgtaccctttttcaacattctaggagccaacaataaatttgagaggatagaggaatgtgaaaccacattccaggagttgaagacacaattggctcaacaacctgtattgtgaaaacccctagacaatgaagagctcggggtgtacctagcaatcacagaacatgctgtgagtgatgtccttacatgagaagaagacagtgtacaacaccctgtatactacatcaacaagagactaattgacactgaatatcggtgaccattggtggagaagctgacctacagctttctcttggattccaaaaagctaaggccctacttaaaggaacaacctataaaggactacatcgatcatccattgcggtaggttttgccgagacctgtagcacctgaccgagacttggccaatataaggccacttgtcaactaaacctggccaccaaaggccaagctctcactatcttcatggctaatcataaaagcatatctcccaacatctttcaaagttcaggagaaaagcaaagccacaaaagaagcgagcgcaagagaaaagcaactccgcctaggaggtacattgaccacttgcctgatgcaagcctggccctcagagcacttggagggcaatagcagcacatggcaacacaagtaaatttcaaagcttctaacaacgaggttgaacatgaagctctgaatgttggcctcaagctagcacgcaaagcgcgagctaaacacctagatatacactacgaatctcaactagtagtaggtcatgttggaaatatattttaccaggaacttagatctactcacaattatgt

SEQ ID NO: 386320 - DNA, 595 bp, Cannabis indica
attcctaagtgagaaatttgcacagaggttaataggaattagaggtaaaatccaaaaatgatgacctctgattgtggagaggatctgaagacgccatagaaggaagttgttatcatcatgtttcataaaaactttgtaagaaaatacaaaatgagtgaatgttagagccgtcagagcagctatgaaagaagtcgaagaacaacaactaaaaaaatagagaaagcgattggagaagacaagaatggcaggagcaaaattgtttttattgctctgatatcatgttaaatattgaaacgagagaaagaagagattgaatgaagtgtattctcattactaaatttgtgagcttcaactctataaatacaagatgaaaataatgtaagttttgctaacctataactaaaacagtaagaattaacaaatgtacatagtctaattcctaactaactctaacaaacaaccaatctacttaatattatatttaacaatttttaaatatatattatgaaaattgtatggtacatcccttaaagggatgcaacaatacacccatatcgttttcggtatctaaaagaatattttagtcaattttttt

SEQ ID NO: 386321 - DNA, 2925 bp, Cannabis indica
tttttttagaggtaattacaccacatattattcaaatttctaatttttttatttttactgtgggacagaatttttttcaaaaatactgtgtaagtttcatactgtgtattgtgttaagttttcactgttatttttacggttattttttagttattctactgttgtttttaattgttttattttattattttaagttattttgtaaaaagacagtatttatgtaaaaatgtctttttgtaaaaaaaatttatgtagcagtaaaattataaactttgacctaaaatccagtattactgtcaaaatctttttttcaatagaaatttttgtttttgtgattgacagtttaatgttgatcatattcaagagggtctatgctgccaagcatttctttttctctattttttcaacaattacttttttttttgaaattttttccatattattataaattaaagttcattcacaacaacagagaaaatagaataaggtatttctcttatccaaaatacattttcatccaactcttgagcgtactttgctaagtcatgagcagcttgattagcttgcctacgagcatgagtaacagtaacgccagggaaagaggataaaagacagcgaacatcatcaatgagatcagaaaaataagacaggtccctatgaaaagaatttaaagcaaaagagactctttgggcatctgtttccacaagcgctattggcaattgatgttgagtagcccaaataagactgtagaagagcgcctttgcttccatttcatcacttctaaaacagccttgagaaggcttagaaaacgcagcaataacttctcctttgttgttacggacaactgcaccaattcctaatttcttgtctttaaaatttactgcagcatcaatattcatcttaaggagattacctacaggtggcatccatgaaatctcaattgttggtttccgattgcttccaggggatggatactgttgctgttgtgccacctgacacgaagttgcaatattttgctggttttcatgaattacaccagcagtgaaggtgtcaacagcttgcggggttgctggtgtgttgtttgctgaagtgaaagaccccctggtgtgtataattacgcactacagttcctgatgccttagtgtttaaggcctgattcttgcagttgggaaccttagctgagcggtaattattcaaaaaattgacagcatatgcaaccagagaagaggggtgtcttttgaacccaccatgtagtaccttatttctatcattccatataccaccacaacacacatattaaaagttcaacttcatctttttccatcgtgtttgccaaatgtatgatataatccccattaaacataccatgagcatgtcgatagtcaattgtaaagtgagtctttttccataccgatttggcaaaactgcatgtgaacaacgcatgtcctatcgattcccaagcactactacacctcgaacatgtcgctgaatcagtaattacctttatgtataatttattgggataaatttaaaactacctcttttttttgtcgattaaccaaaaatacctccatatgaaaatccattaaaatctacctactttgataaagtctattaccaaatatacccttatcagattaattgagtccccaatccaaaaagtctaaagactccccattctgccatagcgacccaacccaacgcacgcaagctctacctcctccgccattactagcgtccttatgcctcctccaccgccggcatcaacgctacaccatccttcgatatttggaggtcaataactttctctttcccttttctaaatttgtattattctttctctttagatcttgtttctccttcctctaatcttccatttagttttttcttcttctctgttattaacataacaaatgaattagcaaattaataattggtagtggctttagatgagtcaaatgtatgttttctttgaaccatgagccataacaactcatggagaacatcaacagtccacttctcagcttgatcaatgttcggggtataaaatggttgcaaagcctacaaatgatagcattgaagctcatggagccttctatatgaaattaagaaaaaatatcaggttagaggacaaataaagatagtgaatggaaggggtataatggggatcgaaactgaaaaaaaaggtataaacgagagaatttaaaataaaaggtaaaaatgagaaaggctaacttaaaaaaggcataggatataatttcccctaatttatttttatggtaaatatattggcgaaaaatggtattggaggcccatggcccaaggagtatttccagtctacttcaatacctctacaaatttaataaagagataattagttgaaagactattttttttatatatttatatgttcagtttttttttatatatatttaacagttatttttattaaaataataaaaaattaataaaagtaacaaaaaaataacactcaaataaaatcaaaatgataacaaatgataacatacaaataataaaaaattaataagaatacagcatgaaaatacataaaaaaactgtattttctatttaaaaaaaacataaaaatatttaaattctgtacaaacgtatttttgatatttttttttattattcttgtatatttgtggaataatccttttaataaaattgttggagagtgagtacacttgagtcaatcattctcaaggatgaatgacattctatgcattacacttaaagcatcttcaaggagcacattaaatatggtgttacactatcactaaattttgtgtcaaaatgtattatcactccaatcacaacaccaaaaattacactaaaaatattccttatcattatattattttttttgataaaattaaaattaatatcatattaattaattaa

SEQ ID NO: 386322 - DNA, 2322 bp, Cannabis indica
attattattttggttatgcaaatgcatttagatggtaccatttaattggcattccattagcatgcatttaaaattcatgccacttttttggatgggtaaattaagagtatgtcaagtattattcttttttatctcggcccgtcctcggctaaaacagacagggtcgactcaagtattaggcagcttgacctcttatatttaaaggtcacttctcgcaaaaaaaaaaaaaatagttactctcgcacaaagatccacaagtcaagattactttgaagacacttaaattaactgtaaaactttgaataagatttacaaataccaaataagtgaagacatactatttgatgatcccatggcgcctttaggaaagtcatgaaactctaaccaattatttagtgttgggacacacacccaagtgtccccaacctaagatttatgggctgcgtaagggttttcatcctacagacctctatctgacaaggaaacaacaatgacttgacttatttaagcataaaaaagcttgaacttgaacatagagtcaaaattgcacaagcatgtcactcaacaatgcatggtcgaccactgccacacgaagatgacagtgttctctctcttttggagagcactgaccacaagaagatgacagtgctctctctcttttggagagcagtaccacaagaggatgacagtactctctactctcaaaccatcaaattggacttgtttaatgtggtcccccaacaccaaagagtatgacataagtgaaataaactatttttcactaaaaaaacaagcctagtcgaaatgtgtcgtctttatgcacgaaaaagtggcacaggtcaaccacatcaaattagaaggagattctttaccaaaagtactttttatcataaagacataaaaacaaaatgaggaaggtcaccaaaaggtgtataaacatcctggccaaccattgccctctctttagccctaaataggccaaaaagatggaagaggtatctcccaccaattggccaggagctagagtggccaaagtattttctagcctctatatgactaaaataagcaagaaatatcatctaatgcttctcacaagccatggtcgaccactgccatcttttggttccaaccgatgataatggtctccacttagggtttcgaacattgaggttttgggagcccaaaaccaaaaaatatgattctccattaaaaaaaaagtcaaaacacacccaaaggtctgaaaacatgcatggccgagaactgtcattatgacatggcagtggtcagttttttttattaaaaagtagttaccacccttcagtaaaatatatgcataaccctctcaatttttattcaaatgacgtggtttaactttattgtaaaagtattttcaagaagaatctaagtgtttgtcatggtcattacacaattctaaagttatctagctcaaaatggctcacaggacaagctgtcacactttactcgagaattactaaattatgctaagtggggatcacaaggggtgttgggactgccacaacctatgtggcatcgtggctgaaaagtgtcagcccatactcctctccaattgtgtgacttccttgtttgtcacttctctccaattttgttattctaaagggctatgccacaacatttgtggctttctagctgagaagtttcatcccttgtgcactcctctccaattttttcattccccaaggagaggtgcaatgccacaaaaacaacttcaatggagaaaaggaaatcattaaattcaacaacaacaactaataattgtgggatatttgtctatgactatgggatattttctatatttttatttattcattattttgtaaaatgatacgagatttgatgttcactaacaaactctaagcccatatagataatgataggctagggttcggggaccgcttcctaaactcctgacttactgggttgcattaacacatcatcccttgagacttttttctctcgtcatctttttcttggtgttcttcatactttgacaacaccaagcttccattattctatcaccattgacatagacgtctaccaagaagaagagaaaattctctattcttgtatccattggtttactgttcccgagaacattaaaaccaccactagtatcaagtttatgatattgggtcttccatgagcattttatttcataagcttcgatatagattttgcctagaagtatctttttagactattatccacacactcttgaaaacataactctagtatgttaaatttaattaataaaagataaagtagacgtagcctcattaccat

SEQ ID NO: 386323 - DNA, 663 bp, Cannabis indica
ttaggctcctcgtcgtgtctctaacgacagagatgtttcgattaaattacactgataattattaataaaattacatgatttattataaaaagaacaaaactataaaataattaaaaaatgaagagaaagaaccataaagcttgaaactttaagcactaattaatttgaagaaaactcatgaatgtatctccaaaaattaacttgtgaaaatgcatttataattgaaataaaagaaaagaaaaactcactactttcagactgaagagctctgcaaatgatgaaatgaactgtaatgagaaagatgaagctgaaaaagcccattttttcaatctaaacccctttttttttttttttttgaaaatggtgaagtgttgcagaagagaataatatataatatatataaaaaaaatacagaataatatttattttcgttttaaggtttatttgtttggctttaatactaaatatttattttcttaattaaagaatggcgcattaaagaaagatataaaattaagtaaattagggataatattactacttttatatatttatttatttattgtaaagatactacaatgatctatcaaaaaaaaaaaaaatattacattgccattgataatcggggtatttatgtttgtggtaatttaagaaaaaaaaaat

SEQ ID NO: 386324 - DNA, 2006 bp, Cannabis indica
aaaatactacatattttttttttaaataaaagtctaataattcttttctccttagtctaatactacaattattaatgttcattttcaaatttaaatcatatatgtatttatttcaaaaacaattaaatatatatatgatgtcatatacataattaataattttgttgcatattatatattataaaattagcaagatgattctaccaaagtcaaagtgaaacgaatgttaagatgtataattgtatatgataaaaataagagaaataataagaaaaattatgatataataatatgaaaataaatgtgtaatgaaggaatttaatattaaagaatatgtaggttggtggggtctaaataaagtagctttcaaacaaaaatgaaagaatcaatgtcaactcatcacttaaaactaattaataataataatctatcttcttcttcttcttttttacttttttatttgttttttatttaataaacactctgaaacttatataattagttcaaagaattcatatatggctgatatgcattacagcccataatatataatatatacatatttaaatttaagatatttaacaggtaagaaatacaattttattctgttcgctttgcatttattttatctgattttatgatttattgagaaagtgacaatttgatacgtgacattattatttggtggttatataatgccatcaatttatatatctttacagtttggcattaaaatccaatctcatctcatctttctctccaccattgatttttttttttgaaagcataccatgttttcgtcaagtataattaaaaacaagtttatagtgtaatataaatatgtattactatatatattgtcattttttttttcatttttcttaaataaaaatttatacatctcaaaaaataaaataatcgataattatttagttaaacaaattatttattcatccaaagaaagaatatgaacaactaatctatgtgttataccacgttagccgaccaatagtaatattcttaaaaatttagataatgtacttgttacatcttctaacaataattttaattttagatcactaaaaaaaatctcttaaaaaaatagatcacaattactaaagattagaatcaattatatagtacaacaaaattcttatccaacgtgaaaagccaactagtgacatcgtgtaaagacaagtagtagagtatacgtaactccccttttaaataattatattatctatatgttatgagcttaattaataattaattgttaattaatagaatcatttgatggtgaatgatattctcgtgtttacaaaagtaataatatatattattattagaccccacataattaattaactacttttctttaatgacatcaatactttcggtgagtaattagtttgcagctgttattaatatttatatataaatgaagagtttaataattaacaaatctacaacattattaacttcttttaatttgtaaaatgattaatcattctagtacatatatactaggtataataataatatcaagtggaattaattaagtgacaaattttgatgaaacaaatgaagtatataaattgtgagaaggtaaagtttaattagaagaattatatagtaatgattgttagggtcgaatttagattaaggcggattgtgttcttgcttatgggcctcaaaattatattttttttttttgaaaatataaataatttttaatattttaaaaaaattatatgagcctaataatattttttatcattaagcccacaaattttcggggatgtatttatatattataaggccaattctaatggaacattaaaatattaaatttattaaaattttacaccaaattcattttaaccacacactagctaagtttgttactaattttagaggggtttatttgtagactgatgcttgtcctagatttattagtgcttctgtaacagctgatttgatttaaataacatgctttctttcaaaaa

SEQ ID NO: 386325 - DNA, 768 bp, Cannabis indica
aattcaattgaattataacattgttaccaattgtagaggattggatataaataggttatgaattcaacatacttaaccgatgtgggatttttaagccaaaaactcatattaactaatacaaatactttaccagttgaagatgactcaggttgatgatgatgatgagttgttctaaaagctctggttgttgaagaaacaccttgttgttgatgatgatcatcatcacgacctctcttttgaccagatgtcgtagaagaagaagaaggagaagtaccatagagtacttgactatcaaaacgactgtcgtatccccaaaactcatctcctctgtttcccgaaacgacatgcgttagagccgaaacaattgctgacatctcagtcggagtaccaacaccaacaccaacaccactctgattatcagccggtgaaacgacaccgtattggttaagtaatatattcatttgttgttgttgttggtctaattggtcttcttcgccgccatggctaacatcgttgggttttctctggttcgccactttaagagagcacatgtaaatatttatgatcaattttgagaaattaagaatgacccagattgttatttgatgttttttcaagacccttttcttggttaatatcaaatcttcatctatatatatacatataaatagttatggtgtttgtatttgtattgaactactactttcagccgctttaacaatagttttaatatttatctcatattttactgttttatttatttattta

SEQ ID NO: 386326 - DNA, 564 bp, Cannabis indica
aatgcaatttaggaggacttaatatttatataaagacatcaattcaaatcttggattttcaaattgagagagatattaagagagatcaagaattctcactatttcttagattcatggacccaattgaactcagtgatatctttcattcacatctttttccatcaagaatgtttataaaactcttagactcctaaatttggagtatcctactttcttgcaattcacatttacaaggttcaacaagcaattgatatttcacaatcaaggttgtagtcatatttttagtagcggtccttatatatcatattactaattgaaagatggttgaaataaaaagtctctattgaacaggacttctttctatacttatgaatttcattagacctaaaaatgatacattggaagaatcttttcggtcttccaatatcaataggttgattgttttgctcatgtatcttacaataggaaaaataatcactgagagttgtttcctagatccaaaagagagtacttgggttctcccaataactaaaaaatgtatcatgcctgaatctaactggggct

SEQ ID NO: 386327 - DNA, 1069 bp, Cannabis indica
aattttattttttacttttctcacattatttatatattattattactaatactttatttatttattttatttttattgtagttttaaatcatagttataaatttttttgtacgtaatattaaatatattatttaattttgtttaacaagtatattttttaagaatataaattaaaataaaaaaatttaaaaaaaataattaaagatatatatatcttttaataaaataaaaattattaaaatatggtatttttaaaattttttatagtgtaaattaaattttcttaaaataattaattgggataaaattaaataggaaataattaataaaataattacatttaacttaattattttttaaaaaaatataattattttagtaaataaatttaacttagggtatacaaaaaaattatagaaaatcctaacctaaactctttcctcttcatctacttgcttccgcctcctcttcatcctctctctctggtttcttttctgaacagctctattcgctggatgaagtgctctggccaccccaggttccgatggacctcacaaggatgtccccaccctcagaaacccctaaacccaaacccaatcgctttcctcccactcgatcccacctctctctctattcactgtctcaaccagacggctaggtcacgatggccatcctctggtcgagggtggttgaaaaggaccacaccacggtgctcacaaccacggcaaaacctaaaccccaaagattttttatatttctttgaaaccaagcaagcccatatcaaactccaattctatcacagcgccaaggaaaaagacagacaaaagtgatttatcttcaccctgtaatggggtcttttttttaaaaaaaaaaaaagagtatatcttacgttattgagttctttgtaaatattgggttgacttttgatttgggtaaataggtctatttcgtattgatttgtgtttggttgctaggaaaatgaaggagaaaagtggggagactataatggactctactagaccttacttgtaaagcccgcttagttaatttggaaattagcagttgttta

SEQ ID NO: 386328 - DNA, 513 bp, Cannabis indica
tcaaccaatcctagttgattttcagatcatctttttgacttttctttatttatttttaatagatttgtttattactattattctttttaattaaaaacattgttagagcatcttcaaaatattatgttaagtgttgtttaatatagacaatgcatgtgattttttttttctttattagaaaaatattattttttatttaaaaagattaatttaatgtgatgtgggacaatagtggacaacttttaaaattgtcaactattgaagttttttttaagagaagatgacaaatctaacgtggatgagaaaaaaaaatatgaaaataatattttagaacgatgtgtttattttgacaattataggtattgccccagttggagatactcatggggcacccaccaaagtggtcaagcgcaccattatgaggtggatcctataattgattagtgactttctataatttttatttttttttattttttttttgaatgaagtgttctttattaaatcgagcaa

SEQ ID NO: 386329 - DNA, 2428 bp, Cannabis indica
cgacgtccgtttactttccgtcgtacctacctctcctactactatacacttctctctctctctctctctctctctctctctacttgaaaacccattttagagactatgacacctactgtactcattacaccacccatgtagcatcatctataactctgcaatgtacacgccatggtatcaacacgtatccttctaaaatcagtttcaatttagaattgaggatgattttaattgtatactggtagtgtctaacactttttataattggcgtcttataattagttagcgatatttattaaaagttattttttaaaattatattagacccgatactttattacactaataatattatgacatcaatgagatgctagcaatatttctctttggaattattatttttgtcttttaattaataagtttatattttattttgagcaattatatttattttattttatagtattagaattattaattatattaattctaattatttttattaaacttatatttagtttaattaacaaaatattttaaatatgatcaacattatttagttgctgatttcatctgatttagttgtccaaattatatttttttattaattatcaaaatattttgacaaataattgtaggagagatttcgatgaaatgtctcacttatataaatatagaataccaattccagagctcactactcattttgtgaaatacaataaatctatctaaagagaatagagagagtttccgaatactcacactaattagttttcttttctgcagatttaaaacttgtgtaggattgaagctcaaaaaatccattgttagaggtattttaatcctttattcgtaatgcatatatgttgaatttattccgcaattcatacataaaaatatatatgcttcatgttttgcttataagtttttaacaattggtatcaaagagaatgatatacgttttttattttcaattttatttcatagtatatagatacgtttgtatatgtatatctctttgtatatcgctatcatatacggaagatggtttgttaaattttattgtctattattttaatgcatattaaggataaattgtttaatctattaatcttatgtataaatattatgcactaaaatgaattttgtcttttatatatagatacatatatatttatactatttattttttacatgtatatttgtatataatttttattgtgttaacgtggttttttatcaattaatctaagaagatcgtaaaaataaagaagactgtgatgaattaatttgactaaataaaactgcaataattaaaataaacactagagatttatagtagttcactctcatctcctgatggtaatagggctaaatctattttgaatttattaatgagatctaacacacaagagttatgttttcaagagtgcatagaaaataatacaaaaatagatttctaagtgaaatctatatcgagacttatgaatataaggctcttggggaccactgtcacctgtcgaggccagcaagtggtagtggttggtcatggcttataggatgtcttagatggtgttccttgcttatttcactcatatggatactataaaaccactttggtcacattggttcttagccaattagttaagagaatctttttggccaaaaagatggtagtggtcgcatgagggttatggacccttggatgacttttctcacttttatttaatatatggatgttggaaacccatgctttggccaaagaaactcctcattttatgtggtggtcgaccactaccaccatttgtgccagaaatgtggcaatggttcggcaagtggtttctataccacatggtggcttttctcacttagttttgacatgttattgatgaaaaagtatttttggcaaaaaatcttgtccccattcaatttggtcaactactgccacaatttgtgccacaaagatggcagtggtcgactaggcttgtcttttagtgagaaatggtttctttcacttgtgttgcactccttggtgttaagggtacacattctgataagttctctttggtacttatgttagaatatgttttaccaggatctagatttactaccatgtatattatttaacatcctaaatatgaatctctaaaacaatgtaaataaacacatataaagtttcagttgccttacagtgggtgcagcggaataataatggctccttccactcagatttataacccttgtatcctgtctttagcagagtatcaccaagatctaagttcgaatctccttctcttgaaactggattcttcacagccttacacactatgattgagtaccacttgatgtgtgtgagcacttactctatcactatagggtatgaaattatgaagagatgaagagagaagagtggttcgaaataggtaga

SEQ ID NO: 386330 - DNA, 1140 bp, Cannabis indica
ctctaaatattgtcattgactactcttatgtcctttttatttttagtgcttaaattttttagttataacttccatcgtattcaaatattcacgttgagaggcacatgtttgattaatgttactttagtagtcatttcctttttatttttgacccgttactgtattcatatcttatgataatgaaatgttacaaaagaaacaagagcatgaagttaaaattgatcagaattaattactagataaattataccggaattataaaattaaacttagttattaaatcagagttttttaaacggacatttatattagtttattaatggtgtacacataattctattatataccatcttcaatggttgaagtaatagtggtagcttccttgaaataaatgtttagtataatcaaatgtagaaaatggaactatattattaactttataaaaaagtcattagaatattgtttttgtctctgggacattgcttctgcacaatgattgatattttggtattattgggcttcatggttaacatgagttcctcttgtgaagttgaggatttggtgaatatgactagtaagctgggagttgagaatgaggaaaaatgggaggagaatgaagagctagctatggaattctggaatttggggaacaaactctgcttgacagggtggtgctcgattaaaatctctaatgtagggttatatgtatttgtgtgtattgctatttgaagtttgacccaaataaagtaatcattttagtaatcgtggatcattgggtattaaagtgtcatggactaaatgtgtagatatttaagttagggatggagcgacttaggccatagtgtaggcttaagccctcaatcatatatatatatatatatatatagaaaatgttatatattatatatatgtatacactcttaatgggatgggagttaagaagtgttccatatatgtatatggaacacttcttaatgggtattacccataaatagttactaaacaaatttaactataaatattaattttaaaaatatcaaaccatcaaattttgatctaataactaataatgaaatcacaaatttaaatttctatgcttaatttaactacttaattagaaaaaatatcaaaaaatatctc

SEQ ID NO: 386331 - DNA, 1562 bp, Cannabis indica
agcttcaatttgccatgcctaataaaaacttacgactctaattaaaaaaaatggcgacaaaagtattttgttgcagttttaatattctttttagcgattaagtgtcgatttagaaatatgtagcaatatattattggacaatatattaaataagctaaaaaaatatgtcgtcacgaagaattagatttactcatattatatagaacatatcattgataatagatttaataataataaatagataagtgtataaaatagtgaatacttaaagtacattaaattatatcttatttattctttaataatattttaaacataaattataatttactaaggacttgtttggtacgccgtatagtattgtattgtattagtattatttaatacaatactatgtttggtatttacttgtattaatagattgtgtaaagttataatatattttcaatacactcgatcccaacactaactacaggtctgagtcctgggttcgggtcccgcgtctgagtcccaaatcccaagtcctgggtccggatcctgggtccaagtcccagtccaggtttgggttcggatctgaatctggggtccaggtctggggtccatgtccaggtctgggtatgggtctgggtctcaagtccaagtctggttgggtcccgggtctgggtttggatactgggttcaagtctgggtctcgggtctgggttcgggtcggagattggtgttgaccccgaatcctttgtatatattataatacatgctaatccggaccatttgttatgtattaaataatacaatgtacattgtattaaaatttttggttgtaataattaatataatacattgctttatctaaacatagtgttatttattattgggtaaatagcgacataagtattcaaagttttatgtttgtaagcggcataaacccaatgtttatttttagcagcataagtacccaatgtttataaaactgtaatttttccctaattttgttttcttattgtcttaaacatggcacatataaggcctaaattcttgatcattgggtctagatagaaatatgtagtatcagtgactttcaaatgttcttttaataaattcaaacagagtctgtattgacgaaactggaagaaaattatagttttacaaatattgggtacttataccgctaaaaataaacattgggtttttgatacttacaaacataaaactttaggtacttattcgctatttatgttttattatttaatacaatgcgacccttatacaaacaaccctaaattaataaaacaatatattttccctctctcctctttatctctaatcagtccctttttttgtctctctcattcctcctcttatccatgtttataaactacaatgattctgttcagattaaaaaaaaatattacttcatctgtaagtagtttgaaaaagatttcaaaaaaataagaaaatcatcaaatttagccagggtcggccctaggcatagggctatgcttagggcccgctcattttaggggcccaaataaaaaaaaatactttttaaaaatactatttat

SEQ ID NO: 386332 - DNA, 1379 bp, Cannabis indica
taatgctaatacaatataatacactccaacacaatactatacacacaataacatacaatacaatacgacgtaccaaacatgctttgagtttgagctaatagccatattaggtaaacaatgtaaaacttgccatttacgtactttagtgagctagtaacctaatttagtcaagttagttagataatgtaaaacttaccgataatttacttataattaaatatttttccttatatatacatattttcatgcacaaaggaaattaatctttcttaatatttcgcttcctcttcaatattttacatgatcatttgtctctacctctaccaattacatcaaatcattacatcaaaattttataaaaatactctttgtacgatttatgtaatgatttttgatgtaattggtagaattagataaatactcaactctattattaagttgtaaatgtcttcatatatagtaagagatttattattaggtactagtgatttcaatatcattattaggtgttaatctataaaataatttaaacgtttttttataatttataatttattaaattaaaatatgtcggatactattaataaaaatataacattttatgcatgcgatggtatattaagtaccatgcatgcctttaatattttttttataatagagtaaagtttctctcctccaaaatctcttcttaaactattcatccttccaacattcttaatttctttcttgacaaacatattacaagtcttcgagctaggtgtggagcctccaaattaacaatttggtcaatttcaacatgcacccttattgagtttccttttgatagagtctatagtcgtacctcttcaaatgatgttatttagtcttgatacatgtattgggcttggagctagacagatttttctttatgagcatggacaaatttgaaaaaaagaaaaaagaagtcagacacgataacacgacttgaaacttacatgagagttagtgggtttgaattttccttaattaaatgggtttgggtcgtatttttgttgactcgtctataactcgtttaataaacgtttccggttgacacgacttatacgaaactgactcattaatgacctatttgaagttattttaatactttaacatgttataaatgagtcataaatatgttattggttggcatacacggttgtgccgtgtcaaccggccatttataaactggtacgtcgtgttttcattttctttaacaactagggaactaagccgcgcttcgcgcggtgttgtctaacttttataatttttatgtatatatatcatatttatattaaatgatataatttaaaatataacattttaacgtgtatattataaacaaattaatagtgttgaaa

SEQ ID NO: 386333 - DNA, 2140 bp, Cannabis indica
cggctatcgctagataaatgttagagagaccaaaccgcctagcttgaggagatgatcaaaaatgttgcttgagaaaatcgatcatggtagtcaagccccactaccacaccgggtaactttcagaaaagtttgctcatgcaacactgttaagaaaattgactaattaatactctgtttagtactctgctgttattacttttatcattagtttgttaattactgttttattggtttttagtgcctttgtacggattctgttatgttgtctcctttggctgctacactagggccacctgtccacttgtaattcatccttgtaattccttttcagaatataaatagtaaaggatgtacctcagcctcctttgagctgagaattgtcttcaatccatttctgtgtatatttcaacttggtatcagagcatcatcggcccgtgccaatgtctgctcaatctcagactccccagggaacaaccacagttgcagcaggtgctgcaagctcccaaacacccaacatccagccaaattacactcagcctttcaataccctaaaccaaccctttcccttaaaactcgaccgtaagaactatgtgctttggaaaactatggtctccacagtgatcaggggacatcgcctagatggtttcattaatggtactcgtccatgtccagtcgagttcatctctgctctaacagccgaaggagaaactggttttggtcttactgtgaatccagagtatgaaaactggatagttagcgatcaactgctaatgggctggctgtacagctccatgactgagggtatagcaactgaggtaatgggatgtgctacagctgctgctttatggaaatctcttgaaaatctttatggagcacattctaaatctcgaatggatgacactcgtacactgatccaaacaaccaggaaaggctcaacatcgatggaagattatttgaagcagaagaaggcttggtcagattcattggccttggctggtgagtcataccctgagaatcaacttatctctaatgtcacttctggtctggacattgagtatcttcccattgtgcttcaaatcgaagctcgaccttcaactacctggcaggaactgcaaggaattcttcttgcctttgataacaagatggaaaggcttcaaaatctcagcatcaacaatggtaacaaatctgctcatgcttccagtactccaaatgccaatctggcaaatcgatccttcccaaacaacagaggacgaaacaacaactcttactcaaatcagggtaatcatcatcatcagaaccaaagtccaacaggaggtggtcgaagcaatcacaatcgaggtggattcaataacaatggtagaggccgtggtggaagaacaaatggacccaagccaacctgtcaagtttgtgggcgttatggtcactctgctgcaatctgttacaacagatacgatgaggcttacatgggttcagatcccaagcttggtggccaaggaaatcagaaaccaaaccaaccagcagcagcctatacagcagcaccagaagcaattgacagtgatgcatggtttgtggatagtggagcaagtaatcatgtcactgctgatgagaacaacatgacacacaagcaagattatggtggtaaggagcatctgaccattggtgatggtaacaaattatatatctctcattctggttgtggtaaattgcatactaatgctcattcagcacccttgttacttgataatatgttgctggttcctgacattgcaaaaaatttattaagtgtgtcaagtttaacctctgataatgatgtgtttgttgagtttcaccctgattattgttttgtgaaggacaacatcacaaagaaggtgctgctggaaggagtgcttagagatggtctttaccaatttcccaacaaatctgctacaaattcgtgtcagttacagtcgttttctggtttgtcgagtctgtccaaatcaagtgttgttaatacagccaatgttcatgtttccaagaaggatttatggcatagacgtctaggccatccatccactagagtccttaaacttgtctgtgagtcaaacaatgtaaaaatttcaaagaatgaaatggaaaatttctgtgaagcttgtcaatttgg

SEQ ID NO: 386334 - DNA, 1098 bp, Cannabis indica
ctatggagtattaactactttctctcttaagagaatgactgaccaaaactcgtaacctttttcataaaaggatgaggccatatttataggctctttgactaatggatcggcttgacccatatccattaaggttttttagactaaaatagcccactaatagggtacattgcatttaaatattgacctttgggccagttaggtgaggtctgatttgcatataatagtcatctgtataaggagacattgttgacagtgaaaattgtgcgtgtgccaatagccttgagtaggagaatgtcagtatagtaggcattggataaaaatgtggtttccttattgttgtgtgcctctttgcagtttgacacaagggaaaagtcacctaatatctcgggatcgcgtcaaaagtgtgccatgtgggttggtttttgtgacccttgccgctataagacaccatttcatatttcgttctcgaaggtctcttacgggtattctctttatttatacttgttttctttttaaaggactgtaggtcaatctggcttcacttttggagaacattcttggtgcgtctagcttcaggtttccagattcatccttcccataggtaggtcgcatgcattattcatttggactcatcaattgggccatgttcccctgttgggctttttttatttcccacctactagctatccaaaaacacggataacatttacccccaagcctttggggctcaagcatcacaaacgcttattgtttccatataggtttgagatctttcccaaggccacgaactaggacggtcccgtaatatgctgatgcgggatgatgtgaaaatcctctaaacctttaatgctctggttatgttgtaacactctactaaattgggcatgttatcgtgatttcttaatgttatgcactcatttgctaatcaaagggtttatgaaaaaacatggataatttaaaatattcttaattaaactttaaacttaaataattaaacactttgcataatttgagatcctgtttctaaagttataaacattttacaaaatatttagttacaaaagttgttacctaacgactatcaaattaaagtctaca

SEQ ID NO: 386335 - DNA, 1044 bp, Cannabis indica
gtttcttctacttctaatctttatgacttacgagacataattaagagaaccaagaaaagtaagaaaataagagatggaaaatgtaaacaaaagcttatatcgagatggtgttgtgttgggtatggcttccttgtttgtgatatctgccattgttgtatcaaagggatcttacaaaaacatggcatggtctaacatccacacggccactactccattgccacagacgactcatatgacaactcctacttacatggtactctacttattattcaggtttgaaattcatttatttattacttgattatttatattgtatgcatcttgtatatatcttttaaatgtaggatctgaataattttgtatatttgtattgtgaagaatcaaagaaaggttaagggatcacaaaatttggaaataaataacagaacaaaaagagacagagatgtaaagttggagatggttgaaggtgatcttactacagccagagcgttaataagggaagcgatttctaagaaatttgttaaccaaactaattatcctcttcaagattcagattatgttcctgtaggagaaatttacaggaatccttatgccttccaatggtactgaatcttttcatcttatatgtataaatgtgtttggttatatttttataatgtaggtataaagaatagtaaaaaattaaaatagtcctattatagaatgcaaatttatggagtcctaggagaaaaccaatgtttcattagtcacttgttctgaatagcaagattgaataatcatcgtcaataagaaaaatatgtatttcaatttcgaggaaagaaaatttgatttagtacattgaatatttgatttgaatatatgtcaggagttaccttctgatggagaaactgtttaaaatatttgtgtatgaagaaggagagcccccaatatttcacaatgggccttgcaagaacatatactccactgaaggagttttccttagtttgatggagaaggagactcatttcagaacttgggatgctgataaagcccacgtgtatttcc

SEQ ID NO: 386336 - DNA, 865 bp, Cannabis indica
taataataataaaataaaacacacgaaatcaaacatatataatatataataaaataaaaaaacagaaacgacccaagttgagaatcacccctataaacacaaaaaaccaaaaagattataacttggcatgcatggaaaacaaaaaagcaaaaaagatgacatttttaagggaagaaaattacagcaacgggaagcatctccggctgacgaaccacctcctgcaacatgggccttctttctttcttctctttgttcttttttttttgggtttttttttattatttttattattattatttttttttggtgggttttaatttggaaaacaactctcttaaaatagcaaaaaatagaaaaacaagggtcttgtagcaacaatattaattcaaaccgttttcttctctcctctgtttcaactttcaagctcaaaataatgtgtaaaaaacaaaacaaaaaacaaaaaacagagtgcttgcttatttttctttgaagaaaaggagatttataatgtttttcttagctaagaaaatggggagtaaacagttcatatatataatacaaaaaaacctatatagttgggaacacagggcatatttggatgaggttatatcatgtatatatatatgtgtatgtgtgtatatatatattgtatataatgtgtgtgtgtccttaacaaggttgtaccttacgtaggctttggcaatgggtcaacccgagcctcacgcctcaccactacactggctctcaaccttctatttcactatatccacgtgtcgctgttttattcgtttgggtccggacacgtggcgtgtgtacatggtgacatggcattttctatactaattatgtaattaatatttttttt

SEQ ID NO: 386337 - DNA, 1990 bp, Cannabis indica
attcgtagacaagaagaagttgtggtccactgttgcaacagccaagaagtctcaccaaattccggtgatgaacattgcttataagcctcacttcactctcaaaatcagcttttcctctttctgtttttcctattgctagttttttcactgctacgatttttccattcttcagactcccctgtttatttaattaatttcaatcaatttaagaaacaaaaatcataaatgctataaataagaattgatcatatatttataaattatcatcttcaccttgtaaacatcaccaaaaccaccttccccaagtttattttgttcactgaaattttttgttgcatgtttcaaatcattgtacttaaaatttactggaccttgtaattctgtacctcccaatatgttacctgaatgagggagttatatgtttaattcaatttctaagaattaatattgttaaaaaatgaaaataatacataatcctccatcatgaaattaatatatgtagatatatataaatttatatgaaatgatatcaatggttaaatatacattattacctctagcaactggttgtgattttttagaatatcttttaaaccaaatgaaaattccaagtatgatgatgagtgttagagcacctacaccacctactattcctccaattatggtcttctttcttgaactacttcctattgaaaattaataatcaatagatatagtaataaattagagcattgctatttgctatattggacaccagttgtgtcttaaacttacatttgagtgatacttaactcataactgtaatattttcagtatgaccacctataatgcacactatcactatttcaaaaatctcttaaagaaaaaagaacattttaagagaaaaatactagaaattttatttggtagaatgctttttgatgccccttacaataaaaaggatgactctatatatagtcatctatatggggtaggatacaaaataagaaacttcctaaaaatttcccacaaacataaaagtatagaaaatgacaaaatgacaacaaataaaaaaaccaacaaaatgataaactgacaaacatagaaaatgacgaaccgacaaacaaacgattaggaaaatttcctacaaacatcatgactatcaagaaattttccatttattgctatcttaaaaaagtaagagatatgaaatctctttatactacttatgagcagtttataattggctcgtagtcagtattgtagtcaaagtcataattagagttctcttaaagtgggtgccaacttgattgttcatcatcttcgtcacttccagctggtggacatggctcatattcagaataaaccatctcccattctagttcattgtattgaaagagatagggattctaattgattttttagtccatgtatagatcttgtgaatcctcaaaaatgcttattttatggagtaggacccttacattgtctgtttctttgaacagtgatgaatttttcttcttttctttaagggcttgaacttgattgtgaattttaacataaatttagaatttttctagagcattttctatgtgtcgtcaataatatgagggaaacatttttcatggggcatcaacttctatttttggccaaatttctggtagaatagtctggttttttttaaaaaaaaactttttggagatccatgtactctgaaatttctctgaaaggtccttcttgggagccgtatagttcaaaggtgggatcgtaaactattttcttgttctcgtccaattttacattaagactgataagaaagacaatgtagcaatctatcatgttggctacatgcggtcctgatggataaatacagatgtgcctattgttgcgaacctttttccatccaccccaaaatatttttttccactcctctagaggagcgtaccaagataaaaggtctatttggatttggtaggctggcttaattttttcttgttcaaggaaagactgt

SEQ ID NO: 386338 - DNA, 789 bp, Cannabis indica
aatacattacattgcaaatgagcttgtcaccctggcgtaaacatttcattgatactacctgtcttactttccccctaaatcaaaaattcttatcaataaagtttctacatctgaagtaggtttaatagtctaatattgggcttacttcctcccgaaataaaatattttcaacagtacagtatagataatcctcaaacgggttaaattcattacagtagaaaaagaactgcattgacagcataatttgatatataaaatatagggaatgaagagacaacctttctcgaggttctttacgtttttggatgagagagtgatcctaatcttgtggatctgctcctgtgactcctccagaccgggcttcgttggtttcattgcagcgtacgccattgttgagaagttggtttttgcttatatgaaccctaacccactcgagatgatgatgcggccgtggcagagaagaggagagccttgacctctggcgtagctattcggtagaaagacagaggtgaaacgagatttgcttctaaagccttactagtggttagggttttgggaggttgagaagctttctctgtattgggcttagggtttcaattggacccaactccagtacttttacttcagctccaactaagcaaaccccattgaatggcccattgcacttttcttagagcaattttttgagataagttgaaaaataccacttttattaatcaattaattaaatttacctctaattttatatttaattgaaacatacctctttttatatgtattgtacccaaa

SEQ ID NO: 386339 - DNA, 844 bp, Cannabis indica
gaaacctgttacataacaaattagttgtatattatattcgagtgtaagatataagttagttttttctagggaaattaacctatattattattttttttaacttttttttttccaaatttatttttgagtttctaaagtggttgcagcgctagttgcaataggggtttctatacaattttttgttgcaatttaggttgcagcgccagttgcaataagggtttttatctaaaatttcgtaaaaatacaaagaaaattattttgaagtgcaaaaatgagaaaaccaattttttcgaatgattaagatgtacaacttattaaagattagtgattttagtaataatattatttatttaaattgaaaatggccttttttcttttcttttatttttttgtaataataataataagtatatgtgttttttttttaattaaaaaaaactagtgtaatagtatatttatagtatatattgcgattacggaggtgtataactgaaaaatgattttagtttactctaacattaattctgtttcaattctcaatcatgcataggcaattgtatattacttttaatatttagtagaactttatttattaagtaatataatgattagtgtggtgtgcaactgtacatataagattctatatatttcagtgatttgttaattgcctagctatacatatatataaataaggctaattaagatttttgtccctaaactttaacatgtatcaaatcatgctccttgaacttttaagatcgttaaaaatgctccctgaactattgaaattgttggatttaaagatttttgtttaattttattcaattttactacttcagtgatt

SEQ ID NO: 386340 - DNA, 2294 bp, Cannabis indica
aataaaaattacattggtattattatgtgaacggagcaaacgaagttgatggaatgttcttgggttgctcaagccccgagcattccaactaataatattcatggtgactggcgaggctgaacatcagtcttcgccaaaggagcagcacttgtatcagccattcgtgaatgttcagcactttcagaagatggaccgggaagttgatgcagcaagttgttggtgaaattagataaaggagaggctttggttcaacatctcttgagcacatttcagacatttcctcctgttgtaactaattgccttttggaaaaaagagaaggcattctattttcattaccaatatcactagtgttttgaatattggttgtgctgccaaaaggtgtagaagattgtccaaaaatatccacaccataagcaacggaagagactgttgtagcagcagacattccatcactgaaagtgtcattatggggcatgtggacataagcaagaggtgtagcaatgggcaaagcaacagaatgcttgacaggagcagtagcaggtagggtcgatattggaggatcaatcattgttttgttggtaggaaaagcaacctgctttgaatcagtcgctagaacagatggtaacacaggctgggccgaaggaatggcaattgattttgttgtgggggaaccaatggtgaggtgtttatcaaagtgtgaactggtagaagaagatccagtttgataataatgttgcattgaggaaccaagcttgttagcgaaattcttattattaataatctccaaaacttctttgcctttctctgaattggttatctgtgaaggtgatgcaggaaattgatttgtgtgcgggattattggagcaatagacttacgatcgagtctagtgatgaacggccaagggcctgctttggaaaactcttgcctataacgatcatagttggatctaggcagtgaagaatcttcaatccaaggaccataagggagtttaggctcgatcccttcatcaaaattttccaaaaacagagggcatttatcaaagacatgtccaatgatgccagattcatagcagaaatcaggtaaccgctcatatctatagtcaagtcacatttcatcttccatccaaggaaaggtaactaactgaccacggagaagaggcttagaaacatcaatatcaactctcattcgaagaaaaggaccccatccttcgttaagagaattttcatgaacttcaatgaaagtaccaattagattaccaagacacttagcaagagcctccgatttgctaagaaacgggagacggtaaacttgaatccaaaatggtgtaatggtataagaatcgattggatcattttgtagaacacttgggagacaaagaatcatatgttgattatgaaagtgtcatggttctttggaaagcacacgtcttaaatccccttcacatccaaaagttatagtgaaagaatcagtatcagcatcatagttagagataatgacagcaaacctaccaatctattgagtagtgatgaagttcttaaaactttttggattgaaacctttttttgaataaattctgcaaaaaatcttgttcacaacaggacaaggtggtgtaatattaatatttgtgatatttatgacttctctttcccttatagaaagagcattagagatactaggaatggaattatccataaaattaggcaaaaaaaagccagaggagaagaagatgaagggaggagcagggaggaagaaggagggaggagcagtttaaatttgaaaaaaaggcaaaaaacagtaagcaaggaggaagttaacaacaaagaatagttaaaagaaaagagggggaattaactgcgacagagcaaatgtgaagggcagacaaagctgaaccattaagaccctcactcttaaataagggtatctactctttcatatacttgctaaagcatctatctatttatttagataaaagggtttatttaaataaatttaaatgttactgaagaaacgagggctgttcatataaatcggaaaattgcggtttaaattcggaccacgacaatccgaaccactgtaaaccataaccggagaaaccgtttttggtggtttggtcaatccggaccgtttacggtgtaatggttcggttgcgattcggaataaatagttaacggttaaaccggaccggaccgtttataataaataattaatttttatatattttaggtatgactatatgtataattttgaaattttttgtgtgtcaacttttttattgcatgaattttgaatttt

SEQ ID NO: 386341 - DNA, 816 bp, Cannabis indica
ccaatttgtgaagggactgaacagccctctgagaatcattacctcgtctacacattacatataattgggcacctgaaccagaccctgctttattactctcttcctctaaagctgaagagatttcaggaagcctagcctccaaacttcggagagggatgttcaaggacccaggaagagaaacaatcttgaaatggtgttctggacgaacgtcaaccaatacatatgcttcacctttaactattttctcctttaattctgtggtgcttattctggaatcttcctcaagtaaatttaatttcataggtgactgcaaaaattgaacgcccatattagagtatccgtaattattacttgttagtagacaaaaggaaaaggtagtaaatgtgtaccgaagacagtggagtctgagtgaacttctcataattaaattccttaaattttttgttagtgaatgatgaattttcaccacagacttcacattgcaatgaccttcccctgatggtgacctacattgcaaattacacttcataagtacacataacacaaaagagggagctgagaaataaagcaataaataaaatatggtagaagtctgttatttgattagaacataatgtgggacaaaatgaggccatagcaaaatcagatcacccaaacttatttatctaacaaaacgctactcatattcaaacaattgtctttttagcaattcttttacaaaaacagttgggctttctttgaattcaacttttacaagagaaattttgtgagagaaaaaatcatgaggttctttgcatatatctataaaaatctaaa

SEQ ID NO: 386342 - DNA, 1359 bp, Cannabis indica
aaaaaaaacaaagaaaaaaagaacttaacaaaatttgaaattattgatccctgatatacaattctataacataataagttcagtcaaaagtataagagttgacttataatatgttaggaattaggattactaaatttccaagttgtgtaagaagataaaaattcgtgagcggcaggattcgaacctgcgcgggcaaagcccacatgatttctagtcatgcccgataaccactccggcacgctcacttagtcatgatgtttcatgattaccttgattatttctcttatataacaatatctacttgctcctatataagtatgttttatatatatgtcaagggaaaatactcgatctcgacgtgaagcgagggctacctcattttctttggttatatctttcttgcatttgaacaagcaagaagcaaagcttgtatgatgttgcttggtttcgaatctttactagaatgagattatggcttttggggtattatgcttactgttaatgataatgaggtatgtttgttcatccttaatggtaactttataaggaaaaagtaccagtactactgatgtgctagtataatccaataccaaggaagaaagaaacatgggtgaagaaaagaaattacacttttgatggttacttttatacagtagtaactagtagcaattgtgtcgtaataatcgtgccatgtgtcttttgtttttttcctgagtaattaacaaattcaaatctatatatttatattaaggagaagaatgaggcgctgatatggtggtctaaaaatactttatagtcccagatgatgataatccaagggtaacttctgttaatcctgctcttgttgatcaaaatattaaagcgcttatggaaactgattcgctggcttgggatattgacttggtgcatgatttgtttaatgaaagggatgctactttgattcttagcatttctttgtcttcaagtcgtttatgttatgcttggtattggagttgggaaaacttgggctacttttcagtcaaatcaatttataagttcttgcaagtgagcaaagaattgggggcatgggatgataattccatgttttatactctttggaagctaagtgttcccccaaaagtgaaagacttgttatggtgggctgctactaattgtttgcctacaaaaacaagactccgctctagacatgtgccggttgatgccgtttgccctgtgtgcaaagagattgatgaaacaatctaccatagcctggtggattgctcttttgccaaggcatgttggcaacagttggctgctaaagttaatctgacagtagttggttcttttgccaattggcttgcttcagtcctacagcaggta

SEQ ID NO: 386343 - DNA, 1239 bp, Cannabis indica
tacttccatactcatcttcaaacacaatagtgtctgggaattcttggttcattgaaactttgacaagaactctcggaaaggttaacttgtctctttctttagtaactgaatccaccatcactgggtttcccatttgtccaattatcttgaacaatgattttccccccagtatttcagttccaactcctctacttgtatccaaattgggactaagaaacatcttcctttttaaaattcacattcgggtcccatgccttcataatgacaggcctcctgttgaaaaagatgtaacctcctgttagcacttcatctctgcactcaatagactcaaactgaatcaagaaattccatatgcaagcattcccaccttatcaacctttcccttccatatacgtctagcaaaaccatccaaaatagacaatggtggatttgctcctaacacatagcatacaattgaaggggaccaataagatatctcatcttcaatatcttccagttgtattttcactttcttcccctgttccttactaacaaaagagctagctaaattctttctcatagattcagacctaagtacaggaggttgaggagaattacctttcgaaatttcagctgaacattgttggttagcttgcataaagaaggcaaactctgtgcgaatctcttcctgctgctgtattgcttttaacgatgactttggcgatagtggagcttgaaataggtcagaactcgctagattaggcacattcatagtcgccccttcgtcctcgctttctgaaaaagctattggttcaactcctaaaatctcatccatggacttcagtttctttacactagtagtcgaatctggtcctttctttttcttcttcttcctcgtagagttcagttttccctgcatcttggaccttgtttttgccattgcaccagctcagagagctacaaggagtgagaaagagagaaaaatatttttcgaaaaaaaaaaacattatgaatactgaattctttcctttgtgttcataaaacattatgcaacatcattttctatatgcattactcatctagaaatactgaattctttactgcttattaagtgcatctgaataaacagaagacatatctctcattctatccaaaatggaatagagataacacagtgtagaattttcttcagttgaataactttccagtgcttttgaaagcaacaaagttatgtatcagcttaaattattatagatgagt

SEQ ID NO: 386344 - DNA, 1615 bp, Cannabis indica
tttgtgcttttgtgttgtttcagaagaagaaggatgagaccttgatagtatgcatagactatcgcgccctcaacaatgtgactgtgcgtaacagataccccattcctttcatcgtttatttgtttgaccagctaagtgtggcaatatacttcacaaagttggatttgagatcaagctgctatcaagttcagattgtagaaggggatgaaccaaagataacttgtgtttctcggcatagggcatttgagttttgtgtcatgctgtttaggttgacaaatgcgccagctacattctgtacactcatgaatgaagtctttcatgaatacttagatatgtttgtggtagtgtacttggattatattgtggtctacaatgccactttagaagagcatcaagaacacttggcagcggtgttccagaagttgaggaaaaaagaattgtatgtgaagcaagagaagtgttcgattgctcaagaaagtatcaagttcctgggccatgttgtggaacgtgggaggatccacatggatttggagaaggtgcaggcgatccaagaggggatgaccccaactaatgtgaaataattatgctcttttcttggtctagccgattactacagacaatttgtggagggctattcaagaagagtggcacccttgacaaagttgttgaagaagggtgtgtggccatggtctgataagtgcaaagaagcatttcgaagtttgaaataagtcatgattgaagatcctgcattagccctaccaaatgtatacaagccctttgaagtacagacggacgcatcatattatgctttgggaggggtgctcatacaagagggacaccccatggcatttgagatccataagctttcaaaagcagaaaggcagtatacaacacaggagaaagcgctcctagcggttattcattgtttacggacgtgaaggcattacttgtgtgggtcgaagtttgtggtgaagaaggataatactagtgttagtcattttctcacgcagccaaaactaacccccaagcaagcctgatggcaagaattctcggcagaatttgacttatactttgagcacaaggcaagacgtctgaatcagataattgatgcctttagccgtaaagcaaagttggcaactctaaaggtgttagtgagtatgtcaactagccgggtgggtacactaataaaggaacacatcaaggagaacctggagaaggacccagtcacaaagaacatcatgggtcttgcaagaaaaggtaagacaactcagttttgggtagaggatgatctcttatgggccaagggtggccgtttgtttgttccaaagacaagtaatatatggaggacactgatgagtgagtgtcacgacacgttatgggcaggtcatcaggggtggcataaaacacatgcccttttaaagcatggatactattggccacaaatgcaggaagatgtagtggactacataaggacctatctcgtttgccagcagaacaaggtggagagacacaagacgctagggttgttagagcctttattggtcccaagcaggccatgggagagtgtctcacttgattttattactgttggaaaattttcaaggatcttagatct

SEQ ID NO: 386345 - DNA, 1338 bp, Cannabis indica
gatatacatactctgcaaaaaccacttttcttcaagatataattctttacttgaacctcatcataatcttaatcaagatcatcaagaaaatattaggtcaattttcttgcctatggtcactcatactctgtaaaaaccacattttcaattcaaatttcagattattggagaatattgtcccacgtggattaaatgtgaaagtattgagccatatataagaaacatgggctactccactcattgccaattggttttgagttggaaccccataattctctacacagattccaaaaaaattaaaatttgatccaatccaatacactatccaggatggacttactgtaaattcaatgacttgtatagagctagaaattagatcaaaaagcccagcctgaaagcaacacaagatgtttacttcccatcattatacaaccaattatcttgctctggaattgtcaccaactcatcaaaagaggatccacacttttcagtttctacaagaatgttatgaagattaaggccctgcacgcaagagaaatttgaaatcatgtctccactccaatacaaacaaattacaaatttcaccaacgttatgggcaaataattgaatattatcattcatatttatctagttttgtctcttaacttgagcgaaatgtgaaattttcaaacgaatataatgttcatagtgcgtttatgtttcttggtatccagaaatcccaaaaataaattattattttcatttataatattttgaacgttataaatatgttgtacagaaaaataatgaaattgttagcctaagaatccgcaaatggttcttctacaaattaaaactcataagagtaaagggaatggacattgttacaggacctgagttccaaggctcttgttcaaggcttcatttcacatgttagcagcatatgcaggttgcatttggttccaaactgtcataacagatgcaacctacagtacaataaattctacaattaaaacttactaatcaagaattttataactttgaatcatgaacttgaagttgaaacaaacacgagagagggagcgaggaacaatttaatgattgctggaacaaagttggtgtttatatgtttgggcaagacagtaacaaagtaaaaagattaagtcaataccctttctaagcatgtttatttgaatcattatgtaagttacaatgtagataaaaaagaaccgtgcaagaattaaaagcaaatttaaaaatatttcagtgtaagaaaaccaatttggatattgtgacatatgatgattggtacaaactgttcgaattcaaaataaaatatgtaaattttttataaaatt

SEQ ID NO: 386346 - DNA, 3442 bp, Cannabis indica
agagagaaagaaaagagaaagagagagaggggacgatagtttgggggggttgttggtgtttggttttggttatacatatatataatttattattattatttattattatttattattatatataacttttgactcgatcaaaaccgagttttcacaatatagattaaaatgtgacaaatatatgttattatgagaataatatatattatagtatttagtaaataaattgtataatctataatttattataaataaaatattgtaacataaataaaaaattcaaaagcagtaactattttgtaacttatggatcacaaatataaaatgtacaatttaagtgagtaaatttttttatatgttatgcaaatcaaatgctataaaattattacccttggaagagaatagatactcataaatatcagattgttatgtatcaaaacgttgagaattcatgtagctcggagaggagtaacaaaactcaaaattgagttttctaaaaaacggttgttttatagttgataacatgttattttatggttgttttaatcacttggagccaattttagaatacattcatgaacgtgtatgtatttattgagcatgtttctagcgctcttccccaatagttttatcatattaaacacctactaaagtgctgtgacagtcatgaagtaaaaggaattcgattttctaaagtgatcctcaagcactataataatagaggtctatagtgttcattttagacaatcagttttctatcaacaagcacttgctagaaaacacaagatttgatgattctcaaagttatttccaagatagttttcttaattactgctaagggatagggggacataagcttttagacaaaggtattataccttgttcaagtcatgatccccactgatctacgctcaagattgtgagtgagtgtttctatacatattcttcttcttctaccattcttatatatacatatatatagtgtagtatcttttattgtaatattaattatttaatatttttgttggtccttgtattatattgcaataaaattgtaatgtcttcattttcttccattataataaaatctctaataatagaaagcttattcattttcaatgcaagagaagataaatcaagattttgacaatacaatggtaagaggttttatgtgaaaatcatccatagatgaacatagtggttattgattttgtattttactattttaaataatagcaatctatgtattaacatattttcctttgttgagatgggagagttttacatgtatatagagaaatatatatatatatatgtgacatatatatcatattaatatatataatggtatataatatgatatttgaattttatatcatgttattatatgtatatatatgagatatataatatatatcatgtatatatatgagtaatatatattagaataattagtatttttccccttaaacttttggcactacctgattttagctcctaataaaatatacggtttattaaaaatttcccctaaaatataacagttacataattatgcccattctgataggttctttttcttttaccgtcaaaagttagtattttaccccctaaactttgaccaataccaaattttgccatcttttattaaaaataataatttaaaaatgtaatattctattaattttgaaaaaaataataaatattaaaaaatttgataagaatattaaattaattacaaaatattaattttactttattttcaaactttatttaatttataaacacttatcttaaaaaattaaactaaaattattgaaaatctaataaataatctaaataaattaagattttttgatgaaaaaatcaaacttatttatatttataaactcttaacaaataaagaaaaataattaaaaattcaataaaaatataaaattattttttaaaaaaaggtagaaattaaactaaaaaaatttatattttgttcacttaaacaaatctacatttttctgagaaaaacaaaatagacgcaagtttgttctcgtaaaatttaggttttataaaaattgaatttttaatatattttttttagtatctaaatgaatttttaataaaaaaaataaataatttttaaatcgcttaattagttttaaaatttttatttcttttttaattttcttaatcattcaaaataattattttaagaacaaaattaactttttaagatttactaaaaaatgttgaatctttttaatttttattttgagggggtacgatttgatagttgtcaaaatttaaggaataaaattgctaatttacaaagacacgtcaatatttatacgaaataatgggatgcaacctaacaaatggactaaatttttgcaaatataaaagttcaggagaattcttaacaagccgtatattttaagtatattttagagggcaaattcagtattattaaaagttcaagagaaaaattactaattattctatatatattatatatatatgtagagaatgtgacataatatatattagtgagattaaatatgtaaaaataacttattttttaggtatttatatgagacatgcatatataatatatattatttgtatataatatatattatgcatgtatattaaagtatatatattatatatgtgtgagatatataatatatataattgtgttattaatatatatattatgtgtatatgatatatatgtatattaaaatatatatgctatatgtatataagctatgtaatatatgtatatttgtgaaattaatattactattatgtgtatgttgtgtcacatgtcaattattagcaacatacatattatattaatatataaattatataatatgataattatattgatagtatataatataataacattgtttattactattgatgtaaagatgattatcatcaaaattgtgatgattttgagaaaagaaaatgtaatttagagaagttatattatttaagaattaaaagtgataattatctgataaaaaaaataaactacattacacttatcagatttatcttgtcaagaatcagaagtggttagcactgtctattattaacaagaacaaataaaatctcttaacacataaatagtttgaaggaactcatagaaacttttttgtttaatcacatttaacaaaataatttaaaaaaatctccattataaagtgcttagcactccctcccttatatatattaattaagatcttcaaaacttgtttttgttattgggtcagtcagtcactcactcatcatagaattaactccatcatttccaattcatgtccctgattcgaagagagtggaccactaaacagtagtggaaaatattaccaaacatcattttttttttttaccttttgggttacatatataatatttatacatatatatatat

SEQ ID NO: 386347 - DNA, 1301 bp, Cannabis indica
tatatgggctaatatttccacacgttaataatgactctttaacaaaaatatatataaaagagcattgttattgggtatcagtggtgtccaataccttctatagttagcgtctcacgattagttagcgatattgtctaatttttttaagttatatgagaccgatacttaattacaccaataatagtatcagaccaaaaaaggtgcgaggctccaataatatcttttagcaattctctatataaaagtctttgatatcaagtatagtcagtacattaatacagcctcaaatataattcattttgtcattattatctcattatttttgtctccctaacttccaaactaattccgtaaagactacgttaaagtaaaactatcataaaagaccaaaatatatcaaacttaaaatctctaattaacaaaccaataagaaaatatgaattattaattggcatcaagaagttcctaccattagaaattctattaattttgtaagaattatatgatgagagttgatcaatttgttgattgtttgtaaaagttttgattcaaagcaacaaagctagggccggccaaagagtgaggcggtcgaggcctccccatcattttagagctcctaaaaaattaaaatacaaaaaaataatatgtatataaattttagttcaataaagaaagttatagcacattaatgtaagagtatataaatgttaaaaacctttatgtagggttcttttatttatttatttgatataagaatattatattttataatattttcaactcattaattaattacctaaaaaatattatgctatgtatatttttaataaagaacaaatattatattttagtttttttttaatggaattactcaatgtacaatagtattttaatgtgtaaattggtaaaagaaaattgatataatttttgacgttttttttttttttttacaacagtgctaaaatatataacactttaatgaagatattgttagtaattaattaaatattacattgtcaagttagcttatatggtgaaaaaattattaatttgttatacggagataaaaataattaaaattaatattatattaaaatttaaataatatttattttaaacttttgtaaaaacaaaatacctcattttaaatttgctctaagcctttcaacactttaggacgggctgcaaagagatggctaacttacccaaaataaagaggaaattatattgtatatccactttactttacttgttttaatttttactttcattttcatatttttttagatatacctactttt

SEQ ID NO: 386348 - DNA, 1870 bp, Cannabis indica
ttgagcaatattaatgtgaaaaaaaaaaatttatgatatatttattatgaaaattaataatgaataaaaaataaggtttttataaaaaaaaaaaaaaattattctcggtaaaagagtctgtaccgtggacaatgtcctcggtatagataggttcattaggccaaaatgaaagcttttatcgacaacatatccaagcttttaccgacaacatttttcttggtagattctttaacgagaacaccactgttgtcctcggtagaaagcaacttctaacgacgagcctctaacgaggactttttagtgaggacttgtcttggttatatggttttaccgaggacatgtgaagttctaacgaggacatttgttctcgttatagaccctgttttttgtagtggacacttggcatcattgaacggtcccctctcgtatggatgatcatgcctcgtgaattgggcctcactcaattggcccaaagtcaatatacattatattttgccccattagtgggcctagttaacacttttaaaccttgttgggtccgagtttgcccatactcagatctcacttataaatagaacattaccccttcatacaaaggtttggaaaaaaaaattgagatcaagtcctgataattagggcccatcttccaaggcaaaaacacttgtaagagatatgttgaagcttttttagctcaataatattgaatcgtggactaaaactcaataacacttgaatcacgtaaaatcaaggtcttcttcttcttttaattatttctttcttcagctcatttattttataaacatttttcaaaaatctcggccggtaaacaataataataaatatcagtttggacgggttaacccaactaaattgacgaaatcatatttggtgtgttaaaatttaattttttttaataattgggcgggtcacaattaaatatttgtaactcgacatttatattgaattggtaaaaatatattacaactcgatcaaactgatctatgtacacccctggtcaagtacattaggtgggttgactttattttcaacctacccaatctatatttgttagatttttttggtttggtttgagtggattgttctaattgaagggtttacaaaaattcatgtacaactctaaatttaagtaaacgaccataaatacatcaaatttgtctcaacagaaagatttttgtgacagccagagtgaggttagtggtggagatgactatattatgagagcagcagttaaaaggagaggttttggttgatggacataatttagattgcaaagaatttttaaagttctgaaatagtcatgttctatattggacctacaagaaggtttttttttttttggtggagagaaggagcaacaagattgttggaattatatgaaaaactcagtacccatttctaattctatcataaagtaccaaactttatttctaaggcatttttattttatgatttgttgggctatttggatctttattaagcttttccaattcaatgaagcttattgcaattgatgttcttgaatcaatatgcagttaatttactaattgttatctctactaattctattctaagacatttttatctttccaagagactagcagtgatataatatgagctataaaacagtacttataatttatttttggaacatatttttatataataacaaaaaatatataacaagtaataaagagtaggagtacttgtattattaaatttatcaaagagttacacatatttattagatatatataatattattcgagaaaatgaagatgaaggctgcagcttggtccattcagtgggcagtgggagactatatatatatatatatatatatatataatag

SEQ ID NO: 386349 - DNA, 1599 bp, Cannabis indica
ttctttgtcagtttttcgataaagttcttccggttgtaggacttgacagtgtgaactttagcaacaagaaaaagaggaacatgttgaggctcggtttcaggggtgtttgcaggagtgtggtcatgtagagtttggatagtacactcagtttctgttaggttgagagcagcagatagagaagaggttagatcatccattgagcagacagatggggtgtgaaataaaacacaaatcagtaaaaaacaaagctgagattgcagaagttttgttgttggtgtggaatggaagggaattggagagcaaataaccaaacagatacacgggcaaatggggatgctggattgaaagagtttgactgggataacaaatactaggaaaaacaaatctaatttaaaccaaaataaactgcccttactaacagagggtatataaaactgactgatatatatatcacacttaactatggtcagcgtattatggggaaagaagaacaccaagaaacaagtggtatgagattggagaaagaggtatggagacactaggatagaccacagagaaaaaggttggtaggaagtcaaggcttggacggttaaactaaagagaaagggagcaagacaaagatataaccaactgaaaacacgcaataagctgaggtacgtataactctgaaggggagggaatatgtttgagacaagatcgcacacaggggaactgcttatatgcacggctataaatagaaaaatacctacagaggtaagacaaaacgcagtagtagtagtcacttctgtagcatttaataaggagtagagttgctgcctaggggatttgaaattaacactggagagaacacatttgcaggtaaaattaaatgaggatttcaaactcaaattggcaaaagggattaaaacccttctgtcgacggatttgagagggttcccattaccccaaatccctttgaaagtacaaattccaggatacaatttaataggcagaccaaatatatatctaaattgctcaataaaaaaccaatttctctaagcagatttgacagtgaataggagaaaatgtaaggggaaatcaatacctgtaagaggttcatttaaacctgtactgatcgacggatttggaaggaggccggagtaaatgttgattcgactggggtggttgggtttctgctgaggaggacggctcgcttggcttggatgggtcgagctgttctgtgtctcagtggatgaagaatcggagccaccatgatcgagcgatctggagcttggcatgggtttcaccgtgtggaaactggcatagattgggtgtgaacacgcatgggaagaagaagagtctctgttcatactgagagagtcgagaggaagtctggaaagttttttcagagcctcacactctatattactacagtttatttcaattaatgccattatttaaaaatcccagaaaaaaaaaatgtcactattaaagggcagtaacatcacgcgctttgaattgcgtgataaatattttcatacatatttaagaagagcattgctattaggtactagtggtgtctagcaccttcctcgatatgttgcgttgcgattggctagc

SEQ ID NO: 386350 - DNA, 955 bp, Cannabis indica
tatgaggtgctggtgcaagttgttgtgctggtgcaacttttttatgtgagttatgaatgggttttggtgttgcatcaggggattcatgatcagtggtatgatctgaaattgttggagaatttggtggatgtggatatgtttcatgtgaacagttgggaaagaaacttgtcaatttctatatttggaattttattttgcatggggtatatgtcttcataaaatatgacatctcttgattgaaaaattgtgtttgtttggatgtcaaggagagtatatgctttcatatggtcagggtaacctatgaaaatgcaagatttagcctgaggtgcaaatttatggtcaatgtgagtgggggaaacataagctaagcaaccaaaatttctgagatggttatagttgggggatgtgttgtgcaacaactcatatggcgtttggtctttaagaacagcagagggtattctattaatgagatacacagcagttttgaccatgtgattccaataggataagtgtagattggattggaaagcaagagctcttgctacattaagtatgtgctgatgttttctttcaacaacagcattttgttgtggtctagccacacatgaattttgatgtatggtgccttgagaggcataaaaacttgtgagttttagctcctttgcattgtcagttctaaccgattttacattctttttgtaatgaacattgacaaaggtaaagaagttttgaatgattgtaggggcatccgatttagcccgaaggaaatataaccatgtgtaccttgagtggtcatccacaatggttaggaaatacttatatccttcagttgaaggagtgggataaggtccccaaatatcaagatgtattaagtcaaatgtctcaattgcaaaattattgtgagagacgaaagggagctttttttgttttgaaaaatggcaagttggacaattgt

SEQ ID NO: 386351 - DNA, 616 bp, Cannabis indica
ccaaccaaattaagtactaataaaatgtataattaaatggaatagaaataaatttaaatataataaaaaattaataaaaattattatttttttttaaaattttacattagaatggtctttctttctattttaaaatgaaatagtcattccaccaaaatgataaaaatgtcattccatcaaaatagtattctaatgtttttaaatacaaccaaatcaaggaataaaataaaaaggcaaccaaataaaaattgttttctttttattccaatcaatttcattacctccaatcaaacgctactttagtattgtgataaagtaactaacactattataagataacattttatgaataatcattataaatttaatacttacactatataatactttgtaatttattagacatctttgatatccaaacacattattacaatatattgccttataaattattagtaattttattttttaaaaaaatatttaaactaaaatatgtagtacttaaacatttaattataccaataataatataataatttgtaataatataggtgacgtttgataatacttttgttttataatttttttaatcaaaaaatgaaagtaaaattttttt

SEQ ID NO: 386352 - DNA, 1017 bp, Cannabis indica
accatagaggtctttgttgtcccacagctgtattcacagtggaaaatgccttcttcgtcccttcagttctctcaatagtagaggaggtcttctttttctccctggatgttttcacaacgtggggaggtcttcttggcgaaagtcacaatgtgttgtaaaattcatgtgccactctttggttgccaaggagacggtcgataccagctgttgttgggaacttaataggcatgtggaatattgagaaattggcttagctttgctgttgttggcccccagcatcagtttcttagtaactgaggtgagatatgctttgaaatttgtttatcaaagctatttgctagtagtgagatagaccactgccaaggtgtagtgggatattacttatgcgcttgatgttcaagaattagtttatctcattagcataagcgagatgaatcactattgaagagtagtgcaaagaactcaccagacctttttaataaggatgaaatcgtaggttgttgaagaaccttgcttaatgatttcaactcatagaaccttgttaaaggacttaaagaaaaactccaagggaggaaaaaaaaagaaagattgtactaaacatgtgctaagtaaagtgtcccgacttaggagaggtttagcaactgaaagaataccacaactggggtggcgtcccactcccagagggtttcctctaatcagttagagaatctctgctaaatgaagcatcctgctttcagagagttttttttataattgatgatgctttcttttctttttgatttttgtgatctgagtaggaacacttgcactagcactttaaaaatacaaactcgatcattatatttgtatgtgacctcaagtgtttatatattaaatcataatagtgcttaactttgttgtgcaatcggtctatatgtttggttgatcaacttaatgaactcaccagcactcacactagtactttatgttgggctttgtgccctaaataaaactctatttcaatgtaatcttttctat

SEQ ID NO: 386353 - DNA, 1890 bp, Cannabis indica
tagaaaagtgagataattatttcataatgttttagatttttttttttttgttatatttctaaatatctcaatatgaagccgcaacataacttcagagtttgggctttttgaaaactttataggctttcaaaagtggatttggagattgaattgggtaccaaatgggccctaattaacattcaacattttcaaaaccagatacattactttgtcttaacctattggcatttagtgagtacaactttcattgccaataattataaacctacttccaattaaaaagaaaaatgccttagcattctgagacctctaaccaatgcaccaaagtgaacaaatgcttcagtttttagataatgtgcctaactgttttttttttctaagctctaactaatgcaccaatgaataaaatggttcaacctaatccacactatcaactccatctttttacttcctactactactactactctctacacttattcaaaaacactatataagctcaattacaccacctcaactttcaaacaatcacaaatatcaattctcttacataagaaagaacccttttattcttcctaaaacaatggcaacccataaatcaactcccaataattctctcataacaaccataatattcactctctttttatcttcaacaatctcattaaccttctcaaatagaatccttgaacaagatgatgcacttgatcaacctcaaacctcaattgtccccaccaatcaagtgggtcccactgccacacaagtaggcccatctccattaccagtagcaaccccagtgggcccagtagctaccccagtaggcccaattggaacacaaacgggcccggcccaggcccaaggccaagttgggcctgctgcaacaggtggtgctgcagcagttggcatggccgatccgcacgccacactctcgtttttcatgcacgacatcgtcggcgggacaaacccgtcggccattgccatgaccggaatcgtcacgaaccctgcgatgagcgggcaagtcccgtttgcgaagcccaacggcgcaaaccttccggttaacaatggagtgccacaaaacagtaacaacaacggcatagtaagtaacaacaatgtaccattcttcacaggcttggctggaaattcaggcaattttctacaaaaccaaaacaccaacggcaacaatttcatcgcggggggctcgggtttccctttcgtgagcggagcatcactcccaccgggcataactcttcagaaactcatgttcggaacaatgacagtgtttgatgatgaattaaccgaaggacacgaactcgggtcgggtctaatgggaaaagctcagggattttacgtggctagctcagtggacggaacaagtcagacaatggctttcactgccatgtttcagagtggtggttacagtgatactctgactttctttggagttcatatgactgcggcggctgagtctcatttggctgtgatgggtggcaccggaaagtatttgaatgccaaaggtttcgccactgttaagacttctccggcttctcctgatcagcatagcactgatggaatggagactctgcttcagttcaatgtttatcttgtttattaattaattgattaattagtaataattgtttcttaattctgcataattatttagaaagttttattgttgttgttttctattatgcataattatggtaatgtattaatgaaatgtatgtgaatttatttgtaatgaaaacttgtggagtgttttttattgttgttgttgttgaatgttgattgatataggtgaattaaattggtatataatattttcttaaaaaaaattacaaattgattaaaaataaaattacaaaaatacgttaatacaattttattttt

SEQ ID NO: 386354 - DNA, 1248 bp, Cannabis indica
aaatataattaaaaaataagaaatagataaatacattttaaataattagaaaatagataaataagtcttaaataattagaaaaagtcaaaaaagagataaacacttttaaaactattttagagcgacacgtcaccgtcttatagttctcctttacatagatatataaattttggtaattgaataaatgttatttaagtatgaaagtaatatttgatgaatatataagtaccatgcctgggcacacgtgtttcaagcttttatttggtaattatataaatcagagaaatagagaggtcagctttaggttagcagggtgtgccagtaaatttctatgcctttttttgaagttagcatttcatttcacaagtttggaagtgccacaacaatcgtcaacttaaaaccattatagatatatatttgttttctggaaaggaaaaggaacagtggagtaccattgattattccttcatagacatacgtacatgtaagttgtaatataatttgtatattataactagctagctaccaaagctagagtagactagttaagtttacaatttgttcgtttcagatgaactggaagatttaatgagccaggaaagtctaaagtactattataagatgtctctactacaaagaaaggaatccatttatttagatatatgattatatttagaatacgcgcaaaagatcttttgctgtgtaccatggttttctctatacattttgaattataaatataccttttattgacttacatatttttatactctcacttttatgtatgtgcgttaggattttttttgaaggaaaagtagtgaataagtatatttggctgaactacttgaatcactaaattggcttttcatgtacttacaaatactcactttcaggaaattacattccaaaactctttttagacttttgacaaatacttctcacatattaattatgtatatatagtttacatccatattgttctagttaaatttagtaacatatttattatgtatttgtctaaaaatatcaaaatggtacatcaaaagttatcaaagtttaattaccttttctgtaatttatacggagccaaatcatctgtcccaatttttccctgtctccctatcccaatccaattaaaatgctccacctcaattaatttaaaatgtacatcccctttttcaatagagttaatatatttaaagactattttattttaccattaattttttctcatggaattttttttt

SEQ ID NO: 386355 - DNA, 983 bp, Cannabis indica
aaaaaaattaattaaaatgaaaataaaaagtgtaataaaaataatttattattaattaatacaatattatggatttatttaagcttagctcacagtctcgacaaacaaaggaagagacagaggtgaaagaagagaaggcagaaagggtaaattggtaaataaatgaaaatataagggcataaagagaaaaagagataatatttaattgacagcgacgcaggagtaaaaaccagcagcagccaaaagagctcatccaaacaagagccttctctctctcatctctctccttctctcacctcttattgtggttctctctctctcttctgtgcccttttttttatcgtgcgcttctcacacaatctcatcctctgaaggagattcgtcttcgacttcggcttcatcttaatcctctttctttttttctcgatccacacacctaactgtaagtagattcatgatttgtttaatctcaaaccaatttgttttttgttttttttggatcgattacttttttggtttttcagatccccaatctatatttctctttgggaaaaaaataaattttttcggaaatgtttttttgttgattgatgttttgcaatttttgaattttgttttgttgttgtatctctagatttatctcgattttagtttttttttttttttttgcatgttgacgattttagtttttttttttaattatttaattatgtgattatttttgttaattttgtattcgattggttattttttgattttggtgttgatgatggattttttggattaacgatttgatttctgtattttgttttggttttgctgtggaatggtgtttgttaatgattttggagtggttatagtggctatgatggtggtggtgacagtatatagattaaagaagaagaataaaaaaaaaaacaaatatatgatatggtaaaaaaaaaaaatatatacttttctatttttatttaattttttaatat

SEQ ID NO: 386356 - DNA, 1064 bp, Cannabis indica
aatgtggcaattaataagtattttaatttttataatcgtctcatcaaatttctaatatttttttgttctgtttttcctgaatttaccataaatttataatatagtgtatgatcttatccttaaaatttgataactcgcaatttcttttatttttcttttttgaaaggaaactttttattgttttaacattcaatcattcattttattaaactcggtgggacataaaggacatgtatgggtggaaggattgtgaaatccattgatatattaattgagttgttaaaatttgcatagtggaaatctattattttccttagttttgttgagtttagtggaaacaatgtcatatttccaataaatattaatcaccacaaaaggatttcgccttgtgatttggagccattactttttcttacatcaatttcatgttccttcatatggaaataggagtccacactgcccgaagagatttttctttgcctatgctttattcagaaatgtttgaaagtattacaatacattatcttaaataaataataataatagtagtccttgaatcagtagtgttcttcaaattggcactattaaaaaattgaattttcccgacgattttaaaaagttagataaagtattctcgttgatttctataaccgtcatctattcgattgtcgcaaaacgggtggaatagcgatggtttgaaaccaccgctgaaagccattcccaacgctaagtataggtgacggtttaaaactattgtctatagtagtatagacaacggttttaactcgtatcttatagtgcaacctacggttttagctctaaaaatactatttttcagcgactagttttttttttcatcaattacattggaaatataggaaagaagtcaaattttttacaattttttcctgtgcattatgcttttttggcaagttagttgacagaataatttttccatttggtaagattgttgtgcattcatattcgatttcttaccttataaattcggattgtagttgtccttttccttgtttggaaagttgcactttcagctgaactttcct

SEQ ID NO: 386357 - DNA, 2409 bp, Cannabis indica
tgaataccgcgccatggcgcatgccacttgtgaagtcacctggatcatggccatactcaaacattttggcatcactcccaccaatcctgcacttctatattgtgaaaatgatgcagccattcacatctttgagaaccttgtttaccacgagcgcaccgaacatgtggagatatattgccacatcgtctgggagaaagtcaaccaagacacactcattgagatacatgtcccctccaagcacaaccttgcgcgcagatcttttcacaaaagctctgtttccctcccagtttctaaatattatctccaagatgggtgtacaaaacttgtacactccaccttgagggggctgttagacacgtgattagtttttctgttgttattgttaggttaggggctagcttaccaccgactctgctttgcctatatatatggcgaaccttcttttgtaacagaatatacaacaataaaaagataataaaacaattgcagagttttcctctctccaccaactcataattcaatgtatcttttatacaaccttacaaaaaaaccatgtttctttttataaaaatactcgatcttgatgtgaaatacaaaatgaagatgtataacaaatgcaaactaataattaaatcgataaaagtaacgtaaaagaagagccaagcagaatgttgcaacaggaatgcagttcaatattgcagcacccaatgttgctgttgtgtaggcaatcgcaacattagaagcattaatgggaattgtcaccctgcgatggaatatttacaaaaaaaaatcttggttgttatgcggagagctactgacttaatttcatgattatttaacatacagatatgtattatgttttttttattaaaaaaaaacatatatatgtgtcataaatatatactaacaaacataccccaacaaggcaagcatgaaaatcttgcagaaggtgacaacggaaagtggtgttccatttcttctgaaatacaattaattataaagaaagatattgtcatttataacatgccatgatcacaaaattgaattatcataagacaagagcttatgaagaaagaagaaagtaataaattaattaaatagaggggtcaccgtttaaaaatcaaagcaagaggaactaagacgacagttccaactagttgtcgatagaaagtgaagatgtagcagctcatataccaccattaaagattgctttggtacgtaaaaccatgccagcatatattgcccgagatagtatcacagccaaataaaccttcacttcccccattttttagtgatagtgatgcaggatgagctattttcatttattttgtcgtctttacatttcctctacttcaaattcagattgaagaatggatactgaatatatgatgaaaatgttcatataaattatatattaatacataaaggaaaaagcaatttcagatgatagaagttgcgtttactgtccaaatgctttttgttttaataaattaggattttcgcctctatgtctcttgaactttttttgccgttaaacatttatctgaactattgagattgttaaatttaagtacttttgtctaattttattcaattttactatttcattgattgtttatgtactaaactaaactgtgttttccaaattttgatatctaccaaatcatactccttgaacttttacatttactaaatgatgtctcgtgaactttcatctatgttagattttttttactaaaattggacaaaagtctttaaatctaacaatctcaatatttcaaaaatatttttaacgaccttaaaagttcaaaagacataatttaatacatgtcaaacttcagaggtaaacatcttaattaacttagatttattatgtctcatgagtggtcaatacactttgtgaccgtgcttattgttccttagctagtggccaccaagaagtggctctgcgattaattagtgaatttcaacggataatgaaaagttttattgttgtgtggttgtttaacaagacttgaaaaaaagggaaattcaaccaaataaaataatatagtacctatatactaagtttttcaaataagggaatgaaacaatatatatgtgaatgcgatatctgaagcaaagaatacaactgattctcatgaaaaatgtaaagttaaatatgtatatatataaagaatgtcacgcttaataaagagagtaataacatgttactctgtctaaatcataaccgttcatttttatagacatatctcgtggttagaatatgtcatttggaaattgacactaatatgacattggcagattgaataatagaggtaacctatttataatattcggaaattttaaaatgcactcccttaaaatagatatattgatgcacccttatctgttttaacacccgaaata

SEQ ID NO: 386358 - DNA, 926 bp, Cannabis indica
agagagagagagagaaagcttcagtggggtgatttagccattgggcttctcagagataggtgggaagatgataaagtggagagagagcgcgggaagggagaaagacaaaaagagagagaaattttaattaaagggtattttgggaaattataggcatcatttggtataaattaagttagagtgtaagttttgatataaggtgtatttttaagaatgtttagtgcttgagatgtacacggggcagagaattaacggggagtgctcccccctttcccatgcccgttaagaattttaattcctatgcctgcttattccccattggggatggacgaggaatcccttaatgggggcagggaatccccttataaaaaaaataaagtttataatataaatttaaatatataaaaatattaaactatataaaaattaaaatattacacattaattattatttaataaattatttttatccaaaatataacttaaaagtcataaaaatgatactaatatattaagaaaaatacaaatatgaattacaaatgataaaatattattaaaatataaaataaaatactaaacgtgttcccgttgggacgggcagtgtgatctctgtccccatcccgtttaatattcaaagacaaaaattaattatcgttcagtctcatttccatttagatggaaaatttctactccattagaatgggttttggcatggtcatcctaatggaagaaatgtgcatgcctagttaatgccttcttacaaaataaaaataaaataaaataaataaataaataaaaaaagaaatttttacatgaaaaatcctttttacacactttattacataattaccctcacacgcctattactacatttatacttacaaacttatttttattacacatttaccacttactcatcataccat

SEQ ID NO: 386359 - DNA, 1703 bp, Cannabis indica
gttagaagcacaatttcaagtacaattgtgtaactaaatttttaagtacaataatttccttgacatgaaagctcagcctacagattcaataatgtgaaaagtaatcctcaacgcaagacaatttattcacaaaggaatttgcagaaagattgggaacgcgaaagttacgtccatttggttccacccttgggtcccgggaggagacctccaaccgaaacctcggagggatgcaattggagggattagtatggtaaacaactttattcgagataatagttggaaggaagaacttgtttgtcaatggtttcagcatgatgacgccaaacgaatactcaacataacattgccaaactcccgcgtggatgactcgtggctttggctgcttgaaggtaatggtcaattcagcatcaaatccgcctacataaccatcaagaaccttgagcctaattctaatgaaaatgagaaatggcgactagtttggggtgccaaaatgcataacaggtcgaaaatgatgtggtggagggtcctatcagattgcctcctcactagaagcaaaatcctcaatgtttgtggcttatcgaatccttactgtcctttttgcacaatggtagtggaagattctttccacctcttttcggattgccaatttgccagagccatctggtttggatgcaattggcacatcaggacaattgagagtcatgccacagattgggttcaatggataaactggttcaaatagaagaaaaaaaaggcctttgagtctcaacttcaaccctcttcttgaaggatcagctataattatggagaaaatatggaaagtgaggaattccataatccacaataaccatccaactccgattaatgttattatgcaccacctcaattgcagattggctgaacttgatgaaaaatagaatgcacactccactccagattgaatggctccctccccctaccaattggagcatgtttaacacagatgtagctattggcaatcagctttcaacaggtgcttcaatctttcgaaatgagaagggcgctctaacaattgtattcactactaaactcctctatcgtgatcctcttgctaaagaaattgcttctctctattatggtgcggaagctgcggttcaacttgggctcaaactggtgatttttcaaagcgattctgcaggggttgtggctgttgtgaattgtaatagtaacaacaagcctgagctgaaccataacattaaggatttagttaccaagttccaaacattgaatggaaatctggacctatgggaggtcaattggataccacgaaaactcaatggtgtggcccatgatgtggcgcaatgggcaatctgatcaaaccactttggtaaaattggaatgcacaattttgacaggtccctgccaagtgtgacgatagatggctgatttgctctctttggttatgtctatctttgtagtagttacttttttaggcttatcgttagtcttttagttatttgcttttacttgaactctgttttgtattttcttggtgaaaaaaaaataaataaaatacaaattttacaaattataggaaaattttagaaaaattgcaataaatgaccttaaatttaatactaaatatagtcaatgtccctttttaaattttttaaggtaaatgttctttttaaattttagtacctaaaatatccttgattacaatg

SEQ ID NO: 386360 - DNA, 900 bp, Cannabis indica
ttgttcttggttgaaatggtccactgtattttcttttttgctgaaagattgtattttctgtgtattgtaaactacagaactaggatccaatcattggcttcttctattcacataagtgacttaaaagaccaataaaagaaagttataaaagtgtcaatgttttgttgattattctcttcaaataatcaacaattcatatctcaacctacccatgacatttaacgaattcaaagaacaaaaggataaaaaacattgtataacatcgaacaaagattaaaaagaagaaaaataatgctgatatttcgaccaaaatttacatcccgaccgaactacactgcaaaatttagcgactaatcacatcttgtcatgtggctaggatgcaaagtatttttgtaattaaataactttttaaggttaagaaaaagtgttgaaccatacattgtttgtccgtattggattaaaatatcactttatcctattctaaacagcaagctatctcgaggccctccttatactttcgttgtaactttttaagaaaaaacaacactttatactaatttggtaaattgtaaatggtaggtgatttcagagtaaagagattattttgcaaatacacaaaaaaattacaaaaatacggtttcacggaattttaaatatttttacgatttttttaattttatttacataaaatacggtctttttatgttgtactcttgttaatttgttgttgattttttgttatctgtatgttattttttgttgttatttagatgttattttcatgttacttttatgtaattttcttattgtttatatgaaaaactgtaaaaatgtaaaaaaaaaaattctttaaacataaaattgtaattttttttacaaaaaatagtaccttgtgtaatt

SEQ ID NO: 386361 - DNA, 3268 bp, Cannabis indica
agagagagagagagagcggggtgtttccttagggttttttgtggttgaggcggctgaattttcattagggttttataaggggttgataggttttcttatgggctgaagctcctttagaagtttgcaacccctttagaggcgattatttggaaataaccgcctctaaaagggtttctatatatttttttttcttttacctatggcaacacttttttttaagtgaatgagaaaaacaacctctgaaaatcatttttgtagttgtgtgggaatacatgcttcaagcggctacttacattcttaatgaagcaccttcaaagagcataagcaaactctaatagaattatagaatggaacaaaacctagtttgaaacatttctgtatttgacactatccttctcatgttctaagaccgaagataaggaaacttgctcctaggtcggaagcgtgtataattatgagatattcacaggagacttgaggtgcatacttctatagtcatgtggaccagaagatatttgtttctataaatgcaatctttctagaacatgattatctgaaggatcacaatgcgtgcaacgaattggttattgaggaaataaaaatgagcagatttttgaattgtcaactttagtaccatcagttgaacgaccaaccatggttgccacagttcctgaaaaggaaacccctgtacatcttcgtagtgagagggttgtgagacaagttgtttgctatgaatatgaggcactcgttcttgtcttacacaaacaaggttgatccattgactttaaagcaatcaatggatgaccctgactcagacaagtagaacaattttaaggatcatgaaatagattccatgcggacaaaaaaagtctaggagtatgtaatcctacacgatggggtaaaacctataaggtgtaaatggatttacaagaagaagagaaatgttgaagggaaggtttaaacctataaagcaaggcttgtagccaaaggctacacattgctagaaggtgcagattatgacgaaaccttctctcttgtggccatgcttaagtccttttatatttccttctccatagttatcacatatgattatgagatattgcggatggacgtcgagactgtttttttaaatgacaatcttgatgaaaatatttgtgtgtactaaccaaaaaggtatgtgtaagacggggaagataaaaaagtttataaatttcttaaatctatttatggattgtagcaagcctctagatcttggaatatcgcttttaatgaaataattaaaacatacagctttgagcaaaatgtggatgaagtatgtgtatacaaatacattaaaggtaatatagtggcattccttgttctttgtgttgatgacattctacttattgaaaacaatgtagaaaagttgtaagacgtaaagaagtggttagccaaaaagttccaaatgaaggattttggagaagttacctatgttctcagcattcgtatatatagagatagaaagagaagagcattagtactttcttaagaaacttatattgataaatttctggatagattctcaatagagaattctaagaaaggatagttatcgtccagacatggaattcatctatgcaagaatcaatgtccaaagactctgcaaaagatgaatgacataagaaagtatcctaatgcatcaactattgggagcttaatgtatgcagtgttgtgtacaagacctggcatatgctatgtagttgggattgttagacgttatcaattaaatcaaggtttggaacactagatagttatgaagcacattctcaagtatcttcgaagaatgagagatctcatgcttatggagcagagttgaatactactggatatactaattctcattttcaatcagataaagatagtcctaaatcaacatgaagaacaatattcatacttggtggtggatctgtagtctagacaagcaatgagcaaaccaatattgcaaattcaaccatggatgtcgaatatatagcagcttgtggggcatctaaagaagcaattcggttgaagaagttctacactgatcttgaattagttctaaagatataaaatctattgttgctctattgtgacaatagtggagtgatggataactctaacgaaccaagaagctataagagaggcaagaatattgagaagaagtaccatttactcaagagatatagtagacaaaggttatgtgacggtcttaaagattgcatcgaaatgtaacctagcaagtccattcaataaagacgctactagcaaaatcttttacgagtcatataaccaacacgagattttggggaaatgctcaattttgtttaagggcaagtgggagattgatatggtttatgccctgaaaatcctacaaagacatttatgattataaatattactcgaacttttgaagatatgcttgcacattaaattattaatattttatattgaataatttatatgaaaaaaattggaaaatttcttatccatatatagagttgtgacttgtattgtacaaagaattaagataactggccatgaataaaatagttagcaacatatcaaaattatagaatttttaatcaacagttactagtacaattcattgatgctcgttatccaatgcaagcattctcgatttgaattattgtagtatgatatctaagtgaaggtgttgtatacaataaatattataaatgacctggaccgatatgtaattatgctatttttaccaaatatgttgttcactataaattaattcatatcaaaattatcatcaattagtagatgggtctaaattttgagtaatcatgaactcatgttcttgttattagtatctttgattcactcactaaagtttctcgaagaagatgattctcaaaactactattttgggaagctaataatgtggatggttgggaacttgatttagaatcatggaatcctgactttccaaacatatcgaatgttggttcccattaagtgtgaattctagaactaaaaagttgtgcacaaatttaaattggatcaaaattatactttatctagtgaattaatggtactaatggctaaggaaataattagacggataaaataataatttgaccaaaactaattatgaatcgatacaaagaggctaatcactagtatttattgattaatatatatggatactgtagtaaaactcagtgaatataattttattattactaagagttcaattctatatttatagtggagtaatcatgaa

SEQ ID NO: 386362 - DNA, 1307 bp, Cannabis indica
cgtaaaaaacgaaaacgtaaaaaaactacttacgacgacgagacgaggtacgtccgttggcgttgtagtacagtatcttattttttcgtggtaagggttggaggttcaacattctgagcgagtagggacttcggtgctctggtcagctggagctgtggaggtagttgcctcgtggttttttttggccatctgagccgcacaaaaatcaatatacatgctcttggaatcaccaaggtaatcaaagtttccttcaggattggccttccaaaaatcgtagaaaacctcaagagcacctgtctctaggctctccacctccctcacaagctcctcctccctagtttgcttattcttgatatccccctccaaattggaaagaagattctgaagactctccctcttatctttaagattattaatctccttggacaaagagacattattgtcctccagctgcttggtcgaaggcatatcttgcagctctttggtcagctcctcaatcatggtgttagctgtaagaagctttttgttcacctcccaagctcattcctcacttccccgagctggctcctcacgtcttgagtttcctttctggccacattcacctccctctacagtgtgtttgtgtttgcaagactcttggcagcagttgatttgtctcaagaataagcataagccatcttcacattgacctgaatggaaaaatgttagagtccaagctacacaaaagagaatgagataaaaagaggagatatttacccgagtagcttccttcaagaattctcctaggaaaagctctaaacatagctcattgtctacctcggacatctgatcactcacttcaagaagtgataagttcaagtagtactagaacttgtatttacccctcttggcctttgtgctcagcgccacggttgttgatggggtcctgacttgatcagacccgtctgagctctcccctctggaactctttgacatcgagaccttctgaactagaaggtccacaataggtcgctgctcagaaaggttaatgatctcatccactggcgccttctccttggatggaatctcacttcctctagacttcttagctggaggagacaggcccgagctgtctcctaccctcttctttaaggcttagagcatcttttaagacatttatgcatggataagacaatgcagttagagatagatatactatatgtgaaagcataatataaaagaagtaaatgcaagttaaaataccttgcatgggggcaggtgcattttcctaaacaagtacagatgggacatctgttgggttttgtgcc

SEQ ID NO: 386363 - DNA, 1072 bp, Cannabis indica
acttttttttttttacatccatattaatcaaaaacacactcatatatattatatttcattaaatatacccacttttgtgtgtgggttgcttaatatacactcactctccacttaagtctagtacataatttatattaacctaagagatataataagaatatcatttataaaagtaagtatatcttaaaaaatatgaaaataaaggtaaaaattataaataaaataaaatagatacacaatgtaattttctcgattaacttagtattaaagaacaaaaatgataaagccataaaacaacaccaaaattgattcaagtcttatagagatcgatatgatctactctattctaattctggaatcccaccaaaaatctttttattaattgaacaacaacagggtacactacattcaagattgattctctgttggattctctcaaagtgtttatctctcactcttacccaataatcttcttcatctataaaagattctttatacaaaacccaaacacaacctctctcttttctttgtacctctctctctacctttcagtctttctttctcatgaacacctctcgtaactcgtctgaacttattctctcacacaaacaaataagtgttggtggtatttatagatccaggaaatagatcctaaagtcgatggctaccaaagataagttgttaagttagttagactaaacaaacttaacaaattctttgtaacaatatctccacgtcagcataagtaaagtgcttctggatgagacgtatgcttcctggaagatagaccaaagcgtacgttgaatggactttctggataggaaagacaacaactggagtcgactatctaggagggaatagctggccatccgaaattcctttccagaggaggataagcttacctagagacttcatcctggtggacacgataggtgtccagtaatgccctttcggattacatctatcattctagaagagtacttccagatgagagagttagacttcaaggaatgtcctttcagaagatatttaattttataatgtccccacttcaagcctccattgggccctt

SEQ ID NO: 386364 - DNA, 657 bp, Cannabis indica
tttattctaatcattcaatttacctcccacctcactcacattaagcttaacattacagataggatctaaatccttgattctccaatatttgcctataatattcacataattttcttcatcaacccaagcatttttatagtggaaataggatcgcaaaacaaggtcactcctacctcttggggcgacagtagaggaaagaataatgggccgatgatctgatcccttaaaagacaaatgagaaacatgagtgttaggaaataaattaagcccatgtaaattttggttcttcaaaacccacatccatcaccagattatcttcaagagcttttcaaaaattattcatcaagtagttaggccgtctaaaacccccatctttctcaaaattactcaaaatctcattccaatcacccccacacacccaagggaaagcattattagaagcaattcaacgaagaagattccaaaaatcgatcctcagataagatttaggctgcccataaatcccctaaaatgccaagaaacctcccccactttgtaaacaacacattaacatgaccccgagagaagtcgagcaaaacaaacataagccaccactttctcaataacgagcttaccaacaaaattgaaatgaactctcagtagctccatttgagcagt

SEQ ID NO: 386365 - DNA, 860 bp, Cannabis indica
cacctaattaattttatataatgtgagaaatgggtacgtcattttactacttaaaagattttatgttgtagatcattagtgtgattctccaattaatcgacttcattcgtaattgtgaggtactgtaacttaattaggaaaatatataataatatatacttttattcttttttcaaagcaattccatatataaattaggtaattaattaaccatttgcgcgggtgaatggaggagccaaaattggagatatatatatacccttttggtggatttattattattctgttaactactagtggaaacttgctcatttattattaattttttttatgtagtataatggttattccatgacttttcaaaatatgctctcagatcatgattataattatatatgctgtacatatttcttctaaaataattatatattcatatatactcttcttctttaaccctcatgtagtgctcaaactattgcaaactcactattattctttgcctaatatataatagcattatagcatggaggaaggaaagtgaataaaatataacgtaagggaaatcatctaagtccatatatatatatgtaataagtttattatatatctagttatttcaaaaagtgaaaacgaacttttttttttcattcaaatattattatatacataaatatataaataaattagcattggaatgttgtattttttaatcgacatacatataggttttgattaagtgtataattaatgtcaatgtgccaacttgtgccatccaacaagaaaatccgttctctccgtatttaattataactagttgattgttacgtgccaagtcacgtagtgttagttttatttaatat

SEQ ID NO: 386366 - DNA, 2015 bp, Cannabis indica
aataagtgttcttcattagatcgagcaatcactcgcaaggatagacataagattcaaagaaacactgttaatggaaaacatacgttcagctaaagaaacagagtgctgggcaacaaagtgcacagcacgattcgcagaacgcttaacaaacaaaatcgaaacattgaacaaatttttaaggatatttttgcaatcatcaaccaccaatccgaatgtagaagaaaaagtttcttcactccgaatagccttaacacaaacaagactatccgtctcaagagtagcccgtgagaaagcatgatttttgagccaacttaaagcttccctaatgctaatgatttcagccaattcgggagtcacagagccatttttaacccctgcaaaagcagagaccagtccaccatctgtgttcctaaccacacacccgaagccatgcttgagaagagaagcaaaaatggcaccgtcgacattgagtttgatacctgaagacggttttatccactgctcagcaccatctccatctttgagaggagacaacaagggaatgttaccctttccttgagcatttacccattgatcaagagtctaattagcaaaagctaccacatcattcacacttctcaccagctgcttccaaacaagatcatttcttgctgcccaaatagcccagcataacatcactactctgcccagaacctcactgctcacacgcctagcagtagcatctagccaagacagcagagaagtaaaagaatctctccccacagcagctaaaccagcatatcccaggcaagaccaggcgaaatcacaagacaccagaatgtgccattctgtttcagcaaagacgccacacataggacaagtactatcaaccaataccttcttaatacacaagttccttttagttgcaagacaatttgaagccgccctccatacaagatccttggccttaggaggcactttgagggtccagagattcttccaaaacacatttatctctgagttgtccgaatggtgtttaaggtcttgaagcaaattgtatgcacttcgaactgagtagaacccgctcttctctacaacccaataccaagagtcaactccacctttttgatttatgggaatgccgagaatgatagtcgcatcttcggggggagaaaaagtctttcacaacatcactatcccagcaacgattattgacttggaagaggctgttgacagtaaaattctcaagaccatgaaccttaggaacgtgtactgagtgatcaataacaggaagccaagggtctgtagtaatttgcattgtagtaccagagccaattcttttcctcagaccaagttttactgtatctcttgcagcaaagatactactccatataaagcttgggttccacccaagctccgtcgaaagataatcaccttgaggatagtatctggctttgaaaactttgctagccagggaatcgatgttaaataagagccttcaaccttgtttaccaagcatggctagattaaagtccctcaaacttcgaaagcccataccaccatcaaacttgcactttgtcattttgtcccaactcatccaagtgataccgctgccattgcttgtagagttgttcgatttccaccaaaagcttgcaatcatccgctctagttcattgcaagtgccaattggaaaaaggaagacgttcatatcatacgaaggaagagattgaaccacggtcttaatgagaatctctttcccagctcgagataagaatctaccctcccatccattgatcctcttcctcattctctctttaaggaatcctaaaacagcgttctttttgcggccaacaatacttggaagcctcagatacatgctatcctcccccgcttcctaaatgtgcatcaaattacaaatacgattcctggtgttcactatggtattggaacttgttgcccctaaattcgcccaaaatacgtggaccagtcgaatagggacacgtggatcagataacttgtaaatatttgataagtct

SEQ ID NO: 386367 - DNA, 1937 bp, Cannabis indica
aaagcggatattcacagctgtgtgatattaaaataataattgcatttattcaacgtgatatgtaatcagaccccaagatttcaggggacaatcgttgtaagaatatcagtcaaccctgtaattaactgcctactatgtgaatttaaatagaggtaagttagactaaaaaaaggacaaaaaaatcataagagaggagccctaaaagaatcattagaaatctaataagattgactcgtggactatgcagaattttaactgcaaaatcatgtaaaaaatcctttatgttcatactttttccattattgtttttatttttctatctgagattatcactattaggctcaaatattggttaacgaaaatctgcattaacagtttggtgctttcattgagagccttcatgaaaaagctcagaaaaaagcctccttacataaaaaataatattcctcttatggatgacaacaaagaaaataatcctcataaaggaaccaatcatcgtcatggaaaagagccactgagtccccaaggatcatttgatttatcatctgaacatgccactagctccggaaaaacaaagtattgggtactcagactcgaagggcctaggataagcaacgggcagtctcttcctaatcaagttgacaaaaatggagcctataacccaaccagctacacacctatcgttgagttggaaaaccaccatcttaggcgtcgattggaggaagaaaactggcgtaatgctgaattagagcgtgaggtagctgcagtcagggtggcacgggagaatagttcccaaaatcaacctaaccttggagaaagagatctacgaggaaaaactcgtgactcgcaaaccagggggtaggagacaacccaaaggtatccccagaactctcaggagagacaaactgaggaaactgagggataccttgaatgtgacatgccctataatccactaggaaccaagaaaccggaaattccccataggaataaaggaaatttggggacacaacctgggatatatgtatcatcagtcgaggatcgccaaccttctctccaagctcataggaaaggaggtcgtacaaatccctatagagggaacgaaacgaatcaaaccctaggaagaagagcatgacgtgaagaggcgagagctaccacgaggtacacggtaactcgtaatcgattaatgtgatgagaagagaacactcgtcgcagcaatgatcaaaaaggcaaaatatggtctacaggtggaacgagattagccaattgtcatggccatttggacctacaagaacgcttgaacaggaaaaacctgatctttgtcaacaacttggtccaaagcaaagggattcaatccattgcgaatagacgagttggagaacaagttcaggaggcattaagtcgaggaaacaggaaaacaattgggatgcgagtctattgaagcattcgagtcgaaggcttttggatcaaaaagaaaagacgactctaaaaagttgtccaaagataagaaacagaagaaacacgataaatatgtacccatttatactgtctataccgagcttaatgaaacttggaaaagtatctacctcgcacatgaacaggaagtcattttcagagaaccaaaacctatgacacacgtgagactaggggtgttcgcggtgcgggtggtacggtttttgactattttttcaaaccaacccgcacatgcagtttttcaaatttcccaaaccgcacccgcatcgcgaaattaaaaacccgcaaaaactgcaccgcaaaaaatagtgcggtgcggtgcggtttttgtggtttatgcggtttagactatcactaaataattaaactatcacaaatacaacaaactttgagcaaaaacttgtcaaaataccataaggcttgaaaataaatatgaaaaaaaaaaattaagtgtcaacaatacaata

SEQ ID NO: 386368 - DNA, 635 bp, Cannabis indica
tattatcacaacacgaaatgaaaatgtttccccaagtgatgatgctattcaaaggttggaaacttggtctcataatatggcttttgagctattttgtaaaaaggcatttagacatgaatttaagggttgttgccctgaagagttagtgaaattatctcatgagattctcaaaaaatgtcaaggcttgccccttgcaataggggccatagctggtttactatcgagaaaaaagaaaatccaatctgaatggaaaaaagttcttcatgatattgattttgagctcaatacaaatcctcaactcgtaagaatttttgaaattctctctcttagttatcttgatttgccttaccacctgaaatcttgcttaatgtattttgccatttttcccgaagattatttgattcagaaactcagattgtgtcaattatggatttctgagggttttgttcaagcaagggaaggaaaatcattagaggaagaagccgaaggatacttgaatgagcttgcggagagaagtttagtttcaattgagatgatgggtggaagagtgagagggtgcaaggttcatgatttgatgcacgagttcatcctattaaaggtaaaggatttatgtttttgtcaaattttgacaacta

SEQ ID NO: 386369 - DNA, 3237 bp, Cannabis indica
cgttattatccaaagtgagttgagaaacactgattaaatttttagtgatatgaggaacatgtagcacattattcagtgttaaacaatcactagaggaggatacaagtgaaccattaccaatgtggtcaataaccaactgatgcccattaccaactgtgagtttttgcttaccatggtactcagtttgctggttcaagttggtgccatcagcagtaacgtggttagtagcgccacgatccgcgtaccaagcagcatcatctaccatttctggtgtagcaacaaaagccgagggaccttgagcacctttctcattgttattctgaccattcgtgggggtagatcccatatatgcctcctcatacctattgtagcaataggcaactgagtggccatatcgaccacaaatttggcatgttggttttgagtttccactacttcgaccaccacagcccctgcctcgtgagccaccacctcctctaggatgacttccaccacgatttcctgagcgaaaatgattagaagttgaccctcttcctccttgagaacttgagggacgagtagcagccagatttgcactaggtgagggagatctgcttgttgttttagggactccagagatagcacttaacctttcgaacttgctgtcgaaacttagtagagtatcctgcaactcttgccaagttgttgttggcttagcttccaccatgagtacaataggcagatattcaatatcaagacctgatagcacatttgacaccagaagtttttctggatagggatctccagcaagtgtgaggacatcggaccactatctcttctgtctgaggtaattagccatggacatacttcctttttgtgtcgtctgaatcttcgtgcgatactcatccattttcaatttggaatgagctccaaatagaatttctagggcacgccataatgcagcagaggagtcgcaacccataacctctgtcgcaatgctctcagtcatagacctgtagagccatccaaggagaagctggtcatgaactatccaagcttcaaaagctggattcacttcaggaatagagtcacctgcatcgttagtgacagtaacaaactcatctggtctaatcttagtaccattgagataaccatccaggcgatggccacgaactatggcagaaaccatagttttccacaaggaaaaattattacgatcaagtttcaaagcaaaaggttgtgtgagtgtacgtacttcccacctgaggtatgtgactgattggagtctgagtaatactgctgcctccaaccattgattgatgtggttgaggatcacctgaagtagcatgagtgctttgaggagttctgctgccgtcggccatagacacacgtctaaagcgctctgataccaagtaagaaaattaaatagcagtgaatttgtaaagctcagctcatcgaatagagaatggcatgaattgtatttatacacaaatgattggtacaaaatattctagatttggtacagctgtacagagaaggattacaatgaaatcagtaaaagtaatattctaacaacctctgacaattcccaattcttaggaccacatggctaacggctatgacaacaaatattgacagcacaacagtaggtgattaggattaattcattttcttaacaatgaagacaagaatagagaatcatatcttctccttagtaaatgtgtatgtcaagggtgatagaataatagaggcttggtgtagtacgagtgtgaagaacaccaagaaaaagatgaagagagaaaaaggtgtcaagggatgaagtgataatacgaccaagtaaattggaagtctgggaagcagtccctaaatcttatcctatcattatttatatataggcttagggtttgttagtgatctcgcacaagttggggtatctcactccaaaataatgaatgaaaaatataaatgaataaagatctataaaaatatctcgtactcataggcaaatatcccacaattattggggttgttgttgaaggtggttatttctcttgtctcttgaaattgcttatgtggcattgtactttaaaaatggaaaaattggagagacgtgaccctgggatgacacaccttggctaaggaaagtagagagtcacaagtattgtggcacaactctcctaatatccccttgtggccctcagtaaactaattaattaattctcgagtagagtgtgatatcctattttgtaaccaaattttgagcctgagaactttaaaattatcctatgactgtgacacatttatatctgcctcaaaagtatctttaaaatgcaagttgtatcaagtcatttggtcaaaaattgagatagttatgcatgttctgttgaaggatctaagtacattttagctcaaaatcttacttgtgccatgtcattacgagctatgccacctctttatggtgcaggtcggccatccatgttctcggataacttagggtgtgtttcgattttttttttatggtgagtcatattttgggggttccaggacctcgaaatctcatctcgacgtctgaacccctaacaggagacctgtgccatcttttggtgccaaatgatggcagaggcacgtcgatgcttctgagaagcctaggatggtgtttcttgcttagtttagtcatatggatgctagaaaaatacttttgtcacattatttcttggccaattggtgggagagattgtgccatctttttggtcacaaagatgacacaagttagtcataggtgttctacaccttttgttgacttttctcagttatttttggtaccttgatttgggaaatgtacttttgccaaagaaaccaggggcggaggcagtttataaggtgggatggccctcgcccccctcaaattttaataaaaatatatatatatatgtatagctaatttcattaactaagtgttataaatatatatatatatttggacatgtataataaaaggagattatatatatacacgtatatttagtaacttatttatgatactttttgatgtgataaatatatatttatgcaggtataattaagataaatattagtgtttttctattaaaatatataattaaatatttaatttattaaattaaaataaaatcaattaagttatatatttttttatcaaaattaaaaatttattctgtaatttctattataattacaaaggaagttttttcatttttttttataattgtgtacattgta

SEQ ID NO: 386370 - DNA, 4114 bp, Cannabis indica
aaataaaataatattaaaacgctaaacaaaacatatacataaaatagagcatatgaagattgtggagaaattacaactaatgtgcagataattaactaaaacttaatcacaaaaaattagtagtgacaagattaaaaaaccacacacaataatcggagattaaattaaggatgaacatagtattaaaacatgaagcaatgaagcaataaaatcaacaccaagatatatactagttcaagccctataaattgatgtggtctatcgttctactccagctctgaaacactatcataatcttctttattgattaagcaagaacatggtacaatacattcaagaacgattcccagttggattctcacaaagtgtttaactctcaaactcttaccaaagaatcttcttcatctacagaagatgcttcatacaaaactcaaacccaatctctttcttctctctgtacctctctctctatctcttaatcattatctcttaagatcacctctcaaaactcgtctggtctcgttctttcttaaaatgctatgtgttggtggtatttataaattcaagatatatatcccaaggttggtggctggaagagctatgctattaagctatttacaacttaacaaactcctcgtaacgaaatctccatgctatcttgtgttaaagtgctctcagataaagtgaccacttccgggactatgaattgaagcacatgttgaagggtcttcccgaatagaaaaagcgatagctgaagtcgaatatctggtagtcccttcaaggtgggaacaactagccatctggaaccatccttctggaggaagactagcttccctgaagacttcttctagatggacaagttagatattcgggaatgcccttccggatgtcatctaactttacataaccagaacaacttttagagatgtttacatttagaagaactataccacaaattgcacctagtttcttcaaattaaacaattgacgatgatgaagaaagaatgcatccatcatggtttgtgttccagatatctcagcatactaagttctgtcattgatcaagtccaagcaatgcttgaacttgtttactattaagaccttagtcccaacatcagtaggattatcttttattctgaccttctctaattcaatcaatccctcctcgatcttctccctaatccagtggagtcttatgtctatacttttctcccttatccgagtaaacagtcactcctcctctcagttgtttcaattaaaagccatgacacttccttgaaagctttttggtagccataaattctgcttctgtagtgaaaaaaagcaaccatggactgcagttgggccttcaaacatatacagttccagtttgtcatgaacctttcaactctagttctcctttttctttttcataggcgaaaccataattctttgtgccctttaagtaccttaataaccatttaagggccttccaatgttaaatacccgattggacatgaactggcttaggatgcttagagcatgagctatgtctagtctggtgctcaccattacatacattaaacatcctagagccattgcatatagggtacatccttaatttcttctttctctttcaaactattcagactctattcattcgataagaaaaactgtccacccaacggtacggatgactctttgcatcttccatgttgaacttctgaataatcttcttgatgtatccagactgcttcaagtttattgtcccttccttcccgttccttgaaactttaataccaagtatgtttttaactagtcaaagctccttcatctcaaattctctcttgagcttggctttgatacttttggtcactaattggtccttgctcattatcagcatgtcatccacatagagcaataagaacacagttgtaaattgctctagattcttaaagaataagaagtgatcatatgttgatcatctaaacctcatttgttgcaagtatcaaatcttttgttccattgtcttagggactgttacaaaccatctaaggacccgttgagcttgcaaattaactcaattgcattcccttacacctgaaacccatgtggttgcttcatataaatcttttcatctaagaattcattctgaaaggcaattttaacatcaacttgatcaacttcaaactctatttgagttgccaaagatgacatcaatattgtcatgttataatttaccacaggtgagaatatttcaatgtagtctattcctttcgcctgagtaaaatccttagccactaacctggctttcaaccgtactggttcattctcattgatttgctctttcacctttacaatccatttctattccatgattcttttgttgtctagctttcgcccaaccacccaagtcttattcttttacagcgaatccatctcctcatccatggcctagagccattttaacttgtttccacctgaaattgcctcttcgtaccttctagactcttcaatttcatttttttatactactgctagtgcaaattctattaagtctgcttccacaaaccttgccggagggtggatccatctttttgctctatcacgtgccacatgataaacttataaaccagcctctatgagtccctctggactttgtcttgttatcttctagctcagcatcaacttccttctgtgcactgtcttttgcttccactatagattccacatgtaaactctcttctagatgtttcgttgcatattccattttcatgaatgtagtgttgttatttcttattttttttacatcacatagagatacactacctttcccaaatgtcagtaaggatattccaacttattgaaaacaatatttctagaaatcgcaacctttggtttgcccttcttggaaatgcagattatgtaccccttggtacctaaggcataacctatgaaaattcccttagttgatctaggttccagtttgttaatagattggtgaacataagtcatacacccaaatgttcttagatgcattagatttggggttaagttgtaccacatttcataaggggtttttaagcctatgactctgtttgggcttctatttataaggtaggttgcaataactaaagcttcctcccaaaatggtttctctaatctaaaattgaacaacaagcatcgaacgttatttaaaagggtttggttcatcttttgaacaacaccattttgtttcgaggtcttcactacggttctatgcctagtgattctatactcttgacacacaacatgttgacttcagagtttataaactctaacccattgtccgccctaagtttcttaacattaagattggtttggttttctacctgagtttttcaaattctaaactgttccagacactcattcttagttgctagtaaatgggtctaaacacacatactataatcatcaacaatagaaagaaaatattgcttattggagtgagtaggcactttgcgtggcccccaaagatcagcatgaatatattcaagtatcttcttagttgtatgccttactggagtgaatttcaacttatggtgtttccctaaaacacaagcttcacaaaatggcaagccaaaagaatttaaattttaaactatagtttgtttgtccagttccttgaggcctttttcactgatattcccaagtctgtgatgtcgtagctgcatatctaattctagcactttcaccaaactcacctcttcgactggaatagtttctccttggagaacatataaactattgatcttttcaccttccatgactattagcaaacaattggtgatcctcatgtttttgttcacgaacttgtatctgtaaccctcatcttgaaacgcacccagggatatgaggtttcgtcttaactctagaatgtcccttacgttcatgagcaccttcattttgccatcatactattttatgacaacttttctagttccaatgaccctacatgaatgatcatttcccattagaattttatcgccatcaattgatttacaatcaaaagaaaattctcgacttaggcacatgtgattcatgcatccagagtcaagaatccactccatgttcattgatgattctaagatggaga

SEQ ID NO: 386371 - DNA, 737 bp, Cannabis indica
gatccccatattcaaacagtataaatatatattacataactatatatataaatatgtggggctggatcaggaggccaggaataagggtgccactcctcaccgaccaagtataattggtgaaagtatagcctttgtgtagtactatttgtatatatataaattaacattataggatttttggtcacacaaaaccgtccaagcaatctaatgtattacatgatatgtatgattagtcattgttgtttaagtttctaccactcaaataaaaacaatcactttctacattccaaaaccattggcaattcttttctgtttataatccatctctttaattagtactacaaaagaatacaaattatcactttttttcctctagagccaagacaaaatttaattaatgcatggaaagacacatgtttctatcaaatataagaatctaaaccgccaaacttacttccgtcacacaattttcatttggttgccataagcaattatgcattataagcctgctgtgctgatcttttcggaggcaaaattcttaatccaaatatctcttactttcaatatctatacatgcataattttattttatcacttttcgtattaatttttcgattcatcaatgtcacaatccttgatttttcctttcaataattttcatacacttgttgctaggttttctctacaatctacgtgacacaattaactctttcttttttttatttaataaaaaattt

SEQ ID NO: 386372 - DNA, 1617 bp, Cannabis indica
agtaatataatataacacgtaagtaattcctacaaataataattaatgttacaattttaaaaaaactaaaattattatataacatgcacaactacttatttctataaagactaactaaattttcgtaagcaaagaaagtaatcatatatatatagaagtagatagaacacatccatttgatcaagtcaaaaattcatacttgaatataattattatatataaatatatatcatggcatcctcaactcatcgaagcatatacagcgccggcggtgccacctcagcgccgccgccgactccctcgactcaacccaataacctcttgtccaccaacgaaggcgcaggagccgacgccgatgccttatctcggcttctccatcggctcccgccttctctggctctccccacacggcgccgcgtaggcctccaagatgccacgtgtcctcccgtgttctcgtttaccgatcggactgatgataatgactctgtcggaaataatagtataatggaagatctcctctcctccgcttcccaactcggcttcttccaactcattaaccactccatctcctccgaactcgctaagtcggccgagttggaagcgctctctctcttcgacctaccaagagagaaaaaggaatctctctttcgtaaggactggcctcttgggtacgaaggagaggaagatgaagaaggagacggactcgccgagtctttctgtctggacgagtcgtgtgcggccgagtcgagcgagttacgtttagtatccttgtccgagttgactcgggctcttggtaaagtcgggttgagaatcgtcgagttgctttccgggtcggtcgggtttgataacccgttggggaaagatggtccggaccggttttgtacgttgatgtggatatcttcagaaagttctcccggaaatgagatgatgacgtcaggcgggttttacccgtatatagtcgggttacagtatcaaatccgaggtggcaaaagctcgttgcttgcggattcgggtcgggtcactgtgtcgcctctggcggactctgttttggttactgtaggtgacattgctcaagtaagttctaacttgttgtaacttattttcatcaacattaactataaggcatataattagtgtaatttattgacattgaaaatattgggtaacctttttcatcttttaaattgggagaggtggtaaatggtaatgctcaatatatcatatatgtattaaggaatatataggttgtgaagttgattttttcaaaaaaaaaaataacctgtgtaaactcattaaataaataggtatggagcaatggaaagttgaagaaagtgagaggaagagcaatggcaaattcaggggaaggaatatcaatgacggtgttagtgactcttcctttagagagtagagtctctccacttatcccaaaacaaactattttatgtgaaaaagaagaagaagaccataaaaatattaatgaccaagaagaagaagaagaagaaaagatggtttttaaactctttctcttttgaggtattatgcatggcgagtttaccatgagcgtcttgacctcaaagatcctctcgataggtaccgagttatgacctaagtaataat

SEQ ID NO: 386373 - DNA, 1346 bp, Cannabis indica
accctgttaccctcggaagacctaattgtatccacccggtggattaagtctttgtgttttggggttgatagttatgagttaaccgccaaactgattgagttacgattgtctgattttgatataatcctaggaatggatttcttatctaaatatggggcaacaatcgactgcaagtggaagatggtggtgtttgaacccgacagtgccagtccaatggtgtttgtgggtaaagttcaggggtcacacataccttgaataacacttttaaaagctaaagatctgatgagcagagattgtctaggatttctagtcactacaatggatactagccaacctgtgtcatctagacctgagaatacgagattggtgtgcaaattccttaatgtatttcctgaagacctaccgagattaccaccttcccaagaaattgactttaagatcaagtaagttctgggaacaaaaccagtgtcaaaggcacagtatcgaatggctccagcagaattgaaagaattaaagatccaactccaggagttacttagctttggattcataagaccgagttattctccatggggtgctccagtgttttttatgaaaaagaaagacgggtcgctgttgatgtgtatcgactatcgggaattgaataagctcactattaagaacaagtatcccctaccctaaatcgacaacctatttgatcaactgaagggtaagacggtcttttcaatgattgaccttcactcaagtcaccatcaactaagaatttgagaagaggatagcttgaagaccgcgttccgtacttggtatggacattatgagtttctagtgatgtcctttggactcaccaatgccccagcgggatttatagatcttttgaattgggtatttaaggattaccaccaccagtgtgtgatagtgtttattgatgatattctggtccattctgagtctgaagaagaacatgaactacatatcagatcaatattgcaactgttatgagatcacaagttgtattctaaatttaagaagtgtgagttctggttatcacgtgtccctttcctagggcacatagtggataaagatgggatcatggttgttccagccaagatcaaagttgttcaggatttgccaacacaaaaatctactactaaagttagaagttttttgggtttagttggttattatcgtcggttcattgagggtttctcaaaaattgcaacacccctaacggaactaacccgaaagaatttaaagtttttttggactgatcaatgtgagaaaagttttcaggagttaaagtagtgcttgattaccgctccagtattaactcttccttcagataagga

SEQ ID NO: 386374 - DNA, 605 bp, Cannabis indica
tataccagactagtttagagtttggattctcggtttggcagattaattatgagatgactataatacccctagcatttaatttaaagttcaagggttatgagagggcaaaattgtcattttcgtgataggcattcatttggttttatttaaatcatgtggctgaaattaaaattgttattagttgggattatataaaaaaaaaaaagaattaaaaaattttttaagttaaaatatagtgaatatggggcatctatcttcattttcccctcattctttttctttcttccccgagcctcttaaggagctgccttcaaggataattttgttaggaaactcatctgatttctggatgatttggttggttgtggaggttattaaagcatcaaggtaagtttttagttttgtttccttaaatttcttaggtcttaggtttaatattagttggggttttggtgatttcgggattgaggtattaaactgagattagaacaggtttcttggcttaaattagagtttgtttatgattgatttggttaggatcacagctgttagtgttgagttaatggaattttagagtttttaagcttaaactttacttgactatg

SEQ ID NO: 386375 - DNA, 762 bp, Cannabis indica
gcgcactaccatggtttgacataagggacaatacctgatcctgagtcagagaggtgaacacgtcagttaagaggagatatcggcctcttatcttgtagtggacatccggtatttaccctggggcacgcattcgactcctggtctatggtaggcttctgagagtcatcttatggtaggcgtctaggagcatctcgtgtggtctttctctaggtgtgcccttatccttgttcgatggtctttgttccttccatttcccaaaaaactaggaagactttcaggttttggaagaaagctatgtctcggagacggagctcttaatctttgctgggcttgggcccactccaattttgggttgggctttcataagcgggaagaattaggcccaactttagatggcgactactttctggttatgccacgtgctgcctttcgataacatgaataatagttacatttatcatgagatctaaattgtcattaattatagtaattaatagttattaaatatggctattaaaggtttgagattaattagaaattaattttaaatcttaatttgatgatttaatattactaaaatataaaaggattaattaagtgattttaaacctgatgaaaataagagtcaagaggcataatatatagaagtaagtttgtacaaataaagctaatctgtccaatgaatcagactagcttgatcgacctgactaaggaattttttttatatatttttattatatattatataatttatttacatat

SEQ ID NO: 386376 - DNA, 1439 bp, Cannabis indica
ttgggtaacacatctgagcaacgacttggagaaccctcgtctatacataattccctctactatgatataccgtgtaaccttccttctcatctttcatagttaactgtctagtcctagggtcagttcttaagcgtgtaggaagattaagtggcaaaagggctgtgcttgaaattgttcgacaaagatgtaaaaaaacttcaactcgctttacaatagcaatgaaaactagcactcaaaaaggacatttctatcgttactaccaataggttgggggtatccacattttaacattcctctaagttgtatgtaattctttgtaagtattcattcttaatgtaagcctacgggcataatgaaatgaaaatagaagaaatttacacaagaatttacaatattgtctcctgcataagctatgttttaaataagtgaccaagaatttggagacatccaagcttctcagctcacttgggggtggtatacctagctatgtgttcattgcccacttgttatttgtatttaaatttgttacttgtattttaatttttaaatttgctttgaactattggtcgaaaatgtcgcctgaatttcaatacgtcttcaacattcttcttggaaggaagtgttgcttgaagtctattgcatttttagctttgttttcatctttagttttgagtggaaatatcgattgaatttcgatacatcttcaacctccttcctggaaggaagtgtctcttgaattctattgtatattcaacttcgtttccataaaagcacagctaatatattttcagccttttccttaaaaaaggaacattgcctaaatcctatagcatttgctttggtctattgacaacattaataaggttttctacaaggagtgagaaaaggaagcttttctgaagatccctcacgtttctagcagttctcttacaacaaattcgggaaacacatgtcatactgctgtgccatcttcattactttggatttgtggaagcatagcctaagtgttaatacgttttcagccttgcttcctcaagagaagcatttcctagactctattacacacttagcctattcctctactaaatttaaataatagagaaatcgctacatcattctgagtaaggtagttaatcagaaaacactcagaagggattcgagctctacgatccctatggcaatttgggaacaagctaatggtccctccatgtaaggttaactgccaaagtttacaagtcccacaaaggtaactttgacaaggttgacatcttaggagaggaatttgaaaattcgtgtgcttccaaaagctttcagaatcctaaggaaatctattgaacggtctagtaaacaaaaaatgcaaaaagcaagcaattcaagcatagcaaaaaaataggcaaacatacataagcaaaacaaaaaaaaaaattgttttctaagtt

SEQ ID NO: 386377 - DNA, 1319 bp, Cannabis indica
tctagcataaaacctcatagtgttaaagctgttcttaaggaccatgtatggaataatgctatgaatatagaaatagtttctctcaagaagaaaggtatttggacttttgttcttcttcctccgagaagaagagctattacctacaaataggtctataaaaagaaggaaaatcccgatggaactgtgtccaaatacaaggtcaggcttgtagcaagaaggttccatcagtgatatggttttaagtttaaggaaaccttcagtatagttgtaaaatcagctactgtcaagattatcttaactgttgctttatactacaaatgatccataagataacttgatgctaataatgcctttttgaatggagatttttaaaaagaggtgtatatgactcaacctcttggtttttttgattcagaagatcctcaattagtgtgcaaacttaataaacccatatatggcttaagacagacaccaagggccttgtttgataaactgaaagctactctagtttcctttggttttaagtgtgcaagggcagataattccttatttttaaaacacacaacaactcattccacatttttgctcatctatgtggatgatatattggttacagttagttctactgcaacagttgtctcgttgataaatagtcttaactctttgtttggtcttaaggatttaggccctcttaattatttcttagggatagaagtaaatcatactactaaagggttacatgtatatcaaaataaatatatttttagatctcttcgtaagggacaaaatggataatgcaaatccattacctacccctataacagggatgaaaaactcacaacaataggaagtgatccatactctgagccttccttctacaaaattattgttggggcattacagtatgcaactgtcacaaggccagaaatatcctattatattaatagagtatcatagtttatgcaaacaccacttgaatctcattagaaaactgtgaagaagatacttagatatctccctaacactactgattatggtctactcatataattgttggaacttattttaccagaatttagattactaacatgtatgtttgattataatatataatctaacatcctaaacatgaatttcctaaaacaataaaataaacacatataaagttgtagaaaactttacattggtaccagtagaatataatagctcattccgttcagatttctaacccttgttcctttatgtcgcaaagtattaccaaaatctgaacttgcatctccttaggtgatgaattcttcacaatcttccacactatgatt

SEQ ID NO: 386378 - DNA, 895 bp, Cannabis indica
aaataaaatattaattaaaaaaacaaaaaatagtcgtgtaccaaaaagtatatatatatatcctattatgtataaaaacctataaatatagtatctatatctctttgattgtttccattctcaacactcacatttcattctcaatttcaaaaatcaataaagcattatagttgatattggataagtaataatcttagtattatgatgagattatctaatatgtatagatattattatatgcaagggattataatatttttcaagtgtttctattttgattttactcatagtatattattatcaaccatacatatacttttttgttagtttgattaattgacttagatataattacacatctttgtgactttattcgtagatggtattctatttaatacttttatttgaatttagttaattgacttggatatggatatacacatctttgtaatttttattgatagatggtattttatttttcggcttaactactattaattttgtattacctttaaattaagagaaatatgtttcctataaatttttattttttttgttagttccttacaaaacttttaagttttaatcttccattcctatacagtttaattagacatctcatatttgttcttctctaaaggcattgttcattgttttttttttttagaaatcttagagcatgtttggtattgttttctgctttttgttttcaaaaaattgtttttagaaatgagaataaaaaatagtttttgaagtttttaaaaacaagtcatgtttggttagtgctttataaaaacaatattaactaaaagagaattggtttttaaaacagaaaataacattttgttgttttcaaaattcttgtttttgtaactttgttttctgaaaactgttt

SEQ ID NO: 386379 - DNA, 1353 bp, Cannabis indica
atggtagttaatgaagccactgttatttattttgtggaaaaagtatggaaatttaatgtgatagtggtagctttgaatgagggtgccaacaaccgtaactgttttgagcttggattcataagtgctagaaaccgtacttgggccctaaaaaacggaccttggtgtgtccgaggttataccttcctattgaaagcatgggtgccaataaaggatctcactgctgtgtttaactgtgtgagaacttggctacacattcacaacctcccaagggactactactcaatagttaatggtaaaacattgggggctaaagctggccaagtcttatatgtgaatttggatgaaagaaaacctgctctctggagtaaggctctcaaagttttgattagtttgaatgttaatcaacctctgttcgctggttgttattttgatctggaatcgggctcccaaaggtggttacaattcaaatacgagaagctgggcatcttctgttataactgcggcaaattgggtcatcaaagaagaggatgcactctgtcttctccggtcacggtggccagtgtaagtggggttcctttccctatgttcgggccgtggttgtctatggagtcgtcgtacctggacgttttcttgggagcaaactccttcactccagctttggcttcagcgggtttggcgagttctggttcaatccgccctggaatctggccgttggccatggctgctggtgcgaagggtcatggtcgtaagaactctttgcctcggtcttcgtaccgttctgtgaaggcgaccggtcgtaggggcctggaggggggtcaggctcgcagtgtggtctgggttcccaaagcgcttcctgcatcacgcatgcctggagcttccattaagggtaataagagtaccgttggaaacctggaggatggaaaggaggccgtacactttcctaagtttaattcaaaatttaaagaccaatgtttgacttttggtaaaggaaaagaggttgggcttgggtttagtaaagggcttgttgggccgactctctcttgttctgggccgggttcaaagaatgactttttaaaagatagtgcatcttccaatgggcccattaaagattgcaatgaccagattatttcttcacgtgggaccaagcccaacttggagcacaatgcagccgggttgcattatcctaagaatttggggccgagtgggcttgttgggccttttgaattttttaaaggactaattggggataaagagactaatggaccgaccaatgctaattctattgagagctctatttgtggtcaagaggtaaacttccaccatgatgaaaaattagctttgactaattttttt

SEQ ID NO: 386380 - DNA, 1080 bp, Cannabis indica
aaatatatatattataaaaaatacacaaagtaacagttaaaattatactaaaatataaatcctgaatctctatcaatatataatatataagtattatatataaattttttaaatataacacatatatatcatatatttacagaaaaaatataatttttataaaaacatatatacacaaatattgtaagaactaacatgcaaatatttagactctcgaaagtgatcctccgacccactcggcgttttactgagatttctcctcccccaccgattatttatctcaaactttaaagatcgaaaaaaaattagatattaagaaaaaaaaaaataacaatatgtaaaaaaaataaaaaaacaaaaaccaatagcattacctggcggtgcactggcggtggactagaggtgccggggaaagaatggtcggagaagggggtgtttggaaatggggaaggggcggagtgagtttgaaaatggggaagggcccgtggaatggaaaaatggcaaaatgggttttctgaaatggggttggggttttatagaattttaataccggcgggaccccccggtattaattgggttccgccagtattaatattcaacggtcagaatcccaattaatatcggcgatattaattcactggtattaattgttttaaatgtttgggcggtaaaaatctcacccgcttcttttgaggccggatttcgccggtattaataccaatctgccggtattaatctattttaaaataaaatattatttatttatttaatagttattaccagcggaatgcttactccgccgataatttccctattgttagaggcgggtatgttccgtcagcaataccacaaattcttgtagtgtcggatggagtggcaattgatttccacatgttttgtgcgtcatgatagacaagattctcacttatgtgaattgcagtcgtgttgtcacaatacattttaggtggtgtggaggtgggaacacaaaagtctttgacaagagcaaggatccaagtgagtttagatgcatttgtcatggctcggtcagcagatgatcgagatacaacttgttgttttttt

SEQ ID NO: 386381 - DNA, 1864 bp, Cannabis indica
ttttaattacaataattaagctatatatatctaaaggatctcttctagtatttggattttttacagctatatatttcatcattacaacctcctcaggagatagccttatcttcttctgcttgcataataatactggcaaatgagattattttatatatgatattattatttaaaatgagaaataatatacatgaataataataatatatgcatttaaaaaatagatatattattcccaatatttatttttactaattatgcccaataggtaattaattagcacatatattaatttataaaatctttgtaatttgaacttgagtattgttattaaatattagtagtatattattacaagatattttgtgaataaatatataattattaaattaaattaaaatatatatcaaatttaataattattcattttttacaataactattaaattataatatatatcaaatttaataatttattatatcaataaaatataacatcttgtagtattggatagtgtcacattaacatttttctatttgttgatatgattattagtaaattaaatgtgccttttgtaatattttttaattatttttttttattttttaattaaaagaataaaaatattttccaaacacatattttataaaattatttttactttgtagttttttacttgaattaaaattttaaaaaaaatcatttttataatatttttaaacagttttttttcttaatcaatgtttaaactctgactccaacttggaccttggaacccgtacttcggccccggccccagtcccgaactcagagaccacggtctcggccccagacctagacccgacttaaataaaataaaaaaataataaaaaataataataaaagttatagaaaaaaacttttgttttctatttttaaaattaaaaaacaaaaatagttatagaacacattttaacttttatattatttttttaacaacacatttttatttttaaaaacacaaattttactttatttttataactaaaaatttaaaaactaaaatattactaaatgtatgtctttagttaaattaattagctttttttagaaggttgcataggagattaggtttaagttataacacttatttaacaaaaatagatataaattcaatgatcagcaggcaacaatcaaaatcactaaccaaatcaaatatatatggaataatagggactcataccaatatgaatatgatgatgatgatcatcaaacaagaaaaagttacaagttttacgaagtaataacctctccaaataataaaaccaaaattaatgaatattaatatattaatatataagagaaacgtggatgtcatctctatatatgcaaatataatatatattaatatttagtgaaaataaataataataataataataataataatttacataaagtttgcatatatatgttgggtgagaagataagttattatagtttagatttggttatgtttttattaggagaaaaaaaagggtcacgtgatagggacaaacaagaatggaattgccaagttggggaaaccaatttcatctattttgaattctactctttgtacacattattattattattgggatttttttattttccactttagttagttttttttttttttctttttttttttgttatttttatagatttccatacaaatatttctataataacttacaaagtaacttaaatcgcaatcaaaatttacatggaaccccacataaaaactatgaaaagagcaactcgaactgtaaatttgaaaaaaaaaaaattataaaatattatatgaggtaattcctattattaaagatttttttaattatt

SEQ ID NO: 386382 - DNA, 967 bp, Cannabis indica
taatagttcaaagaaatttttaatttccaaaaaaattcaggagacataatttaatatacattaaaaattaagggataaaaatcctaattagcctttaatttaagggaaattaccgcatatactatttttttaaacttttttttttctttcaaatttacggtttgagtttctaaagtagttgcagcgctagttgcaatagaggtttctgtacgattttttgtgcaatttaggttgcaacgctagttacaatataaatttttatgtaaaatttcgtaaaaatgcaaaaaaaaaatttattttgaaacgtaaaaataaaaaaatctcttaatttaatatgcactaggcatttgaagaccaaagcaatagcaatcttcacaaaataaatacataaatccataaattcaactccacttgtttcgtgttaatttaattttttttagaaatattccgtgtcgagttttaacaggtaaatgatgacccgttcaattcaattttgatgtgaaagaaacgaggtaattatatttcccaaacaaagtttatagtgaactacacgcgcttcggagagcgtgagagagaataaaataaataaataaataaataaataaataaatcgccggctgaaagtgggagatgtgttgaagcagagggagacggaagagacgacggcttccaatttaagagagagagagagacgcgcaaagcaaacgaatcgtcaaaggaatcataccatcaataaaataatattaaattaaactctaaaataattaataaaactccaaaatcaaaacccataaatagaaataaaaaaatatattacttcgccattaacagactactcttctttctctcacttacaaactcacacacactctctcgctctctctctcctctctcggtcttggtttcagttttggtcctcttcttccggttgatattgatgttattgtgccctagatcttgagacttg

SEQ ID NO: 386383 - DNA, 1372 bp, Cannabis indica
ctattgacctgtgttttctctgtcttgctgtgtagttgttttgtgtaaaaagtgttattttggctactagtatttttcttgttttgtcgtgatctgatcatggcagatcgtggagggatggatattgagcatgaaagggactttgtcatcttaacgagtggagatgatgatgatggagggcttttgtatgacacaaatgatagggaattatcggactttgatgatcgttggtgtgtagtcggccggtttctcacagaaagatctctggatttcatggctatgcaacacaagatggcatcactgtggcgacccggaagaggtatgtttgtaaaagaattggaagataatctttatctttttcagttttaccatcaaatagatgtagacaaagttgtggaggggagcccctggactttcgatagggtgccactgattttttcaaagctgaaggtgggggagaatccgcgttcagtgtctcttaacaatctggatttttggatccaactccatggattatctactggctttatgtccgtaaaggtggtcaaggatattggaaactacatcggcactttcattgaagctgataagaacaacttcatgggaatatggcgtgattatcttcgggtacgtgtctctgttcgtattgatttgccgttaaaacgaagaatgaaattagagaaaaaaggaggtgagatatgttatgctaatttcaaatatgaggatcttccaactttttgctttatatgtggaatccttggacatccagagaagttctgcccaaagctgtttgataccccacaacatctgatcaaaaaaccttataatctagagttgaaggctatgccaagaagaagacaacacacaatcggatccaaatggcttcaacaagggttaatggtgcgagggggagaactccggtgagggattgggaggaggcttcgggccgaggagagaaaagggtggcccaggggagcgtctactggtggcgaaaatcaagggaagcatcaatcacttacacgatcaatgggattggatggagaaactataggctttgatttgggaattaatgttgataaatcccagggtgatatattgggaaagtcagcaataaggattaacgtgaatgatggtatgagggaagatacatttgaagatattgatggagatttattgatccttgaatcaaaaaggaaacgtgttgctggtataaaaataagtgggccgaatggggataatggtgacaatatgtgtatttcggaagggacaaaaaacgttattggggcgggttctgtgtcacaggcccgccaagaattatgaatgtgttaagctggaattgccgtgggcttgggaaccaacgggcttttcaatt

SEQ ID NO: 386384 - DNA, 1908 bp, Cannabis indica
tttacataaaaatattatataaagtacaatttaatgtaagactatatatacaatacacagtgtagttgttgagattttataccttaaataaaattcagttttattgtaatcttatttactttcaataaagatcataaatctgaaattggcatatgctttgtttacatgtttattatgtgattataagttctattaaatctcgaacatatagttattcacaattacaatgatgtcatcacaatggaaattaattgtgattatatgcttcaaattacttatatttagtcccacgatttatcagtgcactggatgtatgacgtgataatcaacgataaagtttacttacacttagctgagtggaatatcttttccaagtcactagtaaagtaaaccagaattcgatgtattggctatacttcagacttgatcaatattgatagtagaaaagatatcgtaaacttactgctatattttttctaagtcaatgtcacttagttgatcatagatcatttgatatcaattttgagatgattgagctctagcttaattatattgcacgagttctttgactagtttgttacgaatttacccgtaagactagcccatacttacatattaagaacacaatagtacaattgagtgagagtgttaatcatagatatgaacatttataacatctatattatattaaaagttaaatgatggtttcctttaagcttcactaaaggcgttaaatggtcgaatgtttatttcggtaattatattagtttttcgaaatatcatttacaagcagctaagtatttcaaagataaaatacattgaagggtaaaacgataattttgtccctactcgatgtagaccgtcatagaggatcaatgattgttgtgatcgaaaaaataaataattcatagtgtatctatatttagtatatagagcgttctatgtaatcaagaatgcaaattttaatctatatatagtagagtctggagaaactaataagttagaaaatttacttgataaattttaagatctgcttagtaagagtttggttacagaggcccatggtcacattgtctgaggtaatatcatcttgtagactgaactaattgatttaataagtcaattagaattcaaaaatatactatatcttattttagaattttcacaaagtttggacaattttgagaagaaaggaaaaatagggatttatttgttaattagcacactttgtgagtctaattaataagtatactttgttgactacaaaaatttagactaagacttctaagccacaactgcaccttagattggcgagaatagaatagttgttaagtaattataagagagacacaataaatttatattagttcactcccatcacgacagtaatggagctacgtttattttgaattttttttggtcacgagatggtattatagaattagactaagtgtcaaagctccaatttctagagagagaagctagatagagaagctctgaccttgtaggtagttttctgaacgtgaaaaatgaactaagggagctctccttttataactcaatgtttatttttagcggcataagtacccaatatttataaaactgtaatttttctccagttttgtcagtacaaattccgttttgaatttattaaagaaatatttggaagtaattaatactatatatttttgtctagacccaataatctagaatctggaccttatatgtggtctgtttaagaaaataacagagcttgtactgatgaaattagagaaaacttacagttttacaaacattgagtacttatgcaaccacttgggttagctcaagtgaccataggtgggtgtgtgagtgttggaggtcctgggttcgagtcccaggtaaaacatgttgtaatatataaacgct

SEQ ID NO: 386385 - DNA, 738 bp, Cannabis indica
tgttgagcatgccactcaacatggaatttccacaacaacatgactaaagttagtagaattctcccaagtaaaggaatctttgagcaacatacgatcacaagggcaaggtgtgcatgggagaaaagtacgatcacgtcttctgcaagctctaaaagcaagaaggtacgagtagtagaggcaccacaccagcaaggtctgaggacttgaccaagggtacactacagacactacccctgcgacccgggaccacctgacaccaaacaagggtacgaggcgcaggaccacctctcgcacttgcaatttgcatcctgaaaagcaacatcttacctctttaagaccatcatgtatctcaggccactagagcctataaatactcatttctcacatatgcgaggaggttagaaaataaatcttgtaatcaacacattgaatgcagaagaaagaaattttttctctcctaaaaaatctcattgtcatttgaatttatactctatcttaatcttcatcttatttatgagtttcgtgtataaattttgatttttcggccaaaaagttaattgatgagttcttactgtccaaagaaagaaaaaaagataaattaatttaagctatgtattattgtataaaatctattttataggtttattagcaaaaaaatatggagtaagttgaaaaataccacttttattaagcaattaattaaatttgcctctaattttatatttatttgaaacatac

SEQ ID NO: 386386 - DNA, 1021 bp, Cannabis indica
acttcatttcaaaatgcaaggagtattaaccacaacttgttcacttagaatttaagaagtctccacatgtcctcatgtcatttggaaggaagaatgaaagcctacaaaccgcagatcgaaaggctttggggtaaatgttatatgtgtttctagagagaagagacatgtaattccctagagagaatagacatgtaattccaagatggtttagctcaagctacaacctattgccaattgttttttagatggaacattattcatcttatcccaaattctcacatggtatcaaagccacttgtgatctgttgtgagcccaaattgcaaccggtccaaaaagtcgtttgtgatccgttgtgagcgaaagtgttgctggtccaaacagatacttccgttgtctcccctttaacctccatttgggacctttcggccaatgtgtgtgagtttccagcgttgggtctttaacctgttttcaaaatccacaaattttcagatatttggccttgtgggattctttcaaatgttaagttcgatcttgtggtctcttaaaggtcgttcgtgttatacccacactttctaggtccaaacgtgaggagggtgtattaagagttagtcttacattgctaatgtgtggaaataaattgtgatacataagatgaatgggctttccctcccattgccaattaattgccaattagttttgagatggaacctcattcatcttatcccaaattctaacaggcccaatcaagacaatggatcgaatccattagcaaagtcaaaccatccagatgacgggttgatgaatcatctagacgagacaaatattcggcacagtaggtatttggatagcatcaagcagtgcttctggaaggataattattgagcctgtaaatgctgagcatagtatctcactcattcattatgaaatctcacaatatcaagactttattttcttaatcatgttcgagaatcaaatattctaaatgagaaaatgaagtaattatcaatcaagcatttatgt

SEQ ID NO: 386387 - DNA, 598 bp, Cannabis indica
aaaaccatttttattttcacttcacttaagcaccaagtcactggctttgcttctttgcttaactcaaccagccaacccaaatgcaacaaacaagggtatttcttttctcacttgaaacgatgataatgttaatgttaacactctcaatacatatattatttcagtgccctgatttggctacaaaagtttcaaaagttatatccattttcactttttctattgtcccaatgccttactatgctgagagagtgtttctttttactaaaattaatgctttcccctcaactatacaacctctggagattagacatcaataataggccttcttaagaaactttggcggcccactaatgtattagtaaagattaaagaaggccccatttgatggcccaattgatgattcccatcatatttgatggacttcatagtttgtaaaaaatatgatatttatgttttctttttaaattttatttggaaaaatgtcaattgttttgttgttgaaaaattagaaaactaccagaaattaataaaaaagctataaaaaaaaaatcttttttcaattttgaaaatttaatatattttttactactatatatat

SEQ ID NO: 386388 - DNA, 614 bp, Cannabis indica
attttgtggaactatatttggaactgcaactgatttattttctgcataaataaaatatcattccaaaataacaaattaattgattatgtaataaatatactgaaagataaaaatgagtaccaaaaatttccaactcaccttggtttcttgtatcagtaggattctctaagtccttattttctggattatcttttgaattagctgtaataaatatatttatgcatataagcaacaatttacaaaataattataaagagatagagagagagaatatatatatgaattattggaacattttctcacctttgtctcctccaatattggggttgtttgtatcattttcttcttcatagctaattctaaaagtagtcactgtaaatggaacataattataattagttagcaaaaatacccaattcatcattaatgtataaacatatcataatttttcttaaggtactaatcatatgtttatattgacatgcattttataattagggtcgagtctagattaaagcggcgtatgttagactttttatttgggcttacattaacttttattggttttattaaaacttgggttgattggatagttctttgctgtgttagcccat

SEQ ID NO: 386389 - DNA, 873 bp, Cannabis indica
aaaacttttaaagagcaagaatgaaaagatgacatattcccttcaccttttacttttcattgcaactcctaatttaagtttgtggcatttcttaatgagacttttcaacttttgcatgtaaccctttacaaaagaaaattataataataaggccacaaaagctagatataaggttacgagaaatgttgaaatatggacccctaacacccttcaatatgttatactgttatttgtacaattaatactgtaaatgtggattagattttttgacacgacaaaaaactggcacaagcacgatccgacaaaaaatatgtatttaggtacgacacatcacgacacgagaaatataaacttaggcacgacgcgatacgaaaaatatagacttagacacgatacgataagtccaaaaatatgacacgtaagtataaataaattagctagaaagcataacacattcaaaaactcaaaaatttgataataataacaatgatatatatatttatcaattcaaataatagtaatatttaaattataataattatagtcattgtttatatgattgtgtgtaactattattaaaaaaaaagatataaaaataactgaaactataaaatatacatagattttagtatttaactcatcagttaatgtactgaaaatacaaaaatatggaacacgaatttgagctcgtataagaaaataggttgacctatttaagaaaaacagaccgaaccaaataaagtacgacacgaattcgaacacaatacgaaattgttggacttgtggatcgttttgggtctctatgaaattgttacatggcacaacacggcctatatttttttatgacacgacacgatctatattttttatggt

SEQ ID NO: 386390 - DNA, 603 bp, Cannabis indica
tatatatatatatatgataatggattatggaggccaaattttattcctttacaactcaaaacacatgttttatctgaagaaactgaatctttgagctctcttggcaccgataatagctgcaacatttactatcggaatcgataagtgatggttttattttgattattggtgtccagaggtgttatcggtggtgtttagagtggccagcagttccaggtgtatttgaaggagagaataactaagtttttctctgttataaatattaattatataatcaatataatcatttttatacaatacatatttttgatggtggactaaaggggtgtgcagaaagtcatccgatccaatcccaactgaccgatccaatcttaactgatctaatagaatcggatatccaatcataatttggatcagatcggatgcaaattttaaaaatccaattggatcggatcggatgttggatgagacatccgatccaaatggataaccgaaccgatccaatccaatattatctaatgtccattcgatcatatttaatatttataattttatatatttaattattttgttttaaaaaaatatattaattattaataggtt

SEQ ID NO: 386391 - DNA, 2245 bp, Cannabis indica
tttttaaaaaaaatggtaaccttggctgatcgtgtgagttgtgtgcttgggttttcggtttatttttttagttcaaatagaaaaaaaggaaactactttatggttgctttatttcaaaaatcataagtcttgccttatatatatttttctcctacttcttttttcccacatgatttcttattctcttcttcattgtgtttctatcataaaatcgtgtgtgagtgtgtttgagtttcaattttcttttcaaagagaaaaatggtgaagactcgaagaggatatccaaggcccctgctgcatctaaagtctgaccaccacaatctcctctgacttcagtttctacattgccaccacctgcaacagctccgtcaacatctattggtcgcaccaccaagaccaaggctagaaagaaagttttttctctctccaatgagcatccaatggtgtttcccaacattacttctgaccttggagtcgatgcaccaccatctgaagtggtggtgccatcttgagtcaaaaaagttagttctttttcaattgaaccctcggtggttgctagggtaaaagctaaatctggttcatcttcgccaaagactgctggtgctactgctgggcttctcaaattgcctatcaagccaagtcgatcaaagaaaaatgagttggccccaaaaagaaaattaattttgggcacatcttcatctccgtcttcttctccatctgttgcaaataagaaattaaaggctcatccatctccatcttcttctgaatctagacccgaggttgaagaatctgagtccaagactgatgagtctaatgaatcgtttcctgaccatgttcactttgcattagaatctgatgaatctaactctaaagatgatattgtccctgttccagaagaggtatctgcccctgcactagtttcttcaccgttgtcatcaaagggtaaaggcaagaaaccagtcactacacctatttcgtctccaaggattaaaggtgtacactttaaaactcattcgtctctattttctacaatgataatgctcgtgacatggttatttatgcacaaagaaaatttcttgttgaaagaaattatttttttagtgatcatcgtccatatggtgttcttaacattgttcaagagagaaaattggtaggttctttggttaatttttctagttatgtgaataggatttttaaagagttctatgcaaatctcaataatgaaattgttgattctaactctatcatgttttgtaaactgtttgtgagaggtcatcgattctctttttctccacaagatgtagcaaaggctttgcatcttccttctctttctattccagatgaaaggacagtgaacctcttgacaaggatgaggttctttctgagattgtgggtcaatagatggtgtggcctcaaaattttgttatctcggtcaccaatctcactttcatgtatgtcgtgcttcacaagtttgctactacaaattggaaactgacttctcacactgcaaccatctcctttgatatggcatctttcttatacaaggttggaattgggcttgatattgatttggccacaattatctatgatcaaatcattagtttttgggaaggtaagaagaaaaatatgaatcttccttttcctcaagttatttacaaaattttgagtatgcagagaagtgatgtcaagacagagaaagaagatttggtggctccttcaactgttgcttcttacaaggcacctgctccaattcctgatgatgttgaagcctcatcatccaagaaatccaagcctcaaactcttgtgtttacttcgaatgaatttcctgcaaaagtgcctattccaactgcttcaacatatgtctctgcagaactctctggtgtttgagcatcccttgatgccttggctaatctagtaatgactcttgagagactccatcgttcagttttggatgttgtcaaagccttgtctaaggccccagaagcttggtttttcttgtctttaggggatatgcaatacagacggcaaatgacattttaaatgttgttccatctaaagcagtccctaagacacctgtagaactatggaatggtcgtatacccagtttacgccattataggatttgggagttccctgctcatgtcttaagaaagaaagaaggcaaactagaagcgcgaactgaagtttgcctgtttgtcgaaaattctaaagagactaaggtggactattttatagtcacaaggat

SEQ ID NO: 386392 - DNA, 913 bp, Cannabis indica
agaatttaaagtgaggggcgtaatttttttttttttatataaaagcaaggagggcaaaaataatttgttttttttttaaaataaagtgtagttagtgggatttaaacatttatcctctatgtcgaagcttaacaagctaacaacaatggtaaaaaccaagaacaagtaaaaactttagagagagaacagaggaagaatagctcaaaagcttaactcacaattacgagctaagtcatctatttatatgcaaaagaaatacaaggtaggaacaaagattcagttaaaataactgaaaaactaactaactaaaaatacaatagtattattagttaacactttaatatatttataatctaccttaaccattacatcaagcttactattatgtctataaatatcatcttttaatacaaatatatgttgtaactaactaaaatatacattttttttcaattttttttttcaggacgactgacccttttcgctataatgtgggtttgcccttggtttatattatttttctttaaatgtaaatggaaatatttattaataggttaatcaaacattcattatatgaaaatattactcatacaagcaaaatcaataaaaataagttacatctaaccaaactttttacaataaagaaaaataattcatttaaataggagtttataaatcattttgacactgcatttcgttttatttgcttatcttttatattttatatttataaaaagaaaaaaaaatccattttacaactttgtgattttgtcaaagatctcaattaggtcacgatacttcaaatatgatcaaattgcatttattaaagaagttatattattttttttagattaaatcgagggcaatgggctcaatttttttttttaatttgtgttatatctaaagtaaaatg

SEQ ID NO: 386393 - DNA, 834 bp, Cannabis indica
ccccgctggcattggaacctatgctcttgtacaagacaaagggaggcaaaaatgggtgtgacccaaaaaactctcgtgcccctgaacctccttaaaaaaccacgaatcaagctaacagaccttctcaggcgcagaagacggccaacgcctctaggcttagacgtccttcaacccagataggccttgcaatgccaaaggataatggtacaatttaaatgagattaatactctaattaaaacgttgttaggtttcatacttatcggttgtcgcattagacaacgatagtgatattagactgcctcgttaagcgacagtgtgattaaatctgtacctggatgtatactgtttatgttttcaattttattgctgagtctttatgaatcacgggtactttatagtgcaggttagaaagaaccaagctagatcagccatgagttagaggttttttctggtaaatgtacatattagcttatttgatcggcgacaccgacaggggcggagccaggatgaaaaattaaggggggccaaattgtatatatatttaagtgacaaatatttcaaaatatattattaatttatgattaaaatacaaatatataacatctctcttgcatattacgaaagtcatttataagtaaatttacactaaattttttaatatttttttttggagtaatttgcagtataaatacttaagtttaattctctgttgtagataaatacccaagttttttgacggtaataatacctaagttatatttctagaacttttgtaggtacatgatcgttaagtgtcaagttattatccaaatgtcattttttattgatatatt

SEQ ID NO: 386394 - DNA, 1368 bp, Cannabis indica
taaaaaaaattattatatttggtacgaaaagaaaaattgtgtcgaaaaacactcaattatacaattttttccattaaatttgaaaaattgatttatctttttgttctctcaacttttcttttcctaaattttccataccaaacaccccattaagagtgaactaagaaaagagttggtgtttagtaaaacaaccaaatccaatgtagccttaattagttgacaagagttatttcagagatacttaaaaattaaatctttacattaaaaagaaaaacggttagtgccaaaccttgtgccaattgtgttgacagcaaaagacccaagagaaaagacagcaatttgtatcagaattccttcttgggatatttgatagatgctttaccattacgtagccttctttcaactttggaccatactcatgtagaaatgacaacctagagacctccaagaatttgcacacctaaaaacccaaactcccttgttatgttttttactttgaatacttaaaaaagacacatcattatttggtaacataaacataaaaactcattgcctcacctcttgagaatttacaatatccaagtttcccaaaaaatggttcaaatagccctgcattgcctcctttgctctatccgaaatcgattgttgtcctccgattgccggacgaataattggcaaaacagctctggaaggcacatttctgcataaccaaccaacaaaaaacatgacattttatataaattaagaagaaaaagagaagaaacacatgttatatgagtttgtttgaacctgtttttaacagtgtcttcgttattatgtaaaggaacagccccatcatcaggttcatcatcatcttgtactactgctgttgtttgatcaactattccaattgtatgaagccattctttaacctttttataatgaaaatattcatgataattaattatgtttcaaacaaattaatgtcaaaacataatgattattattattgattattataaggacataatatatgataagaggcaaacctgttcttgcttctcgtaaatctcctcaataaatgcacgtttcttcaaagcaaaatgtaaatatagaacttgggaagctttctttactaaacgccacttgaactgtgaacaaaggtataaaagccaaacatagaaacttgtcacaaatataattatgataaatttccttattgtaacatgaacatattaatttgcaaaataaccacattattgaaaatgctaaaaggcacaacactaaatacaagtgtcaaattgatatggtgtaattaagtatatgatgtaatttaataataattataaaaaaaatcattaactatactaatactttatattgtaaaaa

SEQ ID NO: 386395 - DNA, 610 bp, Cannabis indica
tttttgttttttatttaatttaagtgaggaataaaaaattgatcaggtgagataaagtgggtcgggggctaatattacgccttcacttcaagtctctattgggtatccaccgatagaccttatggttgttatacactggtacgtcactttgggtgcttcttggaatgacaattgtagcccaacagacaaacacgagtctttcccgcgtgttatgtcctcgctcacatatttcttggaaagttttcccttgaggttactcatcatcatgagactactcaaaataaagtatgtttaactttagagttctcaaatgatgagtaattgaaaagaatatgcatcttattgacataggtactacacatcaatctatttaagccatcttcaaatgtgttgtctcatgcctacaaattaaattccgtattttaatattccaagttttattatttaattaaatgtttaattaaatgcggaataatgaaactggtactgaaaaacagttttcttgtagctacagaaaacaactctgtaactccaaaagaaactagaaaaataaacagtgcagaaaagtaaaacacacaaggtttttgtacgtggtttcaacaatcctttc

SEQ ID NO: 386396 - DNA, 667 bp, Cannabis indica
taagcacctccaaaaggcctttagtcttatctatacaatgttatttacaacccttcaaaccattctttatctttttgcttaattttctttagcattacaagtgctattctattcttaacactccatttaacttgctgtataatctcagaaactaccacctattttgcattccaaacttgctcattctgagctctccataagcagtaaaccagagcagccataccagctgctagaacctgctttttgaagcttgaacaccttgcttttcgcacccatttcagcaaaccagtgagggcagcagctgttgtgtgccaacccaaccagtctttcacctgcttaagacattgtgcaagaaaataacagtcaaagaagagatgatttgttgtttctgcagcattattgcagaaaacacattcagcaccatcaatgtgaccatgtttgagaagtcgatccctagttttgagtctgtttagaatagctaaccataataggaagctatattttggaatattcaatcttgaccaaacttcgttggaccaagaaactttctcccaatttggattaaaccagcccaacccctctgttattttatatttagtggcagagaaggtgttatgctgcacacattctttaattctttctttgagatccaccattttcctccaat

SEQ ID NO: 386397 - DNA, 2147 bp, Cannabis indica
tgaagaaagcagtgataccatccaagatgacattcagtaattatggtactcactcgaacctagtctggtcttcactatactaaccccaaaaagggtgatgttgatccaactactaaaatgggagatgtagaagatctaaatgaggtgccagtcgccacaagaaggatcatacagtaagaaccatatccctaaagatcctattgatgaagacgatgaattaggggagaatgattctgataatgttggggatgatcaccaagatgtgccttgggatgattactaagatatgcttgaggattaccaccaagacatgcctgttgatggtgatgccaaaaaggaggacgatccagacgagtcagatcctgtagtcatcatggctaggaagttaaaaatagttgaagataaattatagttgcaagagcaattttctttattgatacacaagaaaatggcgagaatggaggtcgtaataaaagcattaactgatgcatgtagaactactcaaatggctccaaagaataacaccaccaagaaggttgatcctaaaaatcctgtaacttatgatcctaataaggatagagggaaaggaaaggtaggtgaaacttcaaaaaggctactcatgttgaatagcaaaagaaatccaaatcttctaaccaacctcaaaagaaaaagaaaaggaaatcatgcctcagagcaaggtgaccaaactgattctagaggcagagctacacagaaaaatacttctgatgcaaaagccaaaaatcctactttccaggaggatacaaattactgtgatgattctattagtcaaagtgttgatgttgaagagttgtgtccgccattagatgactaaaacagaagtctttctacgagtgatcttcagaggaaactaaatgccaaaaaagaaaaggttagaactgagtaagccagacctcgcggggataacctaagaaattatattcacgaccgtgttcgtggaagaaaatctcgagatgataaaactcaatgtttgtagcgtaaaattgaagagttaacaaagctcacagaaaagataacccaaaagaaaaatggaactgtgtctgacttagagaagaggacatggaaccatgtgtgaaaagaattatagatgcacaactgtcggagcactttagaatgcctcaaatagaattgtatgaaggaagaatggacccaatggaccatttatccaaatacagttggaagatgcaagtcaaaaagctaatgacgaagcaaagtgctttaattttcattaactctgtcaaagtccgcggaggactagtggaaaaggttatctccaggatcggttcgtaactagaaggatttgcaggcaatgttcaagaaaaaattcatagcaacaaaggattttgacctggaagttaattcttagtagggtttatgccctgaaaatcctgtaaagatatttctgattatttaataaaaagttgaacattttgatatatgcttgaatgttaaattatttatatttattattgaataatttgtatgtaaatagcagatcattccttattcatatatgaggttgtggcttgtaattgttcagagaactaagaccattagtaagttatagaatctttaatcaattgttgttggtacggttcactgatgcccattcttcagtgcaagtaatctcggtttgaattatgaatgtagtttgacataaaagtaaaggtgttgtatataatagaaatcataaatgacaaggactgatatgaatggagccatttttattaacatgtcatttactataaaaaaacgtaattcatatcataatgataatcaatagtagatagacctaaatcctgagtaatcatgaactcatgttcatgttattagtttccttgattcacacgttaaagtttctcaaagaaaataattcttacgacttttgttttgggaaactaataatgtggacggctgggaacataatttacaattataaaatcctgactttcctaacggactgaatactttttgtgttaattctagaattggaaagttgtgcatatatttagatgggatctaaattatacttctactagtgaattaatgtaactaaaggataaagaagtaattagaaggataaaatggtaatttgaccaaaactaatt

SEQ ID NO: 386398 - DNA, 1189 bp, Cannabis indica
tgatgactgtatgttagatgattcgggttatgaagggccgaccttcacttgggtcaataaaagacaaggcatttcacatgtccaagaacagttagaccgatttgtgtgcaatcgtgcttgatctgagctgtatccttcagtttgagtgtcccatggtgattttcttcattctgatcatcgtcctatagtcgttaaactagagaatattgtggtacgaaattaggagtgaattaagtggtagtattgttttgaaccacattggcttaaagaggaggaatgttgatctattgtgtttgacacttggcaaagatgtatgttagatgtggttgacttgttgggacttccagatttgcttggttactgtggaaagtgtctttcaacttggaataagcaaaggtttaggtcactacctaagaaagttgtggaaactcagatggagatagataaactcttgaatgccaatgctctcgtgttcgaatggatgaggtgaaagctctataacttaaattggatgaccttatgaatagagagcaactttattggaagcagagatcgagatcggagtggatgatagtgggtgaataaaaacacaaaatactttcatacgaagtgtcggtgaggaagaagaaaaatgctattattgagattatgatggaatctggccaaaaggtgtgtgttgaggaaaagattgttggtgaagtggagcggtattttacaggtatttttcaaacagccaatccaacaaatgagcaaatttagtgtggtacagaggttgttaatttgtgtatttcggtggctaataaagagcatctaatggaaccattcactcaggaggatgttcaccaagctattaaggctattagcgccactaaagctccaagaccagacaaatttcatgctttatttttttttagagatttcaggatattgtgggtgaaagggtcagccaagtatgccttgcaatcttatatgagggtgctttggtgcgacagtttaataagtcaaatgtagtgttgataccaaaagtacaaaaaccaaaattggttaaggagtattgacctattactttgtgtaatataatgtataaaatttttatgaaagctttaagattgaggatgaaaagtgttcttggcccccttatctgatctttccaaagtgcatttgtcccacgacggtcaatacatgacaa

SEQ ID NO: 386399 - DNA, 765 bp, Cannabis indica
gagagagagagagagaataaagtttattctttcaaatcattacaaagaaagaaaattgatcaagttttctttatatacactgataaaagatcgagttagttaccaagcaaactaactaactaaattcagctcattttagcaaaggtcctaactaattttagctcatgatagcaactttgatagatggagcaagataatatgcttggcgtgaatccatcagcgatgctagtgtcgttcctttagcttgaggttttagtgcgactgttgttatcattagaccttattttctatttttatcttggactttcagtttatataagcaattgaggaaccatgtttaggtttgatttcaatttcaaatactccaatagtatcatctcagttgaccatgtcacaaggccgagtattgtctcttgactctcttttttccaagtctccgatcgtaagtgaggatgttagagtcggccatgtttgccctaatctgagaacactgctaacaacggagggcttattatattgatggttaatttgaacagaaagatttgtgttttgacattatcattaagggaaagattaatcatgtcaaaggttctaatttgtgactgttatgtctttaaagtttattacatttatattagtggtttttttatccttagaaaaaggaaaaatatataaaaaccaagaactgaaaaaatgaagagaattaactgttggaatttattttacgaggatcttagatctactcacaagtatgttgtttaaaca

SEQ ID NO: 386400 - DNA, 577 bp, Cannabis indica
aatttttttaatttataataatactataatctaatatcttaaaatttaacatcttaaatattaattctctaaaacaacgaaataaacacataaaagttgtaaaaaaccttaaacagaatgatatgattttttccgttcagatatctaactcttgatcctttctgttgcagaatatgatcaaggtctgaacttggattctctttccgttaataaaaactacacaatctttcatactatcttgagtattgccttgaattgtgtggacaattactcaatctctataggcttcgaaaaattcaaggagaaaaagagagaaattcgaatatgaagagtgctcttatttattttctattttgtttgacaaagagagtctaaactagggttagggtcagaaaataagagccaacatatttttagcttttagggttaagttttgaattaaaatagaataaaaaaaatagttttattaaatccaccttgggcgaaccctatgtgggcctattggatttcaattttgccaatttattgaaacttatcttttttttttcacaaaggccatcttttaattctaactcta

SEQ ID NO: 386401 - DNA, 1262 bp, Cannabis indica
atgccataaaccttttccatagattgaaaatcccaacaaaggttccatgattctgttctctgccctcttttaacatttgcaagaagatttcaagtgccaaatttgcaaaattattcaacaagacctgaaagaactgaagcccatgacattgaatctttcgtttccatctcctcaaacattcttaacgcattctcagcccctccacatatgcattacatatcaattaaagcgtttccaacctacataaatatcagtatgtctgttagtaagattgaataatgatcatagtagtccacgataccacatccgtttggacaatctcattaaaaagttacccttgcttgctacaactgaattccctacctttaaataatcacatgatcaaagcgttccatgaaactactctcagttcaattatggtgctttccaagtaggcatccatattaacatggttatcaattcatttgtgtgtttaaataaagagtgtgggactccatattggcccaagaaactacatgctaaaataactttcatcattgtcacagaatcaagtctcacatctgccgcctgcattgtttcaaaaagacttaaaacatcctcaaaccgatcacatttcgtatagccacagatctctctcagtcattccgtcgaacactctttgcgcaaaacccaattagtcacaggaagaatacaaagaatgacagcatttccatcaaaaagataggtgtcgaaaccaattaatgtgaatattttggccatgtaaaacatcagattctcgagcacaggcctagctatacatacgcatatgcatgtcaatagcttttcttggctggtaactgcggcagtcaaatcatataactccaaaagcaaacaaactgggtcgctcgatatggtcaaaagctaaatgggctttgtccaaatttagatgagaagggattatttcatatttaaccaaaaaattaaaaataaattacaaaatgattttaaaaatttggaaaggtctatagtactcccgtgttttgctagactctattttttggggggtttttttttttttttccttgactaaagcctcctatctatcaaaatttaatttttgtagtaaaattttcaaaattactaaactaccaatatggataactcttttacccgtgttatttttatattagtacacataatattattatttaaaaattttaaaaaattatttcgaaatttattttaaaattaaaaaattaaattaaagttataaaattaataaa

SEQ ID NO: 386402 - DNA, 597 bp, Cannabis indica
caaaaccttatccaccctactccccaatgttataattttataggttactttttttttcctaaacatacctaccacagttacccagttacttagaattatcgaatttctttactttacacgggtcaaggtagcgtggttggatgtgccttctatgtgacgaagttacacttttcaaataggtgtacaaacttgtgaaaatgaacttacatgagataattacctaaagatttaggtcatttaaaaaaacaaataaaaaaaacaatatatatgtatgtcataactatccgcttacaaaactttatccgctacagttatcctgttacttagaattatcctatttctccgctttataagggtcaagttagtgtgattagatgtaccttctacgttagaaatttatactttgtgaattgggagacaaaattgtaaaaaagagctcacctgaaatagttacccaatgacttagagtaacttggtcaattacaattagcctaattcatcactttacaatgccagatagttcttgcattattagatatgcattttacatctagtttttactctgtaccactagttctaatttttttaaaaaaaaaa

SEQ ID NO: 386403 - DNA, 562 bp, Cannabis indica
gttgaaaatcaatcaacaacagattagacattttatctgaataacccacactattccttgcgtgtgggtgattagtttggaagactacagtgtgagtttttcatcagccaaaaggattcaagttatgagaagtttcaggaataccctaatagtcatcaacaggtatgtattcctttcatataatttatgttctaacttaatgtttatacatttggagatccattgggcctatggtacaatgataatcagatatacaaattcttctactgaatacctactttagtgccatactactaacacccctaaccctttcccaactattaaaatcttggtagggtcgagtatgacttcctctaattcttctacttgccaaaatttggaatactcataaaaaattcttgggtccaagtcttcctcaattttactagcttcctcagtgatcaccagcatagtatgatgaaccttgattcattattttaacgcaatgttgtaacattctctcgctgttaattagacttctttcacagtctctattccagttggagtttgaaattttaatgat

SEQ ID NO: 386404 - DNA, 1109 bp, Cannabis indica
aaaaataatacaatatagaattgtatatatatacacacatcaaatacttacctttttagagtgggaccaaaatcagagatggaggcggagacggactccctcactggcggaggcagaggcgggttggggggtttatttgttttttagtcaggggaaaatttgaaaaaataatgaaggggaaaaaatagtgagtacgggggtgggtgtgtttatatagaggaacaataccggtggggttctgctggtattaacataaaactttatataatattagtagtagcggcagatcctcaccggtacagatccgccgctaatactttttaaaattaataagcgtgattttttccgaattaaataacctcattaatacgggcgggtgggatctatcggtattaatgatattttcaccggtatttgtatttttcatatatattttaaaattttttaattttaaaatattaataccagcggcccctaagtccgccggtaataaccccattattaggggcggaccgttcccaacggtaataggtccgcccctaattataatttttgttatagtgatccaatcttcggcggtcggttctaattggatcggtcggttgtcattggattggattgatttatgcacaccatttatataatatatatgtgtgtttgattttctaagttaaaagctaatcatgtatataatatacaccatgatgatagaccttgctatttgtattggaaactaccaaaaaataaagggctaagatgcaaaatgaccctaaatttagaaattaagatagtaaatgtccctttttgtaaacatttagcaaaatagtcatttggataaaaatttgatgataaaattacaattataactttggatatttaaccctagctttctaccttcttttcattctctcgtgtcaagaccatcttgcctcctacttagtaaatgtctcttgtttttatttttttgaattaaataagctataaattatcaggttgagtaaaattttaagggttacattatgctttttttttttttttatcttttttaagttgtcattgaaatgatcttaatttccaacgaatttttatattacagtatcttcatattc

SEQ ID NO: 386405 - DNA, 3930 bp, Cannabis indica
ttttttacatgcatttttattatttgttaaaaagaaaataaaaattatgattaatttttttacatgattcaaaataatctgaaaattatgattaattattttctttattaaaataagattcattttaaatgagagtgttgatgctaaaaattaactcagcaataaattgttattaagattttaaattttttacactaggttcaatctattcgaattacatactaattcggtttacacaatttttctctcaattctctcgatcgggtttgggttattactctctaaattcatgtaggaatttaagggtggattctgatagagttttggttagtctagtgtggtcaagaatctatcgtcccattttttaaatgatgtggtacgtcttctatttataggtgggaaagaatgcttgattccttcttctttcctattctaattttcccacttgcactaattctcttttgttgctcatttctcttccttcttctttcctattctaatcatctaaccaccgtcttccacactatggttgagtacttgacttgttatgagtgggcattgtattttaacacaaaaggctggaaattgatggagaacaacaagaagaattcgaaatcactatagaaggagactctcatttattagttgtttgacagagaatgaaaactaggtttagataggttgaatcagaatgagagcatcttgttccttttatagtatttcaactagggtttaggatttaattatatggattaaaaaagataaaataataggaaatataatactaagtggtcggccacacatgtgggcctcactagttaaaatttttcaattgtatttcataattcattttttctttcaataatggcatttcaaatttcaatcctataaatgtcaatataatttattacataattataattaattatcaaataaagttgtcagttatcttatttattaattaaacataacaaagtctcttaattaacaaataaactccaaaacctcttttcttaacaattaagcccttacttagtgaaaattcataaatacgacataatctaattttagaattaaaattgattaattaaaaccaattaattaagtttgaaaacagtattatctcaactagtgtggggaccatgggcctatataatcaagcttccaataagtagaactagaatttaccaagtaaatcatctaacttattaattcttccttgcgccactgtagattcaaaattgcactcttaattatatagaacgctctatatgtaccaagatatagatacacatgaattatctacatcgagtaaggaaaaatttatagttctgcctttcaatatatttatccttaaaacacttagctacctataaatgatattttagtaaactaatataattactaaaataaggcttcaatcatttatatttattaagccaagctcgaagaaaatcatcgttttacttctaaatacttatagaagttatagattccatatctatgattagcgctcccactcaattatattatcatattcccaatacgtaagtattaggtcatgcgagctttaatgaacaactctaagaacataaatgacacaattgagatcgaacataaccatatcaagattaagatctattgacctaagatccactaactgatattgacttagatagatataatagtaagtttatgatatcttatccaagttcaatatcggtccagtctgatgtatactctatacatctgatcctaacatactttaccaatgctttagaaaggacatagcacgtatctaaggtgtaagtaagctttatcactgattatcatgtgagtgtaaatcaagtgtactgacgaatcataggacataaactttgaaatatataatcataattatattccactgtgttgacaacactataatcatgaataactctatgttttggatttaatagaatttatacattaaacatataatcatgaaagcaatcatgtgaaccatgtaacagaaaatgatttctgatcttttattaattagtaaatcagatataattaaaatttatatagggcacaaaacccaacatatacaaccttagtctcatacgtggtttccttggaaactttgtatgaaacttaatggtaagtatattatagtcgaatgttcaacttaagactgaatatagcttggaacttccaaggaactcttccttagtcatagcccgatacgtggcccctaaaggagctccaccagttattttctggctatatgatttttccagggccttggcctcatgcttgtgaactgatttcatattcggcctcaaggctttcatgttcttgctttggcctataggccctcaatttttaaacactactattatttagccttaaagcgttttatgacgcaaatatgatcatcctggctatcttcttatggccttaacatgtaagggtctggatttactttgtcaagccaaagtatgcctgcacgacttagaggcaagtttagtagcttattctaagcgttaaaatttctcttcataagttatttgtggtagttcgatgcattgtatgctgtgggtgcctcctaagtaaccatgaatacttaggtgtcttggtcacttgctattcaccaagtttcgcagacctgcctgggacttttcttggggtgctacccattgtacgcatgtggaactgaaagaataactttaagaagttaatctttgttagaaagtggtttagacatagttggtcttgcatgtaacaaaagcttacagcttagtgtctgcttctgaaatcacgtaatggctaccccaacgcggcttaccacacaacggccatactaaaaaataatgggtactagctcttttatgggtttttacatgatgaaacgttagaggaactaattgacaagttggctagtgagagtacttaccgagatgttccccatttcagtgtttgggtagaagttccaactccatgttctcattgtactcgttagacttatatacacctttactgctatcttgtaacatgttgcagaccttctcaatttggttcgaacatgcttggtgcaggatctttgttatcaaggaatattctttagggagtaaacctcttacaaagaatttctttcctcaatttatttgttgaagggtttggaaaatctttgtggccaaccatgctactttgagttggcttggtctcttgtctttcccttttgtcaagggatcctgctagcaagattttatttacctcttagtcactgtagaccagatgtataagagtagataactggtggatcgggctggccagggtaagaccaggtggccagtaacattcgaccattacatggccatttggaggaggctatgggtggtcaagtcattaattctttggccttctagcctactgacggctggatcggccagcctttcggaggctaggctgatattccagtttgatcccatctacactcggttggctttgccctaggcataatttccgtagagcttttgcgctcttctgtgaatatttgtcaagcttcttttttggtaacactccttagaggcggtgttaggataccacttctttgtgttatgctgtgccggattggataccctacaaccatcccctaatccctgctttttggcaaggtttttgcttgaggtatgttgttgtaggtttatccatgttgattgtctagcaagtctatttcttttgatatagggggccttagttctttgaagaacggagcatgtactaagtttgccttggttgtcaaggcgcagctagctaatcgcacgactgtgttggctgtgtgtgtcatctttcgtggcttgccttttagtacaacctttgagctattttaaagctcaagtaggccatcatcttcttgtattgagttgtatattcacctaggacata

SEQ ID NO: 386406 - DNA, 639 bp, Cannabis indica
aactcctgtatattaaagagatacagtcaggacggattccgaccctactatcccacgacctccaacaggtcctcaatcaatagggctaggagtaacaacccctctggcttggttcactccaggcgtgtaagaaactgggaacaccaatactcatgccgagcaaactgctcctagtattgaaaatccatctattggaaatcacaaaggacatttggtgatgacaccaaactgtagaatttgcgagtcactctagagaaaatgcaagagcataccaacactcttcaccacgattagcaagatcgaacagttgtaaatttggctttcgaggagcagaaatgctaattccaagaatggatggatcaatagatggaaattatgagagcccagcaagagacaattgacaaacattccaggcatgctatcgtactgattaggagaacctatcaaataaccaagaagcaatcagtgacaaatactctgattacacaagatccgagccaaaggataaacgtctacatccccactagatcacagtatgggccagaagaacatccagctgaaaacactcagcaaacttaaggaaacaagtagtataatccaaggtcacagagtcaaactatgggccacacggtagacgag

SEQ ID NO: 386407 - DNA, 1680 bp, Cannabis indica
gaaaagtcttccttataaaagatgatcatcttgaattctgtgtgaataagttaaaacttaccttttaaatatttcaatcaacactgtgtgagctaggtaaaaacatcgctatacatcactctcaaatttttatcacaagctgatgtgggtgtttgttttgattgccacataatccagtcaaccaaggcaacattactcatccaattattcaaatgtgaacatcaacgtttttccatatatttttcataatacatcatgctatctattttttttttctttttctttttcttttcttttttctatgacatttttttttgaaaagatatattttataagttaattcattcaaagaaagcttataatcttttttttttttgataaattatataattatatatatttttaataaggtggtctatattaaacttatagtagacatttcatctatttttaacattttaatttatgatactaaaaatatatttcaaaataattaattgtatgtgttatatccaaaattcggcacgtgtcctacagaaagaatatgaactaataactcaaagaatataataatgacactgcatcattaaatgcaatttaaataactcgttccaattaaatacaagtttgatagaaatattcgaactcgctaactgatttatctcatgcgagacaagaataataactattaaactaaaattgacgagacaaatgtatgccttgggacaaacttagaaaaatatacgagaaaaaatattttcccgcatgagcagaataaaagtagccacactcaactgcctcgcattattcataatgtggagatgatctcgtattattaatacaaaaaatgggtgcagcgagataaagtatttccaacacttagtgatttttcctattaagatggataagaatgagaactcatgtttgacgagatgtaaccttctagtcagcatcatcgtctagggcacaaaacccaacgaaacgatggtaattataatgttgatggagatcaaatcccaaaaaggaggagtgaagatgactatgatcctactagatttataccattggaagagttagaaaacaagcaactttgacagcacttggtagaattaaattgacgaaacactgagttggagagagaagttgcagcagccaaggctacacaagtgataattcctcaaaactagcctaatcctactgtaaagagaccgcaaggagaaacttgaggctctaagaccaggagacaagaaactaagggaatcccccaaatacccaagaagaccaatctggaaatataagggatgttccaatggatagagcaaatcaaccaaatcctgataatacaaaaaatcaagaacatcaacaagatgtcccgtgaacttcccatggatttacaaaccaagagaataaacgaacaggcatgccagaatcatctcgcatgaatgaagaggcaaggcagcctcgaccagggaataagggattttcttatgataattagcgaaaccctggaaaccaaccaaggtccagtttggtctttctccaagcatcctcaacgtccttctcgtgtggataaagaaaataatgcacacatactaaagtagaggatgtttgtttaaaatctcttttacgagaaagaagaccgaacacgagaatgaagcaagctcaagcacaggataatcg

SEQ ID NO: 386408 - DNA, 1093 bp, Cannabis indica
tctttactggtgttttcttccacttgaacgattttgggagtggcagatagatagttcttcgatggtcttcccttcttcttggagtccggttatccagagcagaggggctctcagtcttcctcggtcttcctcgcctcctggccgtggccacaacatcctcttgaccattaacgaatccttcgaggggggctgggatcgttagtttcttagaggggtgaattggagcttgatgctggagaagcatgccagaaaaatccaaacgagaacagagctctgaaaacgactcctcatgcctttccctccccaggcaagcaggtgaaggcaatggaagaaagcagtaaaaaccattcccctttgaagatgaccgactcatataatgagggaaatacatcacaaagtggccaagaaggccttattcctaagcccacgagcccatatataccatacaactcatccatattaggctctcaagcccatattatggactggccttccaaggagtgctgggcccattcaaaagcccgagaactcttcaaagaagatcttacagtggataagttctttcgtgagcccaccttgttcaaccccttattgggtattgatgattttagagtgtatgaacactcacaaggcccacgtaaaagaaaagccatggatggcatcctgttcaatacttcacctgattcaaaaatccccatacagcctatctcgaacctaacctccactactcaagtagtttttgttgtgaccaaaagtcacatttttagtcataaaaattttatgttgtgactaaaaaattgtcactaaaagtaactgtttttttatagtgttttctattatttaataaattagaatttatatattgttgttatttaaaaagttttagatcaaaaattaaaaagatatatcaatactattaaaatattttagttattgaactttttttatttacaaaatatttttccagtaaaaataataaaatattttttgttgttgtaatttatagttatattataatcactacaaaaaatagctatttttagcgataactttttaatcacaatataaattttttgtaactaaatatgatttt

SEQ ID NO: 386409 - DNA, 1390 bp, Cannabis indica
ataaaaggactaaggggtatcaaaccatcacttaggcatctcaaaagactctccttggacatttctacacttatacaatgtccatgttgacatcaaatgtcaacctgggtattgtgacctaaagtgttttcagtaaaacgaccataactcactcaattattatttgattgacacgattaaacttgagttttaaagctatttaagctctatagcaagtcatgtctcacactccaatcgaattttgaagctatcatcatcaaaattcaccagagagttacgaaaataagctttgagtaacttgcagcgggacctgtcaggcactaagagtaagccatcactaccataagttaattttcactgttagatcattactaacagtggaaaatactttatttgtattttttctcctatttttgtgagtctcacttataaaaagagagctcatttagcttatttttcatactcaaaaaactacccataaggtcagaacttctctctttagaattcgaagcttttgatgcttaaacacttgttgtaattaccatcttgtgagaaataaaaattcaaaatagacgtaattctattactatcacgatataaggggaaattactataaattattgcatgtctctcattgattactatactcacttttttattctcgccaatctagcgagtatgtgtagtttagaagtctaatccacatttctgagtcactagaataaaccttaggaaggaagaaatttttttacattagagatcaatatgatttgccttatatttaataaatgagttgttgcactttcaaataaaaaaatgagttgttgcttaaaaaagtaaaaatgaataaacaaaaactacaaaatgagctattaataaaataataatcatataatatttatgatcttccaagatagccataggtcctttcagaaaaaagaaaaaaaaaagaagatagccatagactttaaagattagttgtataattttttcataaaagtcaaatgaggatgatggaatttgatggaaatatgggaatgcatacattatttttcttatttttttttaaaaaaaatgaaataaaatgtatttaactcttaagaacaacgataagactatctctaataaatggcataaaatttgtgttaaatcaaatttgacgcaaaaaagagtcaatataatttttaatctaaatttactttaaaaaattaataaatatttagtttttattaatactatataagaaacgatgaaaaaataaaaagttaaaagttgtaaattaaaataaaatattgagtcattctacaatgcattcccttaaaagggatgtattgatgcatccttaacctatttcggcattcagaaaaaaaactttaagtctaattttttt

SEQ ID NO: 386410 - DNA, 1115 bp, Cannabis indica
acaggcttgatcaaaacttctctacccaccatggaaaacaatttggatttccaaccattaagctttttctaaattctgtcccggatagagttgaacaagcctgctttcctatggcctacaaaataagggagacccaagtaattctcgtgacaatttatttcaataacttccaataaggctaccaatatttctctcttaaggctcgtagcgttgggacttaagcacactgttgatttcacaaagttaaccagttgccccaaagcttcaccgtaccaactcagaagttgtttgaatctcatgcaacacacttttgaagccttaaaaagaagaggctaccatcgacaaacaagagatgaaatatcaccggaccacttcttccacaagaaaaccaaacaataaactattgtcacaatcaagtttcaccaaaccagataaaccctatacacaaagtaagaacaagtaaggagacatgggtccccttgtctaactgttattcaagttttcatcaatcggacatgtggcatgatcgaagggaatgacacaatcactatgtaaatcatctgaggtaactaaaaggaatgactcccagatctaaaaggcaatgagaggcaatgagctccggaagtgactcctttcggtgaggaacccaaaaggcaataagggttttggagacgttggacacgtcaactcatagcaaaatattgctccatatttgttgaataacatctaagaaaaataattatacaactaaaaaaaacataataaaaattaaaaatataattaagtatacattaatttaattataacttagtatatacaaggacggagggactttagcctctatgtaggcttaagccctcactcaaatatatacattaaattttttacatatagatatatacatatattaattcacttcactcaatttattaaagcccaattcacaaaagccttcactcaatatcttaatcatgattcatgagcctaccctaattctaatcaagccaattttaaaagtagcccaatacaaataataaaaaatataacacttttctaaaaataaaataatactattgataatgttttattttattttgttgaagatgaaaatttga

SEQ ID NO: 386411 - DNA, 860 bp, Cannabis indica
cattttttttaataatagaataattacataatctcaattattatattaattaattaataatagggtgaacttgagagggccctaagagattatgttgggcgagagacgcctttgtactttgctgagaggctaacagagcactacaagaggagtaatggagaaggcccagagatatatctaaagagagaagatctttgccatggcggtgcacacaagatgaacaacgccattgcgcaggcaatgatcgcccgccgcatgggcagaacaagtgtggtagcggccaccggggccggtcaacacggtgttgccacagccgctgcctgtgccaaactgtctttggagtgtactatctttatggggtccaaagatatggagaaacagtcttctaatgttatattgatgaagctactaggcgctcaggtatatataatacttaattatgtaattaaagtttgattgaaaaatatacttattttttaaaataatacaatattaattactctctaaaataatttataatacatagtttgtatatatatgtacgtgtgatacttaatatatgtccctatccggccagtatccacaccaagttgcaataaattacacaacatatgcatgtgatcaaattatataaggttttgtttgggtattaataatataacgtcactttgtttgtacaacaaaaatacctttccatattccacgggtatagtttaccatggaaatggatcgtggacctacgtgagtggtctaattataagccttacaaaattaactgaagtactctcactatttatttggagtattagtactataataaccagtcgaataccgtaccaatcatgtacagctaattagtt

SEQ ID NO: 386412 - DNA, 1474 bp, Cannabis indica
ccaaatacttgccaccacgatctcagtgaagtgcatttaatgatttacctaactgcttttcagccacggctttgaagtttttgaactttccaaaagtttcagacttgttggccattaggtaagtatgattgtatcttggataaatgtcactaatagtgacaaagtattcataacctcctcgagcttgaatattaataggtccacacacatcagtatgtgtaagcttaagttatttttttggctctattaccttttgcaaaaaaaaaaatgttctttttgccatcttgccttctaaacaagattcagaaatcagaagagttccaactcttagttctctcaaaggaccatcctttgttaattggtttattctgtgtaagccattatggcctaaacgtagatgccatagatacgcttcatcatcattcgaaactattttgcctcttttttatattgaggcgaagctactataaataattcattaattgctaacatgggttgagcacataaattccattactctgctttgcagaacaaattggcattccgaacttggaattaataatctcattattaataaacttaaacggattttgccaacacacttgacaaacacttgtgctctattgtccactcttatggtcacctttctattagccaattcctttgacaaattaagtattttcattgaagaacaaatattattagtggccctgaatcaacaatccataaagattgatcatgttccactaatttatctataagaactaataaattgaatttacttttcttaagcccaaagagatacttgttccagtttctcttccagtgttccatcatgcaacaatggaaacacttgcctttcaccttgattatccttggacttagggtggttttgttcttcttggctttaggttccttctttccttttggcttaggctttccactgttggtgtccttattgttcaatttcctttttcttatcagaataaggaggaaagttggactttgctttaatattttttgactcacattccatggacttatccttgttaaggttttcaaacatagtcaactcgttcaactattcaatcatgttgaactatagcttgttcataacatggcttgtggtaaacactttgttgtaatgagtgagcgactgaagaataatggcatagttaagtcccctggtctacgatagactcatgtgtctctgcctcatgtatttgcctaattgcttgcaattcatgagttcttacaaattcactactcaataaggaaaatttttgtggttcttacaaactaacatcatattcagattaagtttccagttaagcaaatattcaccatttagtttttcaattgctagtaaagcattaagggaatttggcataatagacatttttgaaaataaacaaaattgcataatgattttgtaatgaccgctttagtaatttagattagtaaaggcaattag

SEQ ID NO: 386413 - DNA, 685 bp, Cannabis indica
tttgttggttttcttgaaatcaacgagtggacttgagatcatagatccattttgtgatccaggcaactcatacaagaatcctatttcttactcacccaatgctgttctgattgaatttcaaagatctcgctcgctgtcaaagcgcattttgtgaagtgttctcctgccattgtcacttgagaaaaagtcaactagaaaccgtgatcggagtcgtggtttgaagattcatttgacagagaagggcgtcttggttgccgataccgaggttgattatttgggctcctaaaataagtgggccttaggcttaggcctagcctgcctatgcctagggctggcctggatgtaaatatattacataataaaaaaggatccaaatttagatcttaatacatcaagatgcccgagagtttggtccctattggatgctgcccgtatggctactgtggtgatggtgtgttcctccttgtggacagcaagaaatgatctggtttggcgtaagaagcaaacgtcgattgaagaaattattgtgtcttctaatctctcccttgatcattggttacatgctcaaaataatcctctcattccgtggctgagttttcttactcttgaagatggagctaagcactagactaaacctgttgataatttgattaaggtaaatatggacgtgttgggttttatgccc

SEQ ID NO: 386414 - DNA, 1558 bp, Cannabis indica
aaaagaaaaacaaaagcaaaaaacgaaaaaacttaatagaagtgtgtaatgatgtaataatccatatagaaaaaggtatggaccgtgacacttaacatagttatgggtcgtaatcatatgtcatattttccaggctggaccgcgtacgtttatgtctctacttttgggctctttcttagttagcccaagtctgtaagttacttagtataatgggctactcgtttacatcgcttctgcaaccgagtaaaacaattggattcaaatcactccaatccactacacacagacaactatactgttttaagagacatggctcttgctccagtacacagtacaatatattactgtaataataataataataatatgtatttaattttaaaaaaatataaaaaaaaaattataaaaaatagaaatttttgatatttttacggttttttagattttatttatataaaatacagtattttagtatatttttatgttgtaattttattattttattgttatttgtatattatttttctgttgttttgatgtttttaatattatttattattatttttatgttaattttttgtatttttataaaatactgttaaaatataaaaaaaatcttgaacataaaaatgtaaattttttatgtattttatataactatttctttaattaatacaagaaataattatataagaaactatttttttattacttcggtttaatgtatgtgtagactaattttctacaagtattacttgatagttattacaaaaattaataacgcggtaacatggtgacttgttataactaagtataaaaaaagggatttcaatcaatcaataaatcaattatctcaaaaaaaaaaaaaaaatcaatcaataaattattttggaaaattaattaacttgcctttataaattaaagctcagagcatcaaagaagtatactaaatttagtgtttcactattattaaatttggtgtcaaaaattatttttactccaatcacaatactaaaaattacactaaacaaatattctttattattatattaattttaataaaataaaaaaatatagtattcacatttaaatttaaatacaataaattcaaaagtattttaacaatgcatccctccaaataaaagagtcacgcatgcaatagacaatttaaactttattttcagcgtgttaaattttttttgaatttttttaaaattttacaggatatcttaaaaaactataatgtacacaactataaaaaatctctcgaatgaagaaacaggtaggactacattaatgcacaggtacattattttcggcgtgttaaattttttctgaattttttaaaattttgcaggatgtcttaaataattataatatacacgattaaaaaaaaaaaaaaaaaaaaggactaaaaaagtctatccggcgtcgaaacaaataggaatatatcagtatatcatttttagaaagatgtattgtaaaattttcaaaaattaaattcttaatttcataaatacatctaataagataaatatatataaacattaatttaaaa

SEQ ID NO: 386415 - DNA, 997 bp, Cannabis indica
tttttttttctttcaaaaaaatagtgtggctactccctgctagggtttgaaagaggagagtattggttattagggtttgaaatgattgttaaaacggaatgtatattaaaaaatatattttttttaatctaattgtgcttgctcggcctgggttgggttctttgggttagaaaccctccaacccgtgatcaacccatatgtaacgggttatacaattttcagcccaagagcaatttggcccacacaaagagaccatgcatcgacccattcgcgggttgggtttgcaagtttggtcagctcagcgggctgaatgctcaaccctaccaaaacgtaatcatttcaagattaagatctttgatctaagttcaactaaatgacactgacttagaaagatattacagtaagtttatgatattttttccactatcaatatcggtccagttcgatgtatagccaatacatttgagactagtatactttgctaatgccctagaaaggacattccacatgttactgtataagtaaactttttcattaattatcatctcagtgtaaatccagtgcactaataaatcatgggactaaatggtttgaagcatataattacaattactttccactgtgatgatatcactgtgatgatattacatatactcaggatttaatagaaattatatattaaaacagtaatcatgaaaaaactacatgtaaacgcaaattatttctaatcttctattgatagtaaataagattatattgaaatgggttttatttatggcataaaatcccaacagttttttctatgcatggttcacggggctatttctaataccgtaagagactattttaacaagttttgtggcatgggcctttatcattcatggagacattttattatccctggtccacaggacattaaaatagatataggctttatttctttatttgttttcttcaatataatcagatttactaatataacattttatgttgcatg

SEQ ID NO: 386416 - DNA, 1550 bp, Cannabis indica
aaagagcatgtgatgatagagaaactcaagctgtaaatagctggagttgtactattaattagctaggtaactgtagtgtggagtgttctcacagacagaagtagagcataatactttctattttttttaattaaaaaataaaataaagagtcatttttattgttgtgactcgaattatatttttgactaaagttatatatttaggttgggctttttgacacgacacgcaaaaataaggaaacttactaaaatactgaaatttaggttaatttttacaaaaatactgccacacggaatttttttcaaaaatactgtgtttttataaaacaccagtaaaacacaaagcaaaacaactcaaaacaacagtagaacactagtaaaacaccagtagaatactagtgaaaacttaacacagtatactgcagtatgaaacatttaaaaaaacacagttcaaaagtaaaaaataccgcctggcagtatttttgtaaaaaaatagcaaaagttagtataccatgtaaatttctcgaaaaaaatattaatttggacccaacatgacacgaataaatatgaacctacgcacgacacgaataatataaacttaagcacggtacgacacaaaaaacacgaaagcaagacacgaaaacataaatttcttagcacaaaaacacaacacataagtacgacataaaacacaaattcaattccataaaaataattttttatttagtaattcatctgctctttcatataaaaatactttatttaaatgtatttttatttagtaattcatttactctttcatataaaaatatgacacgaacagaatttttcttattgagattatgttgaacatttctgttttgctgaaagagattatgctgaacattatgtgaaaatttagtaatggaccacaattatggtgatattaatttgattattaaacatgtaattgtatttattttgtgattttaaagttaattttaactgaaacaatctattcgtgttttaaaatataaaaacaaatttgaaaagtacaaaaaatggcaattttctataggcccatttgataaatatgggtcggccattttataaaaataggctggcccatttaggcccagcacgggtccgacccaactagaataatttgtgcttatgagctgggctgagcttactttggaaatatggatcaagcccggcttggcccgacctattttatagaatgggtcaagccaggcaaccataaaaaagtagccttttataaaaacaggttgggccgccaaatgtagagctttactctcaactttaatcaattttattgggaaacttacaaaaatattggaatttgggttaactcttacaaaaatactgtcacacgaattttttttcttcaaaaaaactgtatttttataaaacaccagtaaaacacaaacagaacaactcaaaacaacagtagaaaaactacaaaacaccagtaaaacaacagtgaaaacttaacacagtatactgcagtatgaaacttataaaaaaatacagtaaaaaagtaaaaaata

SEQ ID NO: 386417 - DNA, 797 bp, Cannabis indica
attactattccattcatattactatacttttttttagtaaagaagaattactcaatattattatttagtttctaaagccaaaacaatttaaaaaaataaaaaaattttaccattttaatacttttttctttaataattttttttcctaaactcagtaataattatatatataattttttttttgtaaagggaagttatatatataatttaaagaatggaaaaaaaattaagaactacatcgcaaatgatcataattaaaattttaaattaattattaaaaaatgtactacttaataaaatacgatgtatatatataatcaattttatttatttgtatatatatatatatatatatatatataaactttttatatttaaaagagatagagagaactgtgaacattaattgaacaaagtatattcttttgttgagcatatagcacaattattgtggtttaaattgaaaaacaactttttgatattggaaaaatatgattcgatcatatccaatatatttatatacttcactcataaatttttgaacatattagagttcttgtcgatttttatcattatttttttgtttctctattgtcaccttttttttcttcttcttaaataataataataataattccaaattatttggttcatgatcaaagtagttaatttactttattaacgtttactctgtttaattaataagagctgtctcgagctatggatctacataatattatatctatctaattagcatataatctagaaaagaagaaataatttattattattattat

SEQ ID NO: 386418 - DNA, 1130 bp, Cannabis indica
tattaattaggtataaaatacatcttttctcaacagttattaactgttggatatactaagtattctccacatttataagccgttaggtatacttagtattcccaacagataataaccgttggaataaattattttcttttaaaaaaaatctgtttactgttggcaatagctatcctaacagtttttttagtttagtgctaaatcgatagaaaaaacttccacttacttttcccaacagtttccataattgacccttttttaaaccgttgggaatagctcattttgtagtagtgtgtgcttatgccgaaactaacatgttcaatgtagattttcatcttcaaatctttttagatgtcgattggacttcatgtagtgacactacaaggtttgtttctagttattgtgtctttcttgatagatcattaatctcttggaaatccaaaaagtaatccaccgtctctcgttcgtcagccgaagcagaatatcagactatgactaatgccacttgtgagataattacctgactgttagcactaatttgggatttcgacatcaatcacaaagaccatgccatttttttttttttgacaatacagccgccattcacattttcgagaatcccatattccatgaacgaaccaagtatattaagatcgattgccatgttgtccgagaaaaagtctaagaaagcacacattaaagctcattcatgtcaccaccaacaataacattgctaatatatttacaaagcttttatttcctaaaatacacttgtatccaagatgaacatgaaaagcttatacattttatcttgagagaaaatattaggtttactatttagtttaaattcgctcaacatttcagtccacaacatttttgggcctcttcctttttgccctacatatataattgtgagctttgtacatgtaataaatagttttggcattttgtgccgttttcaatcaaaatgagaaagggacttctctctaacattgaaagaggccaaaccacaatatatatatatatatactaggtgattgttacgtgcgaagccacgtagtgttagttttatttaatattttagttttttattttaattaataattaaaatagtataattatttgaacga

SEQ ID NO: 386419 - DNA, 2213 bp, Cannabis indica
gagagagagagagagagagatcagataatttacctcccattaaacaagacatcaaaccagcatgcgagtccatgcactctagcacccacagaggctatgaatcgcagtggtatgtcaatttcatacaaatcctcttcctgcaatgatgaattaaatggtatgtatttttattttatttcatttttatgcggatataccaacaaacaacataaacaaaagaataaaatcctaagtcagatgaaaatcttggtaaaaatgaggaggtgcaattcataagtaatactaataccttgactttagtgaagtctatcaaatgagatattgaaggagctactaacaatcttggatcaaaagcatctactacaggctgtacaaaaacccacaaaaaatagaagctttagcaagacagaactaatcatgaagcaaggaaaaacaatgtctagagctaacaagtttgaaaaaatgatgatcaatgttctccagccctaataacaatcacaagaaagagattcccagaaaaagtacaattttatcccggtatttgatcagtctatcccgtctaaggtgcatcacatttgatttagttcatactcgggagttaaatttgattatctcacccaaatataagtagaagaacaccaatatttgatttaaagcatcaatattttaagaatctaattcaaggatcagcacaactgatgaaaatgaaaccatccaaaaaacatccaatgcaaactaacagataggaatgaccataaacacaaaccaacaaatttcaaccagggacacggctgaactttattataataaagatgaatatcaagctacaaataatttcaaaactactgcaaaaaataaatataatattaaataaaaatagtaatagtaatttgaaaagcacttctctaacagaaaatatatggtaattttcaaacaatgattaatatggacctgtgaaaaatatccttggaatgctgatccatgcaaggctgttaaattcacaccataataattctcttgctgccagaagagtgcctgtataaataagtaagaacatttttgattaaaatttgcatctcccaacaagcaaagatagctgataacaaaatacacgaaattatcaatctcgacattaaatcttcttcagagaattatctatacagcttttggcagggaagaaagggaatagcaaacaccattgtcaatctgtttatgatttaacagacaaatgtatgcatttattgtgtacattatgcataaactattgtatcaaaacctcaaatgtttgtaccaattcttaaaaaaagaaagtaaaatccagtactagttcctttagaaagttgtggaaaataataacaatgacatgcataccttatttgcaatttcaacgaataaatattcatcactgaaaggtgccatgtgtatcctacagaagcaatcaacttaaaatcacgagaattgaacaagtaaagatttgtatataacaaattatatgcatggaaaaaatactcaaaatataaaactttgatttggtgatattgacatgattataggggttttttttttattctcctattactgtatctgtaaggttatagctttggattggtagaggaagcaggtctgctgcaatcaaatgttcaatggaatctagcgctagcacattgtttgttaaaagcgtatgataattgtttcttcaaccaatacaagaaagattgcagcatgaatatatatatttttatatatatataatatgcatatatatatgtgtgtgcagattacagacacactccaatgatgttactgttttcatgtcaatgcataggttacatttggaaagggggacgagatcggatatataatttttaaaatgtaattttgttatatagaaaggatatgaaaaaactaatgaaacaacctaaataatccccctagtttgagataacttaatcccactgaacattttgagataattttatcttatcaaatccttatctccatgcctcttaatagtaagaaacaagaattattaatttgcatccaacatatttatatctaatttattgttagtaaatggtcaactcatcatttttctttacttttctttaaaaaaataaataaatagtccaatccaatcctagtacccaaaggtaaccaacatccaaaaaaaaaaaaagcaaggtgcagtccgaacaggtagaatatcatatgcc

SEQ ID NO: 386420 - DNA, 794 bp, Cannabis indica
ctttccatcatctcaacttcttcaccatgatttcttctctgttttgttcttattctacaattttctatgtaatggcaataactccttcatcatcttcttcatccctcctacaaataaaataaaataaaataaaattcctattaaacatccagaagctccaaatataggtgtcatatcggttggaaaaaaaaaagaagaaaagaaagttagatgaagataattttgttgcgcccttacctaaacagaggaaggattctggtaataagaaatctaaaagtgtgatttttgatggtaaaaaagagaagaaacaagctgctcgtttgaatgaggttttttcaagaatttttttttagtttctgctctaattttggttctatcacttttggtgttgttaatgttttttgattcacgttgtttattagttttttttttaggtttggtttgttgtttcaattattttaggttcatttgtattgctcattagttagttttagggtttctattggtttctcaacttcagaatcaatttttgtttgttaactttcttaagggtgttgttgttatttgtgatttttatattttggaatcagtttttcataatttatcttcttgtatatatgtatataaagattcacctaccatatatttaacgaaatacctttaagaaagaagatctccacaatttcaatttttcttcttgatattgctctactgtttgtgaaaataaaaagaatcaaactcctcgtttgattgaggtttgtattgcattttttttgccatattttaggttttat

SEQ ID NO: 386421 - DNA, 669 bp, Cannabis indica
ttaggaggggattgagagactagctagaggaatagaagtgatacttctatgttgtttggtaagttaggaaggagataaataattagagtgaaatagagagaattttaattatgaaattattatattatccgttgttaaaaatggtattttttgaatttggaaggatttgctctcccttcacttccccctccccctcctctaatccttcctaccaaaataaaggaattgacctctccttgcacttctttccttccacacatttatctatccataaatcccctctaccaaacacacaggttaaggtttttgtgagctttttgattgctaattattattggctagtggtattgtgactattagagttgcatttcgttatctggattagttatttttctatgatagttgtattttatttctaagctaattttattattatataattagttaattaattaagatctttattatttagaggatattacaagtttttataattgttcacgagtgtccaagcgtttggttgggaggaatgaaaatataggaatgagaatggtaatgggaatagaaataggaattgaatggaataaaatttaaaatgcacaaaaaaaaatgaaaaaaaaatcattaaattttttttcttgttacattggaatggtcattcctttcttt

SEQ ID NO: 386422 - DNA, 1023 bp, Cannabis indica
cgaaacttagcaccttctgcttaacttcataatttctaaaagagctttgcttacaagtttttcgacagtggttgtttaagtgagtcgtctcgttgatagtagcacaattgaactcactaccacaataaatgcacatacacttaggagcttcgttcgaatcattaagattaactttgggtaacttttcaaagtgtttccaaacatgtaatgattttcttccatttctacttccactagcactaagtttaggaggcaaaggagattttttctatttgatgttgctttctttgttattttccttttccttgattgattctcgtcctcattgacaaatggtgataatccagattcataaacatcatcttctactatatcgaccatttgtttttttcaaacttgttaaaatcaaacaaataacaaaatggtatatatttaaaatataaaaatagtaatctaattatccaacccaccaacgcagttaatcacagaacctacttctctatagatgaatatttaagatattcaaactccactgacatgaatattctacattcaccgcaatataattaatcacagaacctacttctctatggatgaatatttaagatattgaaactcctctaacaatttatgaacaattttaattttttaagacactaaccttgaaatgcaaagttgggcatcaaaagaaacttagagaaagtgagcgtgagcgtcgagccgttgagcaaatcgaactatcactgattcactaatcactgtcacacataaatacataaataaattataaacacatcttatatttttcaatatcaactaatcaataattaataataatataacataattaacaaaacttaaataaattaacaacataacaaatataatagattaaaaagttatacatatttttttaaactaaagtttgtttaattactaactctaatctctaatttctaataaatgtaataacttatttataaatttataattacatataaaaaaaaatttaaaactaataaa

SEQ ID NO: 386423 - DNA, 646 bp, Cannabis indica
agaggcgaggacaaggcaaggatgatcgccaacaccaaggaagaaatgattggaaacgtcattgttgataggacgaacgggaggatgagaagttcatgatgattgcagtgttgtgatcatctataggagaatgaatgagatctggaacggctgagctttgagattaaggcctgagaatcaaatttcttagaggaacaattgaggttggagggtgtggacctgaaaagacttcaggattgatctctatttgtctcagttgctgcatttggctttgttgttgatggaggagcaccattgttagagcctgtggaaggtctactatgaaagttgtgggcaagataacttctaataccatatgagaaaaagagatagaagaaaaaaaaaagagaaattgtgttctttattcaactgaattgtacattgtttacaagaggcccttataggcaattaggcaaaggcgagttagttaggggaatcaattactaacagaatataacaacttaaccgaaaggtaaataaactaacttaaccgtggtgacttaactaaaatcatatttatttatttattatatattaaaaaataaaataaataatcattaaatctcttatttttttaaaaaataagtaatattttattttaatatta

SEQ ID NO: 386424 - DNA, 2101 bp, Cannabis indica
gacaagtttcttgaaatctatattttgatcctgcttgtcattttctcaagtataatatcacattcagctatggatatctttttagaacatatgggaatgccaagacattaaaaaaggcaagttgctttgagaaaacttgaaactttaagtactctctgtactattgcatatggcatgttggtacagtaaattgttgtcttctctttgtttgactggagacctgaggatgaggagaagagcttaagacctttaagcataagaagaatagagatgtaatctccattacagaacaataatagatcatcagcaaaacacatatgatttaatttcagcattgagcatctatcatgatacttatacccatctagattccccacttgcaccataattgggataagtattccatccctagcacaaacaataggggagacatgggatcaccctaccgtagacctctcttggcattaaaaaaaccatttagagatccattaagaagcaggaaaaattttggagtcctaacacaagtcattttaagttgggaaaatttttgtgggaatccaaaagcccccagcatctcttcaatgaaatcccactttattgtatcatatgcctttctcaagtcaatcttgatcatgcaactcggtttgcaatttttccttccatacagtctaataatatcctaacagaccataatgttgtgtgcaatgtatctactatgtacaaagccaccttaattctctataattagatcaatgagaatcaaccgaagccttaagcaaataattttagaagcaattttatagataacattatatcatgaaataggtcgaaaattagtgacattaccaggacaaattgtcttcgaaatgagagtaattgtggtagtattgatttgcttgagaattttccctgagtttagaaatgacaatacaaccttttctaatcagtgtcgaccatgtcccaattgtctttataggaagagctgccgaatccatcaaggcccggggcttttgttccgagaataaaaagtgcttctttgatttcttggacagtatactcagcctgcaagatgtgtaaatgtgtttctgagatttttggaccaagatccatcacatggttggctgactttcatcttgtgttccatctttgatcccaacaggttaatgtagtattctaggaaagcttgttgtaccccttctagtgtatcacaccagttacctttagcatcttcaatggagataactgtattttgtagtcttctttcacttaaatatgcatgaaagatagccttattttcatctccattcttagcccaactaatttttccttttaagctaagaagaagaataggcagcatgcattttggagtaacaaagcacaagcctcctgttctttcttctattaattttgacatttaaagagggtttttatgtagcttctcttgtgcttcaaacctatattccccttagcttccatctcagccttatgtatgtcattgaagccatctctttgttttctagaattagcattaatctcttcaatttacccacaagcttatacatgtgcgtaccttctatttcctccatccagttattgtgaatttttacattatacttatcaacatctttccacatactataatatcttaaaaggtttttttgccatgagaaatatcttgatgaatagataccaagatagggctatggtcaaaacacccttcaggtaggaagtttgcttccaagttctgaaaccgatccaaccattctgagttcacaagggcctggcaaaattcgagaagatctatcttctagcttctttttgttgttccatgtatagaaatagccagaagcttttaaatcttccaatttgcaagcttctacacattctcagaatttcagtgagggtactttgctagccttccttccaagcttctacataggattggactaaaaaagattggattggactggacaagattggtttatgctgaaagtaatcatgtatttggtttaagaatagactagactattttatttatttcaatttaacaaaaaaaacttaaattaaaataaaaatatataataataaagtaaaattaaaa

SEQ ID NO: 386425 - DNA, 889 bp, Cannabis indica
aaaaaaaaatgccataaaaataaccaaacttaaagctgccatataaacaaaaataattttaaaagtaagtgtaaattctactatttcattgccaaaaaacaatttacttttcaaatatactatgtattttacaaatatagggaaaaaaaattaggttggtctatcatttttctctcaatatagggacgttttcttttttattttcagtaagaaactatatgataatgtaataatgtatattataattattgtagatatcttgctagaaattttgaataatttataatatcaaaaatatataattaattattttttaattttattttcgacactgtaaattatttaaaatttcacgagtaagatatcgattatatctattatgacaacaacataaaacatcataaaaaaattaagaaataaaagtagcaaaagtagaaaactctcttacggttttgcaaaaataatattcttagtagcacactacaaatatatatgggtttttaaaaattattttataaaaaatatggaatataaagacagttttaaaatctaataaaagaataaaaaataatatcaaaatgtgaatttattgaattcggtatataaatatggaataagttgagaattgttttttttattacacattaattaaaaaatataattgtaagaataaaaaataaaaagtgggtatacattctaatttagctttggccctaagaggcaggggtcatatgaggtctaacagcccattatcaatcttgacaaaaaaaaaaggtaaatatgggattttcgaaaacgctttgataaatatggtaggcttttttcttaatatatttgtagtttttttattttgttgaagaaattacactctatactcttttcatattgt

SEQ ID NO: 386426 - DNA, 3074 bp, Cannabis indica
aagatagtatctaataatggaactctgttcgatggtgatttattcactgaattctgcgagaggaacaagattattaagagcttctcgtcagtatcaaggcctcaagcaaataggcaagtagaagttgttaataaaaccttgaaagatactatcaaaaataagttggacattgctaaaggtagatgggtagacgagctaccacaggtactttgggctcacagaacgactgagaaaacagtaacagggtacactccgttctcgctggcatttggctcagaagcaatgctgccagtagaagtcaatattgcgatgcatagaagagatttctataatcaagaagaaaaccaagaactcttgaaattgtccttggatatacttgaagaaaaacgtaccgagtcgtaaattactaatgtagtataccaacaccaacttacacgatatttcaacaagaaagttaagaaagagctctttaacatcggtgacttggtgctaagacgagtatttacaaacacgagagacgcatttgtgggagtatttaatccaaactgggaaggtccttatgtgatcgaagtaatagttggaactggggtttataaattagctgagcttaacagctagctaataaaaaaccactagaatgttgaacgtttgtgaccctactaccagtaaaataatgttgtaatctctctttctgatgtaaatttttaaattcaattattaacaaagttgaagtattttccaagtaattataaagttttattctttaaaattacttgaggggcatatatatgtgtatatgattaactagaatctatctagaaatacatgatatattacaaacccactccactttagatttttttaaagttttttcaaataattgattaaagaacctttctcgtaagaaaagaaagtcaaaagtagcagttttatttaactcataaaaataacattaagctacatgcgaagctgaatgtctaacgactcgtattttataggaatgtattaaaacgaggcaccaagatgccttgacaatgcttaatctaaggtgtgaatagaaggcttaactattcatacatgcaatcaaaaacatacaaagtgattcacgagatgaattattaaaagtatgtttaagtttatctaaaacaaattataactgtttacgcgaaacaaactgataactggttgcgcacatagtatattactaactacttaatcaatattaaaggaaaacaagatcagtggaaatgcttaaagtattttacatttgatcgaagtataattttttaaattgtgagtaaaacgcaagtaagcaaatatattaagttcaaatgcaaaaatacaaggcaataagtaaaagataaaataaaaaagcaaagttgggcatccaacaatgcaaatttatctttacaaaagtgctgcaaggggcaaaccattgtctcggccatatggaaattttcctaaataaataaaaaaagacacaacttaaaaaccaagcctacattgtaggagacttggatggatcttctggttccacttcaacctcttcttcctcgcccagttcttctttcctagtcttcttacaaaatgcaagcatggcataggctttatcacccaaaaagctgaaattcaaatcatggttagttgaccagatttggtagatggtcctcctgccaatgctattgaccctgtctttggttttagcctccattttcttcatttttttgtcatgatcagcttggagggacttgacagaatcctcaagttctttgatcttattttggtcggccagatgcttattttctgcctcctccattgtgcgagaaacctcggccacagagtcgttccactttttggctaaggtattcctatgctccctgatctagcgaagctcagtcccgagcatttcaacccgctgagacgaccgatgattggtaacataggagaggagagaagcctacaaggagaaagaaaatcaaagttagtaaaaatgataaaatgaggaaaagtgagaacaaggagaaaaggaaattaaactgatgcaaaagttcgtaaccccttttggccagactctcagaactgcctcgcatgagaagatttcagtcgctggagcaaagagtcaagctgttacgcgaaccgttagtagcatgttgcgagaagagttgcgagccttcagtcccaacctgaaggggtaggggacaggatggctcgaggaaaaccatctttgggcgagaaccagagagtttcacctggtgcactaacccagtgggttgctcatgggcattccccacagcagagacctcattcactttctctggagacttggctggctctatggtaagctagtttgatgaattcttcttgttggccgtggtttttgtccttttgagttctttggtaaaatttgaggcctcaccagcttgggcaactctcttcttagacttcttgttgtctgggggaggacttttgaacatgttctccaaatccacatccatatctgtgaagcaagagaggttcattagctcttaaataaaataaataagtgtaaatgggaaaaaactcccacttgagaaggttaccataatcttcagaagatgacgagggaggactataatattcactaaactccctagatcccatgatcataaatatatcataagggtttagtggatctaaatctcagcttgaatctatgtgacctaatctatccaacgtggtcccgtactgctcggtaatcccatagtaagaacaagtgcaactaatctgaacgtgaaattctgggtaccaactatcaaacctatgagttatgcagtctatgaggaggggattctaagtgtaaaattatatcgactatctcagaaagatactaaggtgttacattcgtccctaagcattgtgggtgaccatccacattgattacctcaggatgcttcttcttttcgaggggcagctctctcgagatagtgtgcgtgagccacgaagtcctcgctttcctctttgtctgggacctggaccttttgccacgaagaaattcttctgaggcaagaaggccaacattcttcagattcttctca

SEQ ID NO: 386427 - DNA, 1867 bp, Cannabis indica
actctcacacggtgagatgtaggtgttcatcattttctagctcctgctcaaagtaatcccgacgagcatttttagctaacatcaatgtaacgatccagaaaaatgttgaatcaagagacacaaaagcaccaccaccgagcagaccagttttggcagtaggacaatctgagttgctgtggtggacattgtgcatcaggtggaattgctctgtgagtgtaggccacaacaacagggctgcacctattcctgctgtgaacaaaccagtgttgaagaaaaccataaaggtagtactgctcctcaacaatttaccttttggaatggactttcctttgtatggataaaacaatgaccaaatcccaaatattgttgatactatgaggaaggctatggatagataccccaaagccactgttgcccaatcagatggatatttgcacatatcaacacctatttctgggattggagtgcctgaagcaggctgtcaacacacccaacaaataatattattttcacatatatcgtaaatatatataagaggaaccagaaaatgacatgacatacacacatttactcattgttattattacctttctgtattcagcaacaactccaaaaatgaatgacaacacaccagaaaagcccactatcaacgaaaattgcttcatagttaaggccatttttgaggattaaattgatcaatctcctacaatacaaaataaacattatccaattaattgaagagaaacttaattcaggtgattacagaataaatgaaaaaagaaaatatttctctctctttttgttttttttaatttatcaataaaaactataaaatgtatatagaaaatgagaagaaataaaagtaataatacatgcatatgtaataaattaatgtagttggtccctgaaactcatcttaaacaaaattattttatatttatgtgtgttaaatttaaatacgatttttcattcaaaaaaaatttaaatatgatttatacacaaattaattgcaatttctttttatgacattaaattatattgcaatgtgattatatagagagtgtttctctttgaactgaagcatgattttaatgagaactagctttgtaaatttccggaaatttacgaacaaagaataaagacagaaaattgcaaaatagttatggaaagctgagagagcgagaggagggtgtaccaaactgcaattacaccaataatcaatagaatttggaaggaaggagacagtagtgaatagcgatcagcccaattcgtacgtgtttggtagagaaagaagatttatatatacaaggaagagagtagagagtagtataaatacataatcaatcctgaaagtgaaatctatctctactttgaatctaaatataaatatacaatatttttctaaattatataaaagataaataaaacaatctatcttcttttttatttatttatttatcttttatattttatatagtttttatttatttttttaatttttgtaaagatattttatatatagatgtttttttaaataaaatattttatatagtttttttttttattgaagaatatattatatagaattttagaattaagaagcattttaaaaatatgttgcaaatgtggcaatgaagcgtctggattaatgactatatttttagttccaagtctacaatttgaatatagaactttatatattttttttaacaaaaaaaaaattaaaaagtcacagagtttgccatgacgtgtggtattaattaaattacttataattagtagaaataatttacattaaccacttgaggctagctctaagtaggccataggagggtccgtgtgtgttggaggtcctggggttcgagtc

SEQ ID NO: 386428 - DNA, 1923 bp, Cannabis indica
aacgagactaggacccaagactagacaaaaaaaagagaaaactcatctctaactctcagccgcaccttattcattccactccctttctctcatctgtctcttcgcactagcaggcagcaagtcgtcactgagcgagggacccctccatcttgttctttcttttgtttttcatgtgcagtggcggcgctaatagaaggcatagagctcgacatcgtggatgataggggattagtccctatttctctctctctctctgtgtagcgtttccttatttttcttcttcttcttttgtattcttaatttttaggcagacgacgtacactgttgctggggaagaagatgctcatgggatgacaccgaagctagggacgacgctgagccttagacatcagaagttaagaaatattaccctcatataaattataggttagtccttcttctcttcatcttaaagatgtaaaagtttttttctttttcttttttcttattttatctcttttatttttttttcttttaagatggtcactttcaaaggcaagaactttcaatgttattgtaagggtatttttattgatttcattttttaaattgggttgtttagattatttttttttatttatgattaatacgaatttattgatgtatatattagatatttatatatgtaaacatgtcagtatggttgttggaattttcttaattggaatgttcattcaattcaaaggaaaaattttggtaaattttttttgctataattatgtattgatacttgtgtataaaattatttttgctttatatcaatggttattgtggtttaaaattagggtgaaaacatagatgtataatatgttatattattttatataatataatatttagattaaataattaagtgtgacaaagtattaattttatcaattattgtaacacatacattatggaattacaaaatgtgtgtagaatgatcacaaaatagaaataatttgatgatcacttaaatatgtaactcccacctctttttcactcttaaattagtaaaagatgttactaattgtttataaatgtaaataaatgatagctattaaaaatatagctgttgcatatttttctgcctaaactttgttttttttttaattgattatgggctcctagttatataggagccaattccataaaaaaaaaaatgattggtgattattgtctgtatatagttttgtgcataatacaatttgagccgatttatacaaaaaaaaaataaataaataaataataagtacatatagaaaatcgataatttataagacatttacttataaagtattaggcaggaaagagaacaggagtgagatgtgaaaaggttctaattattctttatttgtcatatgtatgtactctatttttgagcattaatgaaattgggactattctttgtgtttctttctctcattattttttgttttatagctagaaaattcaacaaccctaatagatagatattattcaaaaaacacacgtgtttttttattaatttggtttgtacaatataggagtgccaaaccagctaataatgagatttatttatattttaacacacataagatccctaagtccataaataaaataaatatgatagtgaaatattcaatactctagattttactaatttcttctaaagcttgtatgaattgcatgaaggaaaaatatatcaactatttaaggaagttcacatatatacctttctcttttacagatctgaaaatcaatgtgagtgggattttgcatgtatcaatggctagagattcataagcactactactactactactacaaaaaaaagttattttcgttgctttataagtaacatttaaagaattttcattgattagagaaactaataaatttgtattggttttgtttagaata

SEQ ID NO: 386429 - DNA, 1225 bp, Cannabis indica
gcaatgatcaaaaccatgaatggtgagaaatcaaacttccaaatgagagctaccaacatgaatcccaacacaatacggattgtaatagaaactgcgtaaattgtgtaattcttcatcctctggaagatggctcggcttgtcaacacggcgctgatgatgacactcaatcctggctctgtcaaaacaatgtcagatgcacttctagctgcatcagttgcatcagcaacagctataccaatgtctgccttcttaagtgccggagcatcattgacaccatctccagtcataccacatatatgtttcctttcttgtagccttttaacaatctcatacttgtgttctgaaaaatatatcaaataagtcaatactagggaatagaaaatgccatgaatcctcattatcaataatacaatatcattattaccagggaagacaccagcaaaaccatctgcattctcaataagctcatcaatgggaatgccagcagtggattcatctctattctggccaaggagaaaggatgaaggatacatattagttcccataccaagtctacgaccagtctcctttccaattgcaagttggtcaccagtgatcatcttcacattgacaccaagctcaagagctcggcgaatagtctcagcgctatcatgccttggagggtcaaagagaggcatcagacctacaaactcccatggttctccagcactctcctttgttttctctagaacagtctataatttgacataataaacaatccaatcattatgtttcaattgagataaaagagtcaatcaataaagtaacttgttcttgatttacctgtcgtgcaactgccaaggaacgaagaccgcgttcagcgtacttgtcaatgattgcatgtgcttttacttttacttggccagtgagattacaaagatcaataatcttgcatagaacagaattgacatagttagtttccatcaaagcttagagataataaaatggttgaacaagaggaggattttagcttacttgctcgggagcacccttgctgcatctatgccagtttccattgttgtcaatgtaagtgattgcagtgcgcttatccacaggattgaaaggtagaaaatgtacctcagtgattccttctcttgcctataacacacaccaacaagaataaacaagagttcattgcttcaattctctatgttttagggaaaagcctttagtattttacctcttt

SEQ ID NO: 386430 - DNA, 738 bp, Cannabis indica
acatgtggcgtccctgttagacatggtgttacactactagtttgatggcttctctcgagggcctgccaacatgtgtggaggcatagtgccttgaggatcagaccatatacatatgggagtccttgtgcaatgaggtaggctattcaaacaatatcgaatgtggcatgattagaagtgttgggacgttggcttagtgcgggcatcttgccacacatgctactttggtcacgagtgactaggtgagcgacggtgttgagatttgccttatcatagtgagaacctatgaacagtgtgagtatcttggctagagagcctcaatacatggatgcactcattaatgtttgcgagcatgacttgggggagttgttcgagaaacggaagtgtgcatgaggcacacggtcgcgtgaaaaatgagtccattgttactcaaatggttggaaggctgaccttggcttaggaaaattaaaatactgcatggatgttccgctgtttgaaaggatagctcatgacacatggcaatgcattaaaatacaaacatatagtattaataattaaatgaaaaattcaaatcgatcgggttaagaaaatcaactaccactggacattagtcatatttttgcagtgcgactgttagacattttcaatatagtccatgaaaataatgttgtttcacggcggaatatatctattctatataaaatgtggctaatataaaaaaaattcttggtttatgagaaa

SEQ ID NO: 386431 - DNA, 2285 bp, Cannabis indica
ttaaaaatatataaagataattgaatgaacattagatgataattgcatcgatttggtcggttatccattagattggatgtctgatctaacaaccgatccgatccgattagatttttaaaatttatatccgatccgattcaattatgattgaatatctaattctattagatcgattgcaattggatcgatcgattgtaattggattggataaatttatgcacaaagtgcatataatcttctcttttagctatttcacaaagggtttatatagtaattttacaccactaagtttattttgtttcttctcagctatcaccaccgcctattttcttgcataccaaccatcaacaaattgacacgaaccaaacgcaagccctactgaatcaccttcttcccaccttcattcaaagtttcactttctaatgttaaaaccaaatatccataagttatttatttgttggattctttcagcctcttccatctccatcctttcgacgaaggtgccggtctcaccatcttcacaatgtctttgctatagaatatgagtttttactattccgccattggagatgcagactcttctagctcttagttatgagtagtagttattatcttgatttttgaatttttagtataagtaataagtgttagataaattctgattagatcgttttgatctgtataaattaatttaaaagaaattatttagtttgattatcatttgataaattatgttattattatttttcttttttgactgaacacatacttaatttgatgaggactattttatgcttttgtgggtgccgacgccaacattgacatgttttttccttcctattactaaccctgcagatacacatcaacctgacactctaggtttcaattctcctgctgcaaaccagaagctcccaaaaaccaataattcagaaacctactcacttgaatgattacacatgtgaaccaacagcctcttttagcacaactcaccccattacaatttttctttcctatgacaggttgagtgcaaactttagagcagctgtctttgctacagcttaacttcctgaacctgtcacatatgttgaagctagattatacacaatctggaacacagcaatagatgatgaaatcgatacttagaaaaataacacatagatagttgttctcctacatgatggacaacatgccattagcaacaaataggtctatagaaagaaatacaaccatgatggcttagtccaaaatgcaaagctcgattagtagctaaaggctacacacaacaaagtattgattatttcaaaacatatgcccctgtagctaaattcaacactctcaaactactgttttggtctagcttccattaaaaattggcacctacgtcacatggatatcaacaatgcctttctccatggtgaattacatgaggatgtttacatgaaactatctcaaggttacactccaaaaggagtaatcttaaaaaatgcaatttgcaaattaaagaaaagcttatatggcttgaaacaagcctctaaacaatggtatgttaaattaagcaccaccttactgcagcagggttttacacagtcacaaaatgaccattccctattccttagacaacaatctgacaattttctagcaattctcatttattttgatgatatcatagttgccactaacaatattgcagcattgaataacttcatctccaccctggtgatgcacagttcaaactaaagggctttggcagcctttacttttttcttggcctcgaaataggcagatgctccaaaggcatatcagtcactcaaagacccttcacactcaattattaaaagaatcaggttgcctcggttctaaaccagtctcaacaccaatggaaccaaacacaaaactcaacaatgatgatggccaacccttacaaaatctgactcaatatagaaggttcatagggaaacttctctacctcaccataacaagacttagacatcagctttgtagtgaataaactcagccaattcctccaatcttcaaggcaacctcacttacatgctgcaaattgcatcgtatattatctcaaaggctcccctaatcaaggactcttttttttatgcatcatgttcagctcctcaattttaggcctatactaatgctggttggggagcctgtcttgacacttgaagatccattttagggtattgtttcttccttggacagttactcatctcttggaaatcaaagaaacaacccacttgttgggttttatgccctaaataaaactcttt

SEQ ID NO: 386432 - DNA, 2240 bp, Cannabis indica
atcccggttcgagtctaggtcctggtttgacttcaggtttcagcttgggtcctatttcgaacccaggtcctggtcccaagtacgggttcgattccaggttcgggttttgtccttgtataggtttgggttcgggcccaagttgtggtcccggttgcattcttgggtcccagtctagtttcagtttaggttccaatttcgggttcatggccctggtctgggttcgggtctaggtccgggtcctggtctggatccgggtccgggttcgggtcatactcttaggggccatttggtatgcaggtttcatttcatgggaataggtttaacatttcttggagagtgatgaagggaattataaatctagaaaagcaacattaccgtgtttcgttgacattgcaatggaatgtgacaagccttgcatttcagatctagaaaccgactacgggtcgtgtccaagccatgcctcccggatcacgggtccagatccaaatcccagtttaggtctcgggtcccgacctaggtctaagtccgcacccactttgactcttaggtcccaggtcccgatcctaattccgagaccctagtctcagtcccggttttggggcccaattctcgggttcgagtccaacatccaagtctgggttagggtctaggtcccagtccaaattatggtctaggtctaggtctaggtctcgactcacagatccgggtctcggttcctagtccaggtatgggtgcgggtcccgatctgggtctaggtctcggtctgagtttgggtcctaggtcccaagtcccggtctaggtcctggtcccggtctggattttggtctaggttcgtgttcgggtttgggtccaattctggtcccagttttgagtccttgttctgctcttggtttgattccagttgattcttattctgggtcttggttgcaggtttcgatccaagttttggtctgggttcaggtctttgttccgatccctgttgtggtccagggccgtgtgtgggttttattcttgcgggtctggctctaagtttgggtctcagtttagggcatagggtttagggttagggtttaggggtttaggacttagtgtttatttagggtttatgttgacgaggtttagggttttgggtttacgatttagggttcagggtttagggtggggtttaaggtttagcatttagcatttagggtttagggattaggatttagggtttagggtttagggtttatggattaaagtttagggtatagggttcaggacttagggtttaggatttaggatttagggtaattaaatataaatcttattaccattacttttcattaattttatcactacttatgacatatcattaattatattaactttatcattactaatcattacaaatccttatttatattatctttattactaatcattacaaatcattactaaaacttactaagaaatgataagtaatgataagtaatgataagtaatgattagtaataagtaataataagtaataaataataataaataatgattactaattaagttaatgtaagtaatgattagtaataataagtaaaccataaaccctaaacgctaaaacctaaaccctaaaccctaaaccttaaaccctctacccttaaccataaactataaaccctaaaccccaaactttaaaccctctacccttaaccctaaaccataaatcctaaacccttaaccgtaaactctaaccctaaactctaatccctaaacccctaaaccctgaactgtaatccctaaaccctaattgctaaaccctagaccctaatctgtaatccctaatccctaaatcctaaacccaaccctaaaaaaagaaccaggactgggtcccagactcggcctaagacctcaataaggaccaggaaaaggacctggactgggacccaactcaggtttaggtcctgctttgggttttggtttgggtctcgggtcccacatcccggttcgagtctaggtcctagtccgacttctggttttagcttgggtcctattccgaaccaaggtccaggtcctggtcccaagtacgggtctgattccaggtttggtttttgtccttgtctgggtttgggttcgggcccaagttgtggtcctcgtcgcattcttgggtcctagtcttgtttcagtttaggatccaattttgggtccatggtcctggtctgggttcgagtctgggtccaggttaatttaagtaaaaataacaa

SEQ ID NO: 386433 - DNA, 1098 bp, Cannabis indica
tggaaaagcccttatattaaagggtatttggtagactccttaacagttgcagtatttaggagagcttttcaatctatttttttttcttctatgaacgtatacgttatagttatttagagtcatttgtaaatttttaaaaaattttgaatagtttaatgtgccaaaaataaagttttttattcgagtaactgtacttatacgcgcttgataagttactatttgagttttatttctgacattgtaaactattgagaattttttaaacatttacatgtgattttaaataactacatcacatacacgatcataaaaaaaaaaagaataaaaagctctcctaaataccgataccaagactagaggtgttcataaatcgatccaatctaatagcaaccgactaatccaatttcaaccgaccgccaagcattgaatatcccattgtgatcgagctaaattgatgttatttttgaatatcaaattgtgatcggatcaaattggtgtcatttttgaatatctaattgtggacggatcagattggtattattttgaatatttaattagaacagatcgaatgttagatgaggtatctaaaaattaaatacattcaacattcaatctaactaatgagtattttcatttagtttggatgagtaattagattttatattgttatacatttaaaatatgtatgtatatatcttttttttattggattcaaaacatactgaatctaaaatattggattgatccaattcgatataaaaaatactatatttaaaatattagataaaatcgaattaaaccaaagctatacataaaatacatttaattgatagaattgatccaatccaacatttaatggatgttgaatcgattggatgactcaaaattaagtagatcggatcggatgttaaattttaacatacaatatataattgaatcgaatttaaataaatctaaaaatactgaatatgatccaataaacatctctacgtcttctaatttacacttttaaataatttataatgtaaagattcaaataaaaggtatcaaatatatgagataaggggctcgtttggaacgccgtattaggtcgtattg

SEQ ID NO: 386434 - DNA, 1871 bp, Cannabis indica
gtatatatatacattttttttctgacaaaaatgagagaaatttatacattacacttaaaaatagatatatatttttttatatatatttttacacattttttattaatatttttatgaattctaattttttacatgttttaaattgttttttctaaagaaaaacattgctttcttgtaggatcaacatgaaaattaggcttccctagtaaaaacaatgttgttatgagataacagaaaaaaaaaaaaacaaaaacttcgtattgttgtaaaaaaaattgcgttgttttcccatagctataatgttaaaataatgttttttttaaaaaaaataacaaaaaaagataataatatgtatttttgttaaaaaatacttaaaaaatgtaaaaaaaaaaaataagcaacaaaaaaaaataaaaggaagaaataaatattaggttgggttggactatgagtgtttgcggggcgggcggtgcgggttaaggctatttttttttaaattcaaactgtatctcgtcgttgctcttgattatttgtttgattatccattgggacatcccttgtatccccaggttcttcctgggtgttttgagaattttcttagtttgttttctgtcttctggttttagagcttcgaggtcgttctcgtggtcttcttattgcaggatcaggttgattatgaggaattgttccttgtgtcgccctggccgctgcagcctctctctctcactcagcattttcacagttagattcagctaaacgttgttgaagttgcctattctccaactctataaatggtacatacctggttggggtaataagcatcctcactcctaggcacatatctggcagaattattgggatcttcattccttctttcatgaatttgatcaccaccaccattgttcctccttgaacgtggtgtttcagtggtatgagatttttgagatcccattggctattttccaaggcgatggagttgtttctttaaggcgatttctaccgttttgattgttatcagccattaaatatatggacaaatttctatttttaaggagggatttttttttgttgagttttatcatcaatactctcaatgaaagtaccaaattattaacgtagatttttgttaactaaaataaaatagcctttacgcaataaattctctacataaatatatatataagtaataaatgataagataacaccaaataattttgtttggttttgtagttaaaatctacatatttcacgagtctgtcttttttattaggaatatttattgagtacaaaatacaatctctgaattttaataatagtaattttctctcaaatttatcgtcctcctttctatgcaatctgcttctatttataggaatataaattgacagttaccttttgttgagactgattcaaatacaactgctcatgaaacgtggataatccccacgtttcatttaatcacatgtgggataatataaatcatagtaaatataaatttacaaataaaaagtaaaaattaaaaactttgtaaaaataacttacacaaaaagagaaatctataaaaaaatttagcatagaatgccaaatatgaaatcctaaaaaattaaaaattgcaagtatatgtatattgtacttcatgaaaatatacatcatgttataagaacacgaaaacctaaacttataacataagaaagaaaatacatatattactgaattaacaacaaacacataaacttataacataagcgagaaatgatctatatataaatataaaggaatgcacaaagcattctaggtgacatcttatatgaagtttttttctaattttttgctatctccatttttcacttttatttagtttttaaattact

SEQ ID NO: 386435 - DNA, 952 bp, Cannabis indica
ttcaaatttgcataagatataaagaacctgtaaaacaataacaattgaaaaagtatattgcaatgattttgaacattgagacattaatgcagagaaattttcaacttggatctatggttaaagatagtaatcataagccatccaacttgttatacagtctaaatttgtgtatgcaagacaaaacactaacattatccactaaagacaataaaccaaaaacaaaaatactatgcaaaagccaatagaatagtggtataaaaaatgcaaacaaaaacactaacattatccactaagacaatacaccaaacacctggtggtcgatctataatagcaaacaaaccaacatactaggatcattaatatattgatcttgtaaaatctaaattaaatgactgtataatactttaaactcgatcaagtccataataaacacattcacaataaattacaatgtcacattcataatatgggtaatcaaaatattgatattttaattcatctgcaatgtataaatctattttttataattcaattttaaaaattgtttgctataacaattagggaaataataaaaacaaaaaaagagattgaaattcattaaagctttatattaattgtttgattcgtgtcaaggaagacttacctgattgagctaaacaaactcaacttgttcttcttgttctgtagtagatttctcaatggtgatttaggattgcaacgtgggtttctatataaatgtaattaaaggatttgggttgcaattttgtgatttgggttatgatttgggattttgaagaacaaaattatagtgctgggatgattgacgaagagaacagccattacagtaagaagacggaagactaagatgaacagagtgaagtttggtgagaaaatggagtgtgattcaataaaaataaattcaaaaaattaattttaaagtaaaaataaaaaa

SEQ ID NO: 386436 - DNA, 2805 bp, Cannabis indica
gttagttggtgtggtttgtatcagtttggtatcagagcttaggatcatccggtttggtcttattcgttttttttttgtgtgtttttccattaaatttatcttcaattcgtgttctatattcatatttaattcgtgtcctatattcatgttctctgtttccttttgtagtttgaaactattagagtcacatattgatattgataatttcatttgtttcaaatcgtgctcttatttcaatagttttctttatttgtttgaaatttaaaaattaattctatagccacaatttaatattgttgatttctttgtttcaaattgtttcttgttttaatagtttccttatgagtttgaaaaatcttgtttctatggtttccttatttgtttcacaaatcttattttaattaatttcgaaaacaattctaaagtcacaaattttatttaatttatttccttaatttgttgtgtaatccgagattgttatagtgccacaaattatttaacctgtctcctcttaaaaataaaggaaaaggagaaggaaaattctagatgattcgaaaaaatagtctggaaacctctattaaaaattatattctattcttgtttcttatggtctagaggcttgtttgctaaaatcccacacaagtattccaaagtcagtgtttgtttggtttgtttgattagattcgctgcttgaattccctacatattactttttgataaattttaaaaaagcttaaagaagaatatgagtgaatagggtagaggtgtgagcttatttgagggtaaaagccatcaaagctgagtgaaacacgagtggacttgagtgacattttttttgagtgaaaacacgtgagggagtgtggtgatgaatttcttctataactgctctaaccatcttttgttgtagatttccaaccatgtcacaaaatatagacaaaaatacaagcaatgaaactccaccacctacgagtctaaatctacaaattcaagccttaatgggagagatgaggtggtagggaggagtgtgaacaaatacatgtaagattggatagggtagaagagagcacacaacggaggcctaggaggaataggggtaccaaagagacgaagagaatgaaagggattttgaaggcgtatttttttatgaagagtttgataggatattggcaggtaaccctagaaggtatggtcgggaatagagaagctaggaatcaggtagataattctttaggaaatatcaagatgaaaattccagcatgttagggaaagtgtgatcctgaagcataccttgagtgggagaagaagatggaatttatttctgattgtcacaactattctaaaatgaagaaggtaaaacttgttgccattgaattactaacatgctattatttggtgggatcagttgtgcataaataggaggtagaatgatggagatggctttgattagagctaatgtggaagaggatcgagaggcaacaatggcaagatttttgaatggattgaactaagagtttgctaatacaattgaactacaccattatgtggaattagaaattttggtgcatatggaaatcaaagttgaaaggaaactcaagaagggtggttcgagttcaaagctaagactgagtccacacaatccaagtacagcaccttggaggttgaaatatccaatgaaagaaaaccaacctgcttcatcctatacacccaaaccagccacaacagccacaatccctcaaggaaaaataacccctatttcatcccatctagtgaggtaaagtatttcaaatgacaggggcgaagacacatagccaatgtccaaacaagagggttatggttattcaggaaaatgacgaggtagattttgaagatgaagatgacctagctgacatgccaccattggaagatgcttcaataaaagttgaagagtatgaggtagaatacggtgacatggctgcactagtcactagacaagccttaaactcacaagaaaaagaagaggaagaagaggtgcggcgtgagaacatttgaaagacaaggtatggagtgtgattattgatggaggtagtgtgattattaaaatgtggcaatacatattattatgtgaataatatattattatgtgtttagtaaataaattgtgtaatatatgattatttagtttacaaattgtaacctacactttgtaatatggagaggagttagaagattaattaattttgtaactttttttggttgatcacattttggtgtaataaaagagatgttatacaaaattgatgatatgattcaaaagttatgaaatatagttgttacaaaaaagattaatacttatttatataagagaaatgacgtgatttatgtgtgaattctaagtgtgatcacttaagacaatatataattagaataaaaagaaatttttttgaagccttaataattaaaaaacagtagaaaaaaattacgaaaggtataaatgtaaataaaatttgtcaaaaggataaatgtaaaagttcctttaaaaaaaaaaaaaattgtttgtatttaggggaaattatataaaaaaaaaatgaactagttagaggtatgttggacttaaagatttaataacattatgtatatacaaatactactccaagaaaagaaatgaccaattcaatatatatattatacacatatatatatatataggataatactatggtaggacctagcgaaagttccctaccggtagggaactttttttttttactgttgaattttagatcttatagttattataatgtaaggtatatactcttactataagac

SEQ ID NO: 386437 - DNA, 1421 bp, Cannabis indica
atgtcattacaatatcaattaattctatttagtggtgagacagactatcctaattgtattccaaacttagttctaacaaaagctattaataaaaaaaattggtcggacatatgttaattttgattagtggtcggactatcttgattttattatataattgaatttttaactagttgaacaaaattattgttattattattgtatatggtaataattgttttgtcatcgtcattcaataaaatttatttatttatgtgtcgaacgaggcgatgagctacttttatttttctactttttttttatatatatttgtatttctttccatgtatatttacaaataaaatttgagaggcgtttaacaatttccttacaaaaaattaataaaattattcacgattcaacaataaagattctttaaattaaaaaatttataggaaaacgaaacaaaaaaaacgaaaaaagaagtctcactaaataggaattttaatgacctattaagtgttaagccatttttagaggctattaagccatattttgtgttttttttttttttgaagaaaaatataatttttatcaaacctgttgttaatacgttgaagattaatatcgattctgtcattttttaagagaatggaacttatagcttcgcggggataattagagacgaaattggtgcgttggtggaggcgtttagctgctgtcgttcaggggtgctgcagcccgaaatggtagaagcctggggtgttaaggaggcgcggagttggattacggcaaatgagtggaaggaggttgtcattgaaacttatagtcttacagtggtgcaagcgttacgcagttctcttcctatggttttatactttgaaagtgttatttttgattgtaagatgatgttaaatgatttgagagatgtttatgtcaattttattagacgttctgcaaatagtgttgctcatttcttagctcgagcatcctatttagttgctgatcgtattatcaggagtagtgatgttactccagattttcatcatgtaatcactatgggttgcaattaataaaaatgatgattttatttcaaaaaaaaaacatagtctattacataaaaatatcataagccactagctctgaagtattaaaataatatgaagtttactagatttttattttgaataaatatattacaaatcacacctatcaatgataatcactcaaaactaaaataatagagaataacatgacaaattctatttaaaatatccaataataaatatcgatgaaccataaaacaaaggtcaaaagacacaaaaagaaaccgaactaacttgtgcatctaaatccaaaacgactatagatcaaacaggtatgtaaacacaccgttaataatattgatataattaagtaattaattttaatattttttataa

SEQ ID NO: 386438 - DNA, 748 bp, Cannabis indica
aatataatttattatttttcttaaaacgaatttatttaagaactttttcatttttacacttaaaaataatttttttgtatttttacggaattctacataaaaactcttattgcaattaacgctacaacctaaattgcaataaaaaatcgtatagaaatctctattgcaactaacgctgcaaccacttagaaactcaaaccgtaaattaagaaaaaaaaattaaaaaaatggtatatggagtaataaagaaaaataaaataagtgaacaatttaacttagttcccattaatgtaaggttgaatgaattatttgtataagccactaaggctagcttagtggtgatggaggaatgggaaaaagagagaggtcatgggttcgaacctaggatctttaagctatgaagctaatatatgattgtaaaataccattacgctatactcaaaaaaaagaatgaattatttgtattaaataaggaaatagggaaatattaggggttgttttacttggtaatttaaaagttatttttaattttttaaaatgaaaataacttttaaaaactaattgagtgtgtttggtcacattttgtataagcaatttttcgaaactcttacaaaaaaaactagaaaacatcaaatatttctttttttcaatttaattttcaaaaagaaattttttttttttatgttcttatttacataagaaaatttaaatttatatgcatttattagattaaaattattttcctaaa

SEQ ID NO: 386439 - DNA, 1107 bp, Cannabis indica
gttgtacattgcacagggatatcaaacatgacagggtttgtaatgggattggtgggagagttggtggagttggtggacaacgatggtgactcaggtactgtagtaacagtgggggtagttggtaagttgtttggagtgggaattggtggaatgggatgcacatgaagtaaagatgacagaggaggaatactatgtgatggtgtagggaagttagtgatgtttttatgatgtaaagactcggcatatggaaaacaagactcatgaaatataacatcctgagatatatatatatagccttttatctttggacatgcatttaaaacctttataagacatgctatagcctagaaagacacatggtattgacctatattgcaatttgtttttgttgtaaggtcttaggttaggatagcatagacacccaaacactgtaagggtgttataatcaggtgtggtgtgaaacaatttttctaagggagaaagattttgaattgtggcagtaggcattcgatttatgagatatacactggttctaaaagcttcatcccaaaaagataagggaagagaggcttgagcaagcaatgtaagaccagtttcaactatatgtctatgcttcctttcaactaccccattttgttcatgtgtgtaaggacaagcaagtctatgaacaacaccacactgttctaacagatttgtaaaggctctgaattccccaccccaatccgattgtaatgttttgattttaaaaccaagttgcagttctatttgggtcttaaatttggtgaatgttggtaaagcctcatctctagttcttagcatgtatatttatgtatacctagaatatgcatctacaaagctaatgtaatatctatagccatttgaagaattcagtggagcggggctccaaagatcagagtgagggagttggagtggctcatgatatgtcgtagtggaaaacaaaaatggtaacttataatgtttgccaagacaacaagctgaacaaaaatttgcatcatttctatttgaaattggtatattacaagaattgagagccaattttacaatcttggcagtagggtggccaagcctactatgccataaggaaaa

SEQ ID NO: 386440 - DNA, 943 bp, Cannabis indica
ttttttttttaaatatgtgcaattagtataaatttaaattataatatttaaaaaaaagatattttattatataattatatagccacaattaatataacataaatatatataaatgggacttatacaatccctcgcctcatttgaggtttacacacctcaaattggacaaaaaaaatttacctctcatcttttttaaggtatgttaaatctatattttaataatttttctcatttttaaaataaattattttttgaaaataatatttagaggtaataatgtaaaatgatacttttgtgtagatgtatcaatattaaaactaaatattttttcttttggacagattgtaatttttttagattacgttaatataatatgtttttttattgatttaaaatttgttctctacaataattagtttcattttcttatatttttttatgctctctttcaaggcattctttcatagaaaataattaataaataaaatatttatgctttcatctgttagtaatgacaataaaaatacctaatattttatgatttatggtgatttagtactaggattgcacatttatacccgaaacttgaaacccccccgaaacccacccgactcgaaacttagaaaatctaaaaaagaaaatgaatttcaatttcagtataccgggttcaggtgtaacccagttctgtactaggtttgggtgtaacctggttctgtactgggccaggttcgagtttaatatttttcgaaaacccaaaacttgaaacttagtatatttttttttattatattatatatatatatctttttttaattgtgaatttgtgtgtgttaaattgttaaagtgttagtttaggtaatatatatgtataataatatattgtataattgtattattttgtagtttttttttctttttgttagaaaagtgatattaaaaaaaa

SEQ ID NO: 386441 - DNA, 793 bp, Cannabis indica
gggggggggagagaaacgagatgaagcaagagagatcgggtagagaagagaggtttaggttttttctttctgtggttcggttcgatcttggacgactaagaacggtcggcgtcgagccttgccgtgattattcgacgaaaaagagagaaaacaagagagagagggaaggtgagctcgagagagtggggagaggagggaggtcggggtttcagggcttggggagaggagggaggtcccctagtctgttggtggctccgatgccgcacaagcaaagagaaacaagaagagagagatttagggttttctaagaagaaagaagatgaagaaatagaaaaaaaaaaagcatagtaaaaaaatatattttttaaaattttaatttttaaaatttttaatagtataaaatatttttttattatttatttatttttataatattaaacttttttataatattttaataattaatattacatggaccactaaaaatttgccacgtgtacaaacgtgtacacgtgggcagtctactatggcacttaacaatgatttttggacggaggggtacatagcaaaacagaatgggagtttaggtagttttgcccctaaaaaattaatttttgtggttaagtgttaaaaaatttaaagttcaagtagtgtagctgccaatatccctaaacaaaatattataaaacacacctttaacatttgactgtagaacagacctttaacatttgactgttttttttttgaataaattacttatatattaaaagaacatgttggatatttattttac

SEQ ID NO: 386442 - DNA, 535 bp, Cannabis indica
aaaagattggaagaaaaagggttgggatgagatgagatgaagaaatttggttatcaggaagagtttttggaggtggtggttttagggttgagaaaggggtgtgattttgaaattaaatcgtttccccctttttatttgtgtctgaccactctcgccgcggccatgagtggtctcgctgcggcgagataaaggtgaaaaataggcattcggtaatgcactttatggccgcgacgatggtgatgctcgccgtggcgagatgaccttcgaaaattagcccccggtagttgactttatggccgcgactggggttgtgcctgccgcagccactgggcaatgcccagcaaaaaaatttcttttctcttttttttttcaagttgaacagtacaaaaattaaagaaaattaatattcggtttacaagttcaataaacataagccaaaaagaaacaaaaataaagtaataacatctaaagaaaataagaaaattcaactaaaacaccaagaaaatttgggttgcctcccaatagcgttgtcttt

SEQ ID NO: 386443 - DNA, 1072 bp, Cannabis indica
gtagctttgttgacgctagggcccgagccaatgtcactatggcttgtgaatttctagcaaattggcctgaacgcagaaacggagaggtcaaggtgcatggcaagaaagttcctgccacatctgatgccatcaatgccatgtactgtttacctgactactctagagaagatcaacgcctgcgaattaatgaggaagaagagcaatttgatatggtaaatgttaccaagactgtgggatttccagggttacggttccatgaaaatgatgggcaggaagggtcgctcaatatactgtaccggtgtgaaatcaacctggtggctaaaacctggttgtactttgtgagtgctcggttggtaccgagcaaacatctttctgatgtccagatggatagactgaaatatgtgtacgccattttgaaggggtacaatattaacattggtcaagttatccggggtagcattgagcagattgttcagggagccacaggcggtggccttgggttggatggagtgattactgagctttgcgggacctatgacgtgcccaaattgcaatatgacaataaagtggtacgcaaagaaaaatggatgtcagcatggttaacaggctcaaggaacctcatccttatggacagccaccccctgatgcgcaatagcaaggctgaaggcggcaaagggagccaagtgtagaagaagaggaggaagagccaccacaacttctagggcccattcatccagcgatgcaatatactcatgcacagctgagttatataattcagcagaacaaccacatgcaaaactacatggtgcaaaggagtatctacgatgaggggcaagttaatcaacttaactctctaatcaccagaatgaacattgggattgaggaccctaactatttagcgccacctcctcgttttcacccatatgaccaaccgccgccaccaaaccctttctgataagggtctcaggtaagtctctcacctttgcattttatttacacattggggacaatgtgatctttagtttgggggagggacttaaatttttaatttttctgttttaattttctgttt

SEQ ID NO: 386444 - DNA, 624 bp, Cannabis indica
tcaatgggggacatcaaaataacatcccccaagctggccatgttggggaaggaaaattcaataatcctaggctaaatgctttggaacaattgatacaacaattgatggtggccaataaccaaaatgccagtgggtatgatttagatgaggagccagtgccttactctcctagaatattggccttgccatatctgcaaagattcaagatgtcgaccacaaccaagtatgatggaagtacgaatcatggggtacacataagtgacttccacacttatgcgtgcccaccaagtgattgatgacttgagatgtgagttacttcctgtaacacttattggagcagccaagacttggttcaaaaaatttaagagtcactccattacctcatgggaccatttctcacatgactttaagaaggaattccacaccgccaaggctaaaaattagaatgttcatcccttgccattgtgaagcaacaactgggcaagagcttaaaagcttatatcaactattttaatgctgaggccgccaaggccagagacgttgtgatatgatgttggcctaatgcgtataagagtcgcagcatataaaatagcatgtccctaagctaaaattgggagttttgtt

SEQ ID NO: 386445 - DNA, 586 bp, Cannabis indica
acaaccaccttatccagaccattatcccaggagactaaatttccattatcgtctttcaaactagatagctgattattccttctacgtttactagcagaggcatgaaagtacttactgtttttgtcacccgcttgtaaccataactgctttgatcgttggcgccaaaagatttcttttttatggaggatatcaaacagctgctgccgattttctttgtataatctcgtcccttctgcatctctccttcttttcaaacttttcaatcttttgttgcagtcctttagttgggctgagaaattaccaataccagtgttcccccacgcaaagagagcctccccacacactttaatctttctctgaatgtccacattaacatcagtcccccagttctcagttataatctgctcgcagtccgggttccccaaccaaaaattctcaaaccgaaatttccttgacataacacccaattttgaggctgaatatctaacaacaaaggagagtgatccgaagtggatacttccaggttatgcaagatagccaaaggaaataaatctaaccacaattgagacgcaatagctctgtcaag

SEQ ID NO: 386446 - DNA, 610 bp, Cannabis indica
aaagcatacacactactcgatctggcttctaataaagttttccattctcaagatgtggtgttctatgaacaaatttttccactaaaaggatccctcaacacacactccttggatcgattatttcctggtactgatgcagctactcaacctgctgctcttcaacctatgaccactactgcaccttcatccaaaattgcacctgtcgaatccacactagtgcctactgctgctgatacaacattatcaaaggtccttgacacttcccagccagcaataaccaaacatacaccagcagttgtcactgatgcttccccaactactgatgcacatcccattattccacagcagcctatcatcactaaagcaggtagaaaaacttctacaccatctcatttccaagactatatttgtcaatcttccactaatcatccattgattaaatatttaaactatgacaaattaagtgttcccttttgaaatgccattttccatgcatatactgaatgtgaacctaagtccttcaaacatgcatctcaattcattcagtggttaaaagcaatggatgctgaattctttgctcttaagaaaataacacttggtcggttgtttc

SEQ ID NO: 386447 - DNA, 780 bp, Cannabis indica
ttaatctagaggtacaccccttactccctaaagggttagtttaggggtataccccataccaccttcatggtccaagtcacacattccacctacatgagacatggttgatatagtgcatcttcacgacaccaaggctacccacacaccatcgaaggttaagtggaaggggtctcgagggtaccaccccgataggacaactatcaccccttcacattgggtcttggggttgtcacctttaagtattagcttctacccccaaagggggttaacgatcataccacacccatgggggatcctcatcgtcaatgattatttcatttattcaaatccctcaagaagttacaagatggttatgaacctgcaaaaataacgagatactaccatgagaatcagatttcaaccacctccaaaaactaaggagacaattgagatagctccactttggtcgcgtctcttaaagcgagaagcaccaaccttttctcctatataaagggtcaaccatgacttgggaaagggatgtccaaaaatttgagtacttagagaaaaatgacttttgcattgttgctttttgcattcaagagtgtgttcttgatattgcaactttgatcaataaaacacaaaggaagtaggctattaccgacatttatagttgaatctctttaaattatggtgtatttgtttacatttattgctaatacactgtcattattcatatttattgatagtttttggtttaaatctcatttattacgactctgcatcggttggctaaaaatccag

SEQ ID NO: 386448 - DNA, 2490 bp, Cannabis indica
tttttgtttttattcatatttttattagttggttttgggttggatctcgattattctcatatctaaaatcatgtaatttaaaagttaaaacacgagactgtacgatatatatatatatacatatatgaaaagtgagctttaggaaccttccacttagattaaattacatatatgtggcatgcattgcatgatgtagccctctagccttcgatcaattactatctagagtctagtatttgttttcaatgtttacacatgcggacaataactataatagagttgattcagagagagagagaatggtgttatgaattctcattaccattaacattgagtacaacaaatatgtatatatatacaacaagataggagtaacagaatcaagaaaggaaattactaaccaaaacagttggaataaaagaaatgactaactacctataggttcaatcacaattgtcactaacatcctcaacattatccctcaagccgttcgggaagcattctatggacatcttgctatagatcgaaaaaattaaatttgggaaaagtaaatgcctttgtgaatatttgagctggttgttcttcatttggaatataagacacatcaacctggcctttgagaacaagatctcgaacataatgcacacccaccatgcttagttcgagagtgaaaaatgggattagaagctagccaacacttgtgccccctaattgtcacactataatttaggcttgttagggagattgatcccaagttctgtacgcaatgaaaccacccaaacaagttctgtaacagtactagagagagccatatactctgactcagtgctagatctagagacaacttttttatttttggaaagttggccaagttatcaaatttcccccaagcataacataataacctgtgacagactttctgtctaagatgtcacaagcccaattagcatcagaagatccttccagctgaagccatttagcaactttgaacactagacctttaaataagtgcttaacataccttagaacacttttacatgcacaccagtgagaggtagtaggagcttgcataaactgactcaacttattgacagcaaaagacaagtcaagtcttgtgagagttaagtattggagagctctaattgtacttctgtatagtgtgagatccccaaaaggttcactatctttggtggacaatttgtaaccttagcacataggagtaatacaagtcttagaatccaacatgttggtctttttgagaatatctagagcatacttaacttgacatatacgaagattagagctcttcctatgaacttcaatccctagaaaatagctgattggactaaggtttttaaaagtaaattgaatgtgaagattgtttataacctgttggaaagcctgagagttataagcactagtcactaaaatatcatcaacatatacaagaattagtaacaactgattgtttttgttggagtagaagagggaattgtctaaggcaattttcaacttgtcatgccaagcgttgggagcttgtttaaggccatacaaagccttgtttagtttacatacatgattaggaaattgaggatcctcgtagccttttggtttctgcatgtaaacaacttgtttgagatcaccattaaagaaatcattgagcgctaacagcaagagtgaacataatccttatggtcctagacttaaccacatgactaaaagtttcaaaatagtcaaccccagcagtttgttgaaatctttgccaccaatcttgctttaaatctatctaaggtataccatcagagttgagtttaaccttatagacccacttattttcaatatataataaccatatctaaggtgtaaggaaccacaacccaagtattgttctatttaagagtatagtattcctcatctatagcacgtatccacctggggattttgagggcttgtaacacactagttggttcacaaaaatcacaattacatttagttatttcaactactaatactcttggtttcactataccactcttcgacttggtttgcatatatagggtgtaaggcggtagtgggttgatgaataggatgaggaatagagtcctcagtgggaacactagaagatatggagactcatgctgagcaaatgataggtatatagggtgacaaaacccaagtggaggagataaggaagatgtggagcaactagaggaaaaggcaagtggggaagtggactgagatgcttgttgtgtcaatgcctgaggctgaaatgaggcatgaggaatgggaagataggcaactgcaggaggagagacaaataaggtgccagaggtagtgggaaacagtgatgcataaggaaagcattattcattattaattttcataataaatatatcatatgagttgtttattttcacattaatattgctcaaataatagtaaaaaataaattttattaataaaaataccataaattaattttttttttta

SEQ ID NO: 386449 - DNA, 1033 bp, Cannabis indica
gatcaagtgagttagagcaagtcatatccaattccgaatcgagagtaccctttagatatcgaaggatacgtttgactgttttccagtgagactccagaggcgcatgcataaattgacacactttattcacggcgtatgcaatttctggtctagttaaggtagcgtattgaagggctccaaccaggctgcgatagagttgagggtctttgacaggatcactgccaatgctagataacttttctccaccagtcatgggagtgggcaagctgttggcaaattgtaacttagctttgcaaactacatctgtaatatatttagtttgagaaagatgtagcccgtgctctgttttagtgacctggataccaaggaagtagtttatgtcacctaggtcctttagtgcaaattggttgttcagttgagagattagaagagaaatttctgaattgtcactacccgtgattagaatgtcatcgacatatactagaatgtaggtagtgtggccattcagaaatctaataaagagagaagcatcggctttggaactgtgaaaaccaaggtgaagaagggagtgtcttaacttgtcaaaccatgcacggggggcttgcttgagcccatagatggccttgtgaagtttgcaaaccatgtttggaccttgttcttcaaatccgggtggttgttgcatataaacttcctcgataaaatcaccatttaagaatgcgttgttcacattgagttgcttgatgtcccaatgattatgcagagcaattgtgattatgattcgaatggtggggaattttacaatcgggctgaaagtttcagagaagtcaaagccatattcttggtgaaatcctttagctactaatctagctttgagccttgatacactaccatctgcattttctttaattttatatacccacttgcaccctatagcttttcttccaggtggaagaggtacaacagtgtaggtaccatttttctttagagccactgtaaagcccgcttagttaatttggaaattagcagttgttta

SEQ ID NO: 386450 - DNA, 1963 bp, Cannabis indica
tcaattgacgaaagactagctaacagagaaccagctgagggatgaccagctgacggacagctaactgaaggatgaccagctgatggaaggccagcagagggacaactagctgaggggcgctcagctgatgagttaagggacagccaactcagggatggccagttgagggacagtcagcttagggacgactagttgacggaaggccaactaatcaacgacgataagatgatggagggccacctgatgtacttgtcatttattgtatattcctatggtatttctccaactataccctaggctcacaatgtggcactagtctataagaattcttttaagggttcttgtagactatgtttggtgagcttcatctttacaacagttcttgtagactaagtttggtgagcatcatctttacgacttaatttttcttctcttttcctttttgttacccttcacgaggagtgtaagctttaggagttatcgcgaccccttttgaggttagtaatcactgtaatgagggagtgttagctcattgagctttctcaacctctcctatgattttcatcattttgttgagggagcctttttgcacttggcttttctcgacctcttaacttatgtaacctttccattgagggagtaccaactcttagagcggtctcgacctcttctctgccacccatcttgtttgagggagctttttgacacatgggcccttttttttgtaaccttttttatggtgtaacctcttcgttgattgagtattagttctgagagcattctcatcttcttatcggttaatcattagatataagacagctcatggccccttaggctgagctcgacctttttctagatttgaattgtattgggggagcttgtggcatcttaggctgcgcttagcctcttacgttgtatctgtgacacttagaacacaatttgaatgttaaagaatcaatacttctttttgtgaggtgtctctctcagagtcgtattcaattcatttttcattttaatattttaagggagatgatggttctgtgaaccgactcaacattttgctttaaatttttaagggagatgagggttctgtgaactgactcgaccttttgttgatttttttttatcccttcacatgctttaggactaattttgaggagcatccctctcattattgcgagtgctcttttttctagaactatcttttggctttcactcttttttggacagttaggggtggtcgatcccaatagtcttaagagttttttttttttactttggcaatttcaagtgacaagtgtaattagacatgttgagagggatgaatgcgatagtgaaaacttaccatctcattaatgaggtaaatatgtgatcgccaaagtacatatgttatgtttggagaccaactttagtgccttctttaatttagtttaatgtacctaaggtaaacttgtcattgccagaaatgctctctcgtatggtggaacttcatttcaaggagcatcttggatgtttgatttttatgagccataggttggaggcttcacttgaagcgttggcttatgagcgtcgagagtagcatctaatagaccttgtaagaatttgacgagcttcctgaagaacactcaccggtttcttctattaagactctatttcctttctcaagcggatgtattttttgctcttttgtataagtcgtctaagccatccaactcttttttcaatatattctcccacagtctactcccagggtgtaccccagtagctatagcaaacttgagttcatctttagataccttccctactttggtaactttggtgttgaagtaatggatgtagctttgtcaaatttcttgtccccctttcttcacaatggtgacacttgtaacaagcataatgttgtcgcatgcagcctgatgttgttggaggattcgtctaaaagttgcttccaagatgtgatcgt

SEQ ID NO: 386451 - DNA, 1257 bp, Cannabis indica
ttttttttttctaaaaaaaatagtaatatctaatatatattaaaaataaaatgacgagtctacagggttagaaaatgtcattgtgaaagattaataaagttagtagggttttctagatttggattgttcattatttctctagatgcattatgtacgtgtaatagtcttagaggatgaggatgtgtaataaatgaaagagtaatttgtattcatatgcttaaatctcttctttttttctttgattaaatcactttttaaaaatttaagatactaattaaatatctcatcattacatactaattaaattattattgtatataattttatacgtgtgacatatttatattagtttataaattttggggtcatgtgtacacaactttacatattaagatttaattggacttaaatttataaacaaaaaaataaaattaaggggcattaatattaacacaaaattaaatattaaaattctaaaaaactttgcccacaattaaaaaaaaaatacaaaaataataataaaattataaaaatagtatagactttttattatttttaaaattttatttacataaaatagtcttttagtgtatttttataatttatattattttttttattatttatatattatttattattaaataccatacaaaaaataaaaaataaaaacttaagtgaaaatgtacaaattttacaaaaattaatatttggtgtaattatccatttattttattcaagataagtgtatagaaattgttacattttaaagagtgtagaaattgttacacccacccatgcaaactcacgtgcaaccgcacgtgccatcccctccccaaatccagaaagccacgtgtaacctcctccttcttctcctacctctatcttcttctccaaaaccctaatcttcccccaattccagtaactctttccccaattcaacaatccaatcgataaattcattgcttaaatctccagcaacattcacaatcattacaaaaacaaagaaaatgttttctataatcggaataatcagtattcaaggcgccatggatataatcgtagctggattctccctcctaatcgctttaggtattttcctcttcatcacttttctcctctcttctctcgcctttctccaaaacgcaaatcgaatcgaatcgaattgattttgtttaattctttacttctttttgttttttctcgaataaaccattcctcgaatcccatccggatctgcaacaaaacccatgggtt

SEQ ID NO: 386452 - DNA, 927 bp, Cannabis indica
aaagacatttgaaattaaagaaacatctgaaatgagatctgagtgagattggagttatatagtatgccccttttagccgacagttaataactgtagactaaagtatagccgacagttctaaccttcgataattccaagctatgtgacggtgtagaattactggtaatacatagcgacatttataagctatcgaaaagtccaaactatagttgatagttttacacactctgtgattttattagcgatggtcccccaagaaagtattttcaagattgacatgaatagtggttttagtagtagtgtaaacatatctgtccctaagaatgtctactgccaatgaagcttcaattgtgttttaaaatctgatgttttattttttccaaaatcaaaagtatttgaaaggagacctcccaatcttattttgacagatagtattattgtgctattgtaatacccatagattaagaatcggattaacaaaccctaactagttaaatgtatatttattatggaattatattattatataatttattatatgtgaattaaattggaaaatgacatgataagaccccgttggtgagccaagggcatttttgtaattttgacccgagaggagtaaaactataaattgaatttaattgcatgcttatggactatattactatatagtatacttgctgtgtcctttttaaggtgttttctgacaagtcagtgcggtatggtcacaatcgggtatttcgagccgaaccgggttcgaggccgaaatacatttttgggatttcatattagcattttatggttgagtgaataacttgaaatttatttgagtattatgtgatgaaaatgacattttttcccttgatttatgtatatgtcatatataggccctaggggcattttagtcttttgacccattagttaatt

SEQ ID NO: 386453 - DNA, 1063 bp, Cannabis indica
accatgtgttttgctccaaaccgaatagttggggaaggagcctctgcaactgtctacaaagggtgtcttcctcatggtcctcaagttgctgtgaaaaggtttcaacgtgtgagtgggattggcagttggcgcaatcctttcaccactgagtttgcaacaatggttggttgcttaaagcacaagaatttaatccaactccagggatggtgctgtgaaggatctgaattagtgcttgtgtacgagtacatgccaaatggaagccttgacaaaatcctccacaacaaaacaaggtcagccattgtccttacatggactcagagacagaaaatagctattggggtagcttcagctcttacttatctgcaccaagattgtgagagacagatcatccacagagatgtaaagtcatgtaacataatgctggatgaaaatttcaatgccaaacttggggatttcggtttggcacaagtgtacgaacacagtcctggtggtgggggtggtgatcatgagtcgagaaatgccaccataccagcaggaacactgggatatctagctccggagtacgtgtacacaggtgtgcctagctcgaaaaccgatgcgtacagctttggagtggttgttttggaattggtaacagggaagagggcagtggatgaagatggtaagtctgtagttgattgggtgtgggagctgtgggggaagggaatgatagttgatgctgctgatgtgaggcttagggggaaagttaagaatgaggagttgatgcggatgttggttgtgggacttgcttgtgtccatcccaatcatgtcaaaaggctaagtgtgaaacaagctgcaagggttctcaaaggtgaagcctcactccctcttctcccaccatgcaaaccaaggtttaagcttcgacctgttaatgctgttccctctgaatcatcatctgctgcatctcagacctctaagaccacctctaacactgatccatttcttactcccatgagtaattttggatagatactgtttcaacaaaagtatgaaagtgttctagtgagagtgtaaagtgaaaaaa

SEQ ID NO: 386454 - DNA, 686 bp, Cannabis indica
ctctctctctctctctctaagaagtaagaaccatggttatggtttgataccagaggagaaggagttcgtgcgtgtttaattattaattttgtgttggagggagagaaagaagaaaagagaaaagggctgtaattgggtggcaaaatgagtgagagacagaaggatgaagatctggtctcgtatggtatggtgagagtttataacaagtgaggtgaggtaggctgcagatgatcctaatcacgttttattattttatttttatttttaatttttctgaaacaataatttttttcttttgtgaaactttctgaaataataaaataaatctaagtatctaacacgttttattttttttttcaatatggcagcacaataatgctaagattatgtttagtagagagggtggagagtgagatacatgggaagggtgttattgacttatttgcttttattttttatatttttttgtagtaacttatttgcttttgttttagtttgaataaaagggttgatttaatataactaaatttttattagattttgaactaattgttattgataggattgaattgtcatattaaggtggtgtttagttggaggtaatgaaataaaatagaatagaaagaaaataattttcaatccattcatttgtttggttgcatattaaagcattagaatgttattct

SEQ ID NO: 386455 - DNA, 4223 bp, Cannabis indica
ggacatagatcattacaaataagaaccaaaattaaaaaaaataaaaaaaaaaatacaaagactcacatacgatacacaccagcttaagtccaaactcagtatttttataataagcatgaagttttatatacctggcaagagcaacaaagtattttctaagtgatggacaaggatgtcgtgtggaacagctcgatagcatcgtgtccagttacgtagctgaggatggcttgagtaatagagttgtgcctggtaaaaaagtgagttgagtcaagatgcaaagcctctggtgcgaagagtgaaaattttgaaacttaaaaggcaatgcggatgctttgaatacttaatacgtgctaagtggagttccttccacgcaaagcgaacaacccaaatgattaaccaagatagaatttgaggatctcagatatggggagttgggaagattgtatcagacaaaaattttaacatccattatggcatgtctcgtggaaagtgcttattaaatgagggatctgctcaatcaccttgtcgcaaacttaatgtctctcgagacacgcgctgtacacgtgtgtactgttacaagctgaatttataacgctgctagtttaccatattaatcatgtccactatcaatgacatataagttaacgatcactcacatgacataatgcaatttcaagcgacgccacgtgttaaggaccaatcatgagaaaattggtggacattgcaagctcccataacacggggcgccccaaaaggttaaggagtaaatcttatccagatttttgcaaccatgacacgtgcaacctagcaaaaaaaattcaagcaaatccatagttaattagtgcctgcggctccagcttctgcgaagggcttccacgaaaagtacatccacaataaggaaagatcacatgaagaattaatgagcatagcgggagcgaaagggaaggtgtccctttccggttgaaaaatgaattatagaagccaaggccttctcttagaatgtctatagcgaaaaggcttaggacagttttttctcccatacagtgtcgcgagaggccaccacccatacctgtcagatcatagaagtgacagtaatgcttttttgggtacgacgtcagtttttgtcccccaatctcacgtcatagtacaagggatgtgcaccattgtacctgcccattatccagctgccatgtgaggagatgattcgaaaaggaaagaccttcgggcaatacgtaaagggtgttcggacagtactcatcttacctctgtgcaccgcacgatggagctgccacctaccgaatcaacggtcagatctttggcaattgggtcggccctgaagtaatgttgatcaataaacctcctataaatacccatatatttcatgaagaagggaagacctacaatgcaatgcctaaactatatacagttgtaatatgcaatgcttgcctacaatgctaataaaatggactaaggataataaatctgtgaaccacgtaaaaactttgcgtctactttttattatttttcttccttcttaagctctaaataatcggctttcaaaaatctcggtaaatagttctattcactcacaactaaacatgaagcattccaaacctttcatactttgaaaaatttagtctccgcacattttcaaagaaccatccaaaccatacgcactgattgtggtggtgaatatcgcaccctttccacattcttcactcaacttagcattctccatgacatctcttgccctcacactccagaacaaaatggtcaagttgaacacaaaaataagttgtggtcaaaattggattgacccttttagccaaagctcaaatgcctctacacgattggtcgtatgctttcttcactgccatttacttgattaactgtcttcgtactcacattctccgctataccagcccttatcaacttctctataataaacctcccatctatactctactttgagtttttggctgcgaatgttttcctttcctccatccctataatatttacaagcttgagttttgctcttctccttgcacctttctcagctacaatagaaaacacaaagcttacctctatctctatccttcctctagttgcattttttttaatcctcaggctgttttcaatgaatttcatttcccatatattccttctcaaccttctgcgccatcaaccaaaccacacatagttatcccatcgttgcctttctctatccccttctcctattcatatacagaatgatcctcctcaccctccgccaccttaatcacaagaattggctccttctcactcccctagtcactctaccttctacaaatcaccatctccacctctcctttttacacttcttacgatatccccttcttcttctaattcttctttttcttctcctctccccatcacattgatggcagatatgcaaaacccccatgaccctaccattaatcattttaattttcatcccatggttactagaggtaaatcgggcattcacaagccccatttgttttatagtgttgctgcaagaactccggttgaaccttctactttcaaagaagctagtattgaccccatgtggaattctgcaacgggtacagagattactgcttgtccaaacaacacacattggttcttgttcttcctcatcctggctggaaaatcattggttgtaaatgagtctacaatgttaaactcaatgcacatggtttggttgaacgttacaaagctcaccttgttgccaagggttttaacaaaatccctagtctagattaccatgagacattcaaccccgtgatcaaactgaactccatttgtttctctctttggttatctcttacaattgggttataaagcaactagatatccaaaattccttccttcatggtgacctcacagaaaccatttatatgtctcaactcgagggctttgttgatccacatcatcctcacaatgcctgttagttatctaaatcactttatggcttaaaacaatgacctcgggcttagtttctaaagttgagtattgatcttatttctttggggtttgttggtcttaaagctgatacttctctcttcatctatggtctcctattgccatcatcattctccttatcgatgtggacgatatcatcttcagggggtcctcttcttcatccattgatacattagtgatctatcttaacacccagtttgcggtcaaagacttgggcccattgcacttctttctaggtattcaagttcattgcccctcctttgggcttcatcattctcaggccaaatatattcgggatgtactcactaaaacttaccctctgtactccaaaccaagatgccacgatttacaatggtttggttggggccttagaatattgcacccttactcgtctagattttgctttcactgtgaaccagctttgccacactactaaaaaaatttacttggatgacacacataaaatgacagttatgtataaactgtcatattgtgttgaaaggacataccagatgacggttttcgtggaactgtcatacaagttataaacaaaattacatgtaatgaaatagttaatttaaattgataaatttatacatatttcttttatattttattattatttttaattttttttcaaattaatataaatgtatatttttcaacaatagtctatctaaaattatattggattaaattattaaaacattatagattacttacatatacatcatttttaaataaatttattaatagcatttctgttatccctattttttttctcatgacgtgacatgcttacgtggaaaaaattagtgccatgtagcagtacaactcactaataggaaggccaggtcagcacttaagcaaacgaagaccccggaactcaaacaggcatcaagtgataaactagctcactcttagcagctggacggccctactgtcgaccagccttgggattacaccatggccagctagcttggcctccacaggggccttactggccaagaggtgcactacaggttttcctggacacttctccacgtggacaacaacacatggattgcaaattgggccctaaaggcccaacagaatggctaaataataactagaatcaagggcacttggtgttttttaaatatctaacaaactatgcaagtattaagagatttgaactgtaaacctagggttttaagcctcctacataaaggccttaacct

SEQ ID NO: 386456 - DNA, 1344 bp, Cannabis indica
tatagaagtagaactggaacttgtagtagcaacagcagatggagttgcaccaacagaagccttggggcgcttagggaaacctccgccaaaatactctgtgggttgaaaaattattccagtgagaggaggctcaagattcttattcgaaaataccacattattctaagagaaaagaaccttaagattaggttagaaaaaataagcttggagtttcgttttttacctcgacaaaaggaaataatttgctccatgatgagagaagccaagttaatggttgcccctatagtgattcaaaaaagaagataagccaaatcttgagacaccattgtcttattggagttttgtagtgaattgctaggaccaaactgcattagtgagccatggccataagtaaagatgagtgatgcaaacactttgaccagcaagccattcaacttgttcactagtgagttcagtaagaatacaaccacgatccgtagacacttcatcactcttaacaccttttggcagtttcaaggctttgggaatatcatcttcaatgaatgaaaaccaatgaccgcaaacatagactttaccaaagaactcagattttttattaagcaattcatgagtcaaattagcataaaattccttaactatgtcatcaatataaccttcaaaaccagtcaaagtattctcccagtttctacattgaacacacttcacaatgccataaactctatgagcacttaaatcaaaattcctctcattttcaaatttacgggtaacatataaattccaatcacgctgattgtcattataaaaaaatcttgaatttacaacttgagaggaagagaggttataagagaaagagcccttcataggttgttttccctttgctgctgctaaagcagattgaggagttgctgctgcagattttggcaatgacgattcaggatccagatcaacaagttcttccccaattttagttgggacttcctcactttcaaaggagacaacatcatcttctacataaattgctttttcatatgaaaaagtctccgttttggaatcggattcctcaaaagacacttccatgggatattcttcttcatcatcactcaaggaggtcgaggaagtattaagcttgagcttttttagcagcaagaataggcctttcatgacacctttttatttgtgcttccttttcaagagaggcttctgggcatgggtccaagatgagggaccttttggggttgatgctgcagaagcatcaccaatagcagcatgtggtgactgagaaccacgagaaagagaccagtttcatcaacatcatcctaaaaaaaataatacaaaaaattataa

SEQ ID NO: 386457 - DNA, 1268 bp, Cannabis indica
tttttttttatgggaaaattacaccaaaagaccctattattctaattttttcccacatgacgcgatatgtccacatagccaagattgatgccacgtagagtacaccttgttagcaagaaggccaagtcaccatgcccaacgtaccccttgacgaggagtccaaaatattcaagtggaagagacaacaaactggccaaccaagggggtctggctggaccacccctggccggccctattgccagcataggctagccagccttcaataaagagaaggttgaccagcctctcctctggcaggcactttttatgcctttgcagctttaagcttgaacaacacttccagctacaaattgggcttcaacaacccacgaatataggaaattaaattcagttatttacccagtcttggggactaattaacatgctatttacttattattttaatgtgcaacaaataagtgatatctcctcattttaagggatatcaacttactatctcttgtaagctctcctatataaagagtactaaactaaacctaaaggctttacgctctaagtgctacatgctaagttccatgctctaagttttgaaaccctagcaccctttcttccacacgccaatagcagtgtagaagggaataagactctctcatctcatctacttaagatttatcacttgattatcattattgtaatcttaagaaagccactctagaatccacaatacttgtaaactaagtggaattatctctaatatcaatacagccaaaaagaaagtaggtcattacccgctaactaagggggtcgaacctctataaaaatattgtgtccttttcatttgcttgttcttattgtgtaaatgtggtgatttcagtcataaatacaactccactgtcagttggccaaacttgaggtcaacaattcggtgcttttatttgagagtgttgtcgattattctaatttatcaccatggctattacaaggagaactccggctacaactcctgcctcattgggtcttcctcaagaccctatgattgctaattatgaggtttgtgttttagccaccattggaatctccacaagctcaacggatgtggccaaccttgccaacctggaaggcataacaaacttgaccaacacaattggtcaggtcaaccttgccaacgtaattgatcctaatgacgagtgtctgtcacccagggtagatactgttggatttattttaccaggatctagatttactaccatgtatgtttcattaacatc

SEQ ID NO: 386458 - DNA, 1507 bp, Cannabis indica
ttgctccattaccaattcgaatcctggcccctgccttaactagaccttgagcctcaaagatgctacgccatacaaagctcggattatgacccaattcagcagataagaaatcacctttggagtagtatcgggctttgaataaccgagccacaagtgagtcaggccgagagaggagcctccaaccttgtttactaagaagactcacattaaaatctcgcaaatttctgaaccccatgcctcctttggatttgtgtaaggtgagccgatcccaacgtttccaatggattcctttgctatccttagaagaagatttccaccagaagttgcacatcatttgttccatttcattgcaaatttccttagttagcaagaagacattcattgcataactaggaagagattgggcaacagttttaataaggagttcctttcccgctttagacagaaaacgcccctcccacccttgaatcttctttcgtagtctttccttaagaaaacccagcaaagccgtcttattcctccccacaatattaggcagccccaagtacgtactattatccccagcttcagacattcccattcttgagcaaacctgtgtgcgagtattagctgtagtattagagctgaagaaaatagacgatttatgcacattaacttgctgccccgaagcttgctggaaatgacttaataattccatcacattagaagccgcctcctcatttgccttgcagaaaacatatgtatcatccgcgaaaaacatatgtgagattacaggagcacttcgtgccaccttacaaccccggatcttccccaacctctcataatctttaatcaaaagagagagcccttccgcgcacaagataaaaaggtacggtgataaaggatcaccttgtctcaaaccccttgagggaatgatagggtcaatgtcttgaccacttgcaataatcttatatgagaccgaggagacacatttcattaccaaatttacccaatgttcattgaaccccagcttcctcaacatggcttgaagaaaaccccattcaacgcggtcgtatgccttgctcatatccatttttactgccataaaaccatcctttcccgaccccttcctcttcaaataatgcataacctcaaaagagattaatatattatctgttattaatcgacctggcagaaaagcactttgtgtctccgagatgacattagggagcacaccttttaacctattagccataactttggaaataattttataaatgacattacacaaagctatcggccttaagtcactcatagtttcaggggaagacttcttaggaatcaaaactatgtttgtatctttgaggaaatcaggaaactcaccaaacataaagaaatgttgaactaaccgtaccacatccgcccccactacctcccagaatttttgatagaaccccggattaaagccatccggacctggcgacttgtcaggatgcatttggaacactgctttcctcacttcagccgc

SEQ ID NO: 386459 - DNA, 649 bp, Cannabis indica
gtaaaaattaaaggcatcaagttgaaaaaggtatgtaatataatttcctcaataacatttaggtcttaattattttcccaaaaataaatttaatttttctcatttagggttatatcattttctatatttaccatttaattttattccaattaattattttattatttatttatttaaaataaaataaaatttgatgtaaataacatgctaaaaggaatgttaaaaatatctttcctaacaatacgtttatcattgctgggaatactaagtattccccataattataaattgttcgatatacttagtattcccaacagttataaatattaaaataaaatttatattaaatataaaatcatttaattaattttacgcgtatgaatatttcatatttattacaatcgattctaaattaattatttaatacatataagtattctatatatgtcagttttcgattcaccaattaatttatttctcgatttgatttattaaattaattgtcaaagtattctgacaattaatgtgactctcctatatataaagggtaccgctccctgagttactcactcagtctgtgtgacagtcagtagtcccgtgatccgtaaggggaaacaccgagtaagctgtgcaatcccacaccgcctgg

SEQ ID NO: 386460 - DNA, 1348 bp, Cannabis indica
gttcatgataaaactggaacagactaatgtggtccaactgctttacatacatacctgtgccccgggttaccatagggatgccatcatatgtcgcattacgtcaaaattgatagccttggacagtaaggaactcaacccaacaatacacaaagcgaatatcagcaacttgtgcataagtatcctcaaagttgaacatagaaacaatatcatcttccccttctatttttatattagcacatagttcctctagatcattgatagtatagctactggacgccataatcaatagatacaaaacactaagaagaaaaaaaattaaagaaaacctctcaccatgtcagaaaagactacaaaatctctctattcactatttaattattaaatattatggaaaaaaaattaaaatgcattaaataaggaaaagaaatcaaggaaaaacatgtttttcttttttaatttggcatgacacattagtagaagattgggttaaaaaaaactctgaaaagtcatattaggcctttttaatttttgagccctgtgcattaatacttcttgcacaggtaaatggtcgcctctgggtccttgtattacattccaataaagttgtaataatgtcttgaattttgttttattgtaataaaatctctaacaaatagttaaaataaaaaaaattataataatgaaagaattaagtagagaagatgtaacgccctaaataattaggcacgctacacaagatacttacgaaatcctaatcccctaattgggattactaataagattagcgctaaaattaaactttaattataaacagaattaaaataaaacttgttacaatctaaaagttacagaagttgggatcccaaaaatatttacaaaatattattacaagtccttttcttttagccgacctaagcggcaaaacagggtctcaaaaatacaacactggtagacccccaacccacttgttctgatatggctcggacatgtacattcttcgtccaactcctgcactcatggctgatcaggaatagtcttaccctttcctgcacagtagagaaaccatgagccaagcccagcaagacaatataaaacatatcaacaatatgctcatcatataatacaaacaacaatgtcatttagatctgtctgtgtgacacagacctgcatgttgcgctcacatgcctatttatgtttacgtggcgtaaacctacgtgttgctctcacacgtctatttacaataaggccttagaatggttcttcttggttctgattacagtccaacctgattatgccttaatcgcataatccaaaaatctcaatataatcatacacttagcatggcata

SEQ ID NO: 386461 - DNA, 1423 bp, Cannabis indica
tgataatatgtataattatattaataaaaattactaaaataatatcattttaaatatatttatatatatataagttacaataatttttatcatttttttatttgaataagttacaaaattctccaacatgatctatagctaattcaagtcaattaattcaaacaacaaaatgataaaaattcacttattaatacaaaactatataatctaaaactatatatgatcatgataaagtgataattaagtaaaaaataaaatacgtacatgtaattttattttttgtgtacatgatattttaggttttgctcccattattaaaacgtaagtaaattgtgttatttaggtttgctccccattattaaaacgtagcaagcaaatattgtgttatatattagggtttgcggccatgcatcattgactcatcatgatcatgctcctcactttgggaagtttgggaatgagcgtcaccatatcctccaccgccatagcctcctccatagccaccacccgaaccatacccgccacctggtccaactccaactccaaaacccccacccttttctcctggaccaaagccaggaccaaaacccccacccttttctcctggaccaaagccaggaccgctcgggccaaaacctccactacccttttctcctggagcagagccaaatccaccacccgagccaaaaccaccaccagggccaaaactaccgccaccaccacccgagccaaaaccaacaccaacaccaataccacccccacttgatcctgctccataaccactagtagtaagtcctcgaaccttatcatgtttaacgtcatgatgatgataatcatgagaattatgtaacatattgtccatgttaccattgttcatcatcatcatcatctgatcatctctcaaaaccctcccttctcttgcagctttaatagttgcatggcaaaagaagacgagagcccacacaaccaaactaatcctcgtcatgtaggtaccttgacgaaaaatgaattaagaagaagaagagagacacaaatataaggatcacattacaaatattaattgaaacaaatttcgttaattaaagaatatcataaaatcttattaccttcctttggccaaactgtcctacgacttgtgatgaagtggattaataaaataaatatatgtattgtaaagattacaaatttatggtttaaagtttaaggtctccttattttataggcaggagtgatgattttggtggtagaggagacttgcatgattttggttattgagtttcttttgctatgaggtttatatttagtgagacaaatgcatgattttgtgaagtgtgtgagcttctgagtatggtggcaaagaaaacttgcatgatttcatcatgacataagtatatgtaaatgttaaaaggtattattggtgctt

SEQ ID NO: 386462 - DNA, 713 bp, Cannabis indica
ccattctttttacaattcttttctggattggttaacctttgtttgtaaggctaacttctcccattctttgtaaatttgttggtgttgcttaataaaagtttttgttcaaaaaaaaaaaaaacacttcgtatatatgtatatatcagtttcaatacgttcataaagttattctaattctaattctaaattgcttgttgggggagcaggtgaagagacgatttgaaagtggaagaaccttcgacgttggccgaactacaaattcaaaatcaacaagtctaaatcaaaataatatttatatatactttttaaatcaattgcaatcccaatttcattcttctgaaaaccctaattctctatcttcaacatctgcattagggtttcctttcagtctcccaaaaccaatcacagccatggaagataactgtgccgtctgcgctgacactctcgagtgggttgcctatgggccctgtggacatcgggaggtttgctccacctgcgttgttcgcctccgcatcgtatgcgaggatcgccgctgctgcatctgcaagaacgagtccgatgtcgtttttgtcactaaggtcaggctttacaaatatttattaatagagatcgatttcccatgctttgaagatcaattcgatttctttacttttgttctaatcattgcagtttcaaatctttttgtgttaagatttttgtggatcgaacttttt

SEQ ID NO: 386463 - DNA, 932 bp, Cannabis indica
ttgctagtggcttagtgaggggtatccattgtgagattccccgtaggaactatcaggcgcactggctccctttgggtttgttggcatggtctgagtgccacattgaggatggggcggtgttaccgcttcattagtatttcctggacatcgctgattacttgaggatgtgtccagcacaactcacgctgaaaagcatcaagtatctttcagtgatgttttcttatatagggagctaaagtggcctcagcgtaccccttgtaagatcggatactactttgatctgaagtcttccctgaagtagtataggactgggtatttttatcgcagtcagatcggtcaccaatggttgggtgacactaattgcacagccatgtcgaaggtcagtgggtacgccaataagtactttatcgtctattgcctccgtaggatcgggcactacgaattctgaccagtgtaattcttcaaacgctttatcactactttgcaaataagggatagggtaaacaacatcctgtctctttcgataaagcaaagaaatataatctggttggctagtgtggtcaacttcttgaagtatggcttgtatcctcctattcctgaagttgcaggagcactagctgtagatggggcctggcttggagatgggcaagctcctgacttggatgatgaggttcctttatcttacattgtacaaaatctagagaggaaggagagggccttccgtcggtgcatggccatgggggtccaattgtgatgcttctctgcatgtcaggcctagaggccaagcttctaagggacctactcgccccgtacctgaatctagaggcaagggcaaagtggtttccaaggtctctgatagttcatattttgatgatgatggtattgttagttgataacaccataccattatcttgtattgaatgtttatgatt

SEQ ID NO: 386464 - DNA, 442 bp, Cannabis indica
tctcttatttacctcgtacttattgccagagcaaaataaaatttgtgtagggtacctccgtatgatccacacatggcatggtggccacaaggggtcgagttagaatggaggagaccgctcagccccttgttgatgtgagccaaagatggactcaggagctgagagttcttatgcagaatctaagctggaggaggttgccctagtgaaaaggaggaggtatcggacttgttgtgtcctctgtgactgtcccttaggccactatgacgcctgaggtaatccactgaacgggcttgctgagccttcagagctaggactgttggaatttattttgccaggatcttagatctacttcctttctgtcgcagagtactatcaagatctgagcccgaatgtccttccctttgtgtgtgatccttcatagtcttcccatctatgattgagg

SEQ ID NO: 386465 - DNA, 1587 bp, Cannabis indica
aaagaaaatgtatagaacgccaagaaatatactggtttacatcaaatattattgatgctactccaatttcgcctcatcatctagagcaatccactttaaaagaatcatcaatacaattatcacagttgagaagtatcttccaacaatagtaaactctcacaacccaaactttccaaacccaagtcccttcttactaccctctcaacccaaagtttctctctaacaatgacttaagggcttgtttgtttggtacgctgtattgtgttggattagaatgtaatagtattatttaatacaatattatgtttggtattgatttgtattaatagattgtgtaaagttataatattttcaataaactcgatcccaacactgactacgagtcgggtctaggtctcaggttcgagtttggggtctgggcccaaggtctgggtatgggtctaggtccaaggttcgagtctaggttcggtccgcgtctgcgtctgcatccgcatcctgggtccgagtcttgagtacgggttcgagtgtggatccgggtcccagatctaggttttggtccgcatctgagttcaggttcgggtctgggtcttgagtttgaatttgagttctggtcacaagcccaatcggagattggagttgacctcggatcttttgtaaatattataatacaagctaatacaaaccatttgttatgtattaaataaaacaacttacattgtaaaaaattttggtcgtaataattaattgataggctagttttaggtgcacttaataaagtattttatatgtgtgtttcaattgattatattcattttgtgtagaattacaaaaattttctatttgtttcaggtttaaatggtaaaattcataatgtgaattgaaaatgagaataaacatgttaatgagatgaatatgatgaactaacatggaatttggagttctagaatataagtggtgaaaaattataagttttagatgctcaacacgctccgtttgtgatcaaaaatcaagtctgaagcttcaagtaaattttcaaccataatgcattcactttgaagaaaaataatgtgaataaaagttgtaaatttttctttcagatttctaaaccatcttgaatcgtccaattttgagaaatattaaaagagttatgactaaaattttattaactgtcgcactaggaagcttgctggcaaaaatcgaacttcaagtgtcgtgacactacaaggtagtatcgcagcccgcctattttaaactgaaaaaaataggtttttttaatcttttttagctttataaagactattttcaacacttagatgagtttattatcattaaaatgagtacccaaataatagaagccatccgagaaattctttctcacaagacaagccttaagagcataaaatcccataatctcgaaaggggtcagacactcccactctaagatatgaaagagcaacttcaagcatgccaagatcctataagtatttgggatgagctgaaaaggcacaacctcaacataattatagaaatccttgaaatattgcctaaggggaaggacatcccttgccttaatatgctctacactcc

SEQ ID NO: 386466 - DNA, 638 bp, Cannabis indica
ttagaaagaaaatgtatatatataattaagtaaatctaatagcacacatttatttttaagtttaaatctaatactaacacataaaatatcacacaaatcatcaatggtatattcttttcattattaatatgggattcattctttaatacaaaatatattttgtcaaatgatattcaaaatgagatagtaaatattaatgagcactagtataatattcatatccctaattgggtaagaccactttcttaattttggtaagattgactttttattttctattaaaaaaaaaaaaatcctctgaaaatagaagcacatgatgatgatgatcatgatgatgtcctctttatctttggtagcaaaatgggttggtggtgatggtgaagtcattttacaattatgatttatctcaactttaaaactccacaattcatggtttcaattcaattggtttcaagttattacaactttaatttgtgaaataataataataataaccttatattaaaggttaatataaaaatgtaaatattgagtcaaaaaatattaaaaaacattatggaatttgacatagagaagtgattaattacaattacttattataatttttttagtcaattttcacgtttgaaatcatataa

SEQ ID NO: 386467 - DNA, 2285 bp, Cannabis indica
tagttgagtctacaagatgatatctcaaataattttgggaccatgggcctatgtaaccaagctcctaataattagatcttgtaatttaccaagtaaatttccaaacttattaattcttcctgactccactatagatatgatataatttatctattgtttaaattaaaataattattgattctctatagatgatttacattgagtaggaacaaaattattgctttaccctttaatgtattttatacttaaaacacttagctacttgtaaataatatttcaggaaacaaatataattaacgaaatgatcgttctatcattgaatgcctctagtaaagcgaagaagaaactatcattttacttctaatagacatagaagatatagatgtctaattctatgattaacactcttactcaattgcactaccgagttcataagatgtaagtatgggttagtcctacgggtaatttggtaacgaacatgactagtgcattacaattaagctagagctcaaccatctcaggattgagatcaaatgatcaatgaaccactactttatattgacttagaaatgatataatgttaagtttatgataacttttccactatcaatctcggtttaatctgaggtataatcaatacatcttatcctagtttactttactattatcatggaaaagacattgcatttatccaagtgcatcaaacctcatcgataaatttcacataattgtaaatcaagtgtactgataaatcatgggactaaataatttgaaccatataattacaattactttccactatgatgacatcactaaaattgtgaataactatatgttcagaatttaatataacttatatataaaacttataatcacataataaacatgtgaacaaagcgaatacattacaaggccaagatatgatctttattgaaagtaaataataatacaattaaattggacttttttagacgtaaaatttcaacaaaatctaacttgcactaatataaaactaaaagtacatttcaatttaatctcatatacttgatgtatttatcaaatatagtatttgacattgactacgtaatagtatctgatagattgtatttattatcaaccttatccaccattacattctccttaggcacaaagttcatgattttgtgaatttcctatctatatgttttagtcctcttaggatttaggattctttactgtttggaaattttatatgtgttgtcatgtagtaaattattctatatttggaaataatgccaaaatttgcatcgcactttctcgggcatgtataattccctaaatgccttgagggcaactttattgttcagccttactagtagagttagtgatttttaaattagtttttacatttctccaaaattcactgctccactccaaaagcaatcaccatctctgatgtatagactttttagtattgacataattcttaaaattttatttggtgtagcttaagggttttaatacatactcctgataaactaacatgtaggtcatcttcttgtattttaggatatgtttaattatcttcaaatgttcctatcctggatttaactaatacttactcataactcccactcaacagcaaatatccgctttagtgcatattagagcatacatatgaccttctactattgatgcttagggaattcttttcatggactttatcttttttggaatggttggaaacttctccttagataaataaactccatgtatcctccattagagttagcaatttgaaaaatgctctacatcttactaatatagagaacaagtaatttgttttacatgccttgacaaattctcaatcattgtttccaatgattaagataccatctaagtaaatcattatgtataccacaagcacaagtgtcttctaagccatacttaggtgagtttcttaaaaccctctcactacgacaagatactatgactttctatttaaaaaaaaaaagtggtataatcatctttagttgtcacaacttgcgttggttcaataaaggtaatgggatcaccccttaaaaggtgtagaatatggtggaacacttctgaatttaaatcaaacagtatctccacaacttttttacttttctttgagtttacaatttatatagccatgttcaagaaagataatatttgtgaaaacaaatactttcttatttttatgaccatagtgtagtccaccactagccactttagaatagcaaacaaacatgcaagtcttagttagcagttctagcttttct

SEQ ID NO: 386468 - DNA, 2451 bp, Cannabis indica
atagtctagataaaattttcccaaccaagatgaaaagatacaaggatagagggtctccgtgtctcaaacctcaagagggtctaatcctaccaacctaatccccatttagatgaacattgagagtagtggtaaagatgcattgatcaatccattgacaaaatttatccgagaccccaaaacaccttaagacatgatcgacaaacttccagctaagcttgtcataggctttcataagatcaattttgattgcaaagaaacactctctgcccttttcctgctaaaagagtggatgatttccgggactataacattgttgtcttgaatataccttccaagaacgaaggcagcttgagtggggaaaataattttaggcaggatatgcttaattctatttgcagtgatctttgaaataactttgtgagaaacattacagagagaaataggcctaaaatggtgcgtccttttcgggttttgagtttttgggatgagaactaagttagtagcattgatccccaagtgcatagtgttagtgtgaaaaaaatcatcaatcatttcacaaaaatcaccacccagaatttgccagtagtgcttaaaaaagagaacagacatccgtttgggccaagggctttattgatacccatgctaaaaagagttctacgaatttctttagagtttgagagtttgagaagctcttcctgatcaacttgtgaaaggcgatcggggattaggtgggcacaattcaacctttgccccttgttgctatcatggaatatccccttgaagaactttaggaattccttactaatctgaaacctggaatggagccagtttcaattttttttccaggatgcttttgatagctttccatctccttctgaaaataacaacgagaaagaattttttttgaacatttattcccctctttaatccacaagatttgggctcgttgtttccaataaagagttttcctctccagcgccctgttcaatgccaaacggatctcgagttttgcttcccagtctctagtccccgtggggagattttgcaacttttccagtttagcttcaagatctttaatagtcgtgtcaattttcccatactgaaggttgttccactagatgaaggtaactcgagtggcttctattttttaaacaatttggctggggcccaaggaaagataacctagtcccgcgcatgagttaccactaggttacttctttcatccctagtccaagcctctttgaattcaaaactcctattgaactttgcatcaatacctccaaaatataagcagagaggtctatgattcgagttactagtatgaaaggatcaaaggactgctttggggaagagtaagttccatccctcattaacaagggccttatcaagggcatattttacatgggcgagaccaaaccaatgattatcccaagttaatttatccccttggattaccaaattaataagaccccgagaattaaccaacttcaaaataatagggataaaaaagtcctccctttagaaccctccctctcaaaatcattgagcacaaaatttgtatcccccaagattagccaagggccaccaaatttgtctcctgtattcatgatctcttcccaaatttttttttgagtggaaatacggccgaccataaacacaagatagaagccataggtaggtagggggtcgggaatatactaaactctatatttaattactagaacagttgatacattcaaaaacaaaacccactttccaggaaaacatgataccacctgcataaccaatggcaggaatagtgatactaaaatgaaaatgaaggcctttgagaatacgtaccagatgagtagcattagtttttagttcagttaagaagatgaaatctgaatagcaagactaaactagtgactttaactcgcaaactgtagaggtctgtcccaacactcaatagttctaagccaatcctctcatgactcatgtggaggagatgagacatcctcctccataggggtaccagactaagcaaaaacacgagaaccatcatcatccccaagggccgaacaaaccatctgagtattcaaatcattgagacttttccttagtataacctccaaggaacattggttaagctcaccataggacacatcattactggacccctcttcaacatccatgcaatcatgagttccatccacacccacaaccttttttggctctctattatcccaaggaaagtcatggaccactcccgggtgctgactgtaaagaccgcttagctttgttttggaaattagcagataatatggtttaattatgaaattggaatatcagttatgatttattattttctggaaatttatttgaattcaggatgcattatttatgtcatacatgtaatttatgtttttgcatattttgtgcccaacaatattggaacgcggtgtttggcca

SEQ ID NO: 386469 - DNA, 677 bp, Cannabis indica
ctgtcgttcgtaaacgtaaaaaaaaaaaaaaaaaagcgttacaatcactcaattacttaatcacataatcatgcaattaattaattattcatataaagcctcagagtagtgatgatctagttgatcaagatgaccagtttccacattatttttgattcgtctaagaagactgagtaatcgatctagagcagaatcagcatcttcatgtttcaagaattcctctgcaacttgggctggagtgacttgtacttgttcgagtaaagctttaatttcagaatagaggtgtttgtggttgtgatggtcaccagagatttccaagtaatttgtggccaattgcttgaatgcctcgtacgtacaatagcccatgtgaatatgtacgtccattcgaccaggtctcaacagagctggttcaagcttttctttgtggtttgtggtgaatattatgatcctttcatctccacaacttgaccataatccatctatgaagtttaacaacccagataatgtcaactgtatatcaaacaaaaacaattattaagtcttgagttgaaatggatcttaagaaaaatataccataaaaaaaataaaaatataatgtaaaacaaaatatatataccaacaacctaaaacaatccttaaaaattgaaaaaaaaaaattggaaaacttacaaaaatac

SEQ ID NO: 386470 - DNA, 1521 bp, Cannabis indica
cctctcccaactcatccaatgtacgcacttatctttcttggaattagactgccaccaaaacttacacatagcacgctacatttccttacttgtttcgtttgataaaagaaaaaccctcattgcatagttcggtagagcttgagcaaccgtcttcagaagaacctccttaccagctttggaaagtaattttccttcccaactttgaacccgtttctgaactcgctctttcagatacccaagtatggttgttttcttttgaccaataatatttggaagacccaaatatgttgtgttatcgtcagcctcatgagtacccaagtctccacatatagcatctctactacccacataagtgttgcgactaaaaaagatagacgacttatcatagtttattttttgacgagaagctctttcaaaaatgtttaataattgcaggacattatgcgactcttcttcgttagctttacagaaaatataactatcatctgcaaagaatatgtgagagacgaatggtgcaccgcgggcaaccttaatgccacgaatgagattacgctgctcatattgtctaagaagtgcaaaaaaatccctaagtgcaaattataaacaagtaagaggatagtggatcaccttgacgtaagcctcgacctggaacaattcttccaaactctttacccgcatggctgacttgatatcttgctaatgaaacacacaccataaataaattcaccatatgatcatcaaaacccatttgtcgaagaacaactcttaagtatccccactcgaccgtgtcgtatgccttgctcatgtcaagcttcaaagccataactcttttcttccccgaactcttacgcttcatgtagtgcatgatctcaaaagaaaccatgatagtgttagttattaaacgggcagcaataaacaacttttcatttttaaacatatctatagtaaaatattaatgaatgagtatagtttagacataatctgttggaatttattttatcaggatctagatttactaacaagtatgtttttaacatcctaaacatgaacttctaaaactatatgaaataaacacatataaagttttagaaaccatacagtgggtgcagtggaattataagggctccttccactcagatctctaacccttgtatccattctgtagcagagtatcacaaagatctgagcccgattctccttctcttgaatttggattcttcacagccttacacactatgattgagtaccacttgatgtatgtgggcacttactctaatcactctagggtttcggttttgaagagagaaagagagagagaggatttcgaaaattggtagagagaagatggctcaaaattttactgaaggaaagtgtttgcatcatcttttcctttgaggccatcactacctatttataggaaaccacctagggttaggttaaatttatttggcattaaaataataaaaaaataaaatggtaaattgctccttaagtggccggccatggatattgggccccact

SEQ ID NO: 386471 - DNA, 1071 bp, Cannabis indica
aaaaactttaattttcctaattttatttatttggtcatatggtaataaaaaagtaaattctgacctaaatatagttatatatgaaaaaatcccttataataacttatttattctattccttaaaataaattactaaaattatattttgtatattttataataaacttttattagctttttatcttttttctatttctccatatcatttaaaataatatatttttcaatgtatataatacatattaataaaattaaaataaaatataatttaaatactattaaaatatatatcttttttaaaaatgatctgagttcgaagaaaacaaaaaccctttaaattagaaaatccatttatatcatatgttgaaagatgatttttccacccttttttaaattttgttgaagaatctcttttaaaggaaccattgagagtgctcttagttagatcatatgttgaaagattatttttccaccctttttaaaattttgttgaagaatctcttttaaaggaaccattgagagtgttcttagttatatatacctatgtataccaatagagatctcattcaataaatcatagaagaacggtgaagttagagaagattaagtgatattatcactgccatatttacatatatttgccttccctatgaataaacgtacaagtatacaatctaattgatattgacagctaaaaagaaaaacagtgcaccttcactctcccacaaaaaccaatacgatcactaacataaaccaaaccaacaaacaaattaccccttattagagatgttctacaaatccaacaccagtaaaaagaaaaatcatatgagcagcggcggagccaggattagatgtgtagggagccaatatactcttcgagatcttaaattatttagtccccatataaaataggattgatattattttagactttgtattttataaaagttacagattaaattctttattttgtaaaatgacaaattgaaccatgtattttctaaaatagtacaaaatactagtaccctgagctcaatttgcaataacttttttaatataactaactgggag

SEQ ID NO: 386472 - DNA, 3811 bp, Cannabis indica
ttcagtgccaatgtcaagtaattattacctattaagttttctattgaattttattattaacaaaataacattattaattttaatattaattatttatttatatataagctatatattattaaatgattaactttatttttttatatttaattttttaattattgcttatattttgttatattatattttttattcaaaaaacatattttattatttcaaatattaacttattttaattattaaaaaattactttttaattattcatagaaatatattttatttttagttttatttcattaagagagatcgcatttatatttttttatataaatgaacataatatataattttatttacatatctttttcattatattttgattttaattaaattttctattaatatatttttatgttcattttaacactatattatttaaaaaaataattacagatttttttaattaatgtaaagttaatattactattaagttaatagcataacaatattatttcttacaaaattaaataaactataaattattattcaaaaaaataaactataaattatatacatgtattataaattaatatattatttaaaaacatatatattttaaaaaaaatacacaaattaacagttaaaattataccaaactataaatcctaaatctctatatcaatatataatatatatatatatatttataatacatatatatcatatatttacatataaaatgaaaaaaaaaatattttttataaaaacatatatacacaaatattgtaagaactaacttgtaaatttttagactcccgacagtgatactccgaccggtgttttactgagatttttttccccaccgattttttatctcaaacttcaaagatggagaaaaaaataaatattaagaaaaaaaaatcataatatgtaaaaaaaataataaaaaaaaaaccagtagcattacctggcggtgcactaatgcaagaggcggtgctgggggaagtgaatggccggagaacggagtttgaaaatggcgaaggggcagagtgagtttgagaagagaaatgggcaaaatgtgatttctgaaatagaaatggggttttatagacttttaatacccgcaggacccaccggtattaatgttcaacgatcaaaatcacaattaataccggcgggacattaatctgcctttaataaacgttttaaacgtttgggcggtattttaccgccctcttttttagaagcaggattccgtcggtattaatcccaatccgctagtattaatatatttaaaataaaatattatttatttatttatatatttaatagttattactggcggaatgcctattccgccggtaataccctattaatagaggcgggtatttttcgccagtaataatactgccggtaatacccctaaaatgtgatctttttaggtaaataggtttgggtatgaaatatagaagattttaaaaaatgagttgaaatggtgaaaaaatagtgaaatgaggggtgattaacgtggtggttggcggagagagtttggaatttctctggtttgaaggtttttgggttagttgatcgaatgaggaagatgaagggctagggaggattataaaccccttatgtcgtaggttacttagaaataatcgacggcataaggacacacatgtcattattatcacgttcctatggcatcagttatttccaaaaaactgatgccatatgaggtttacaacgtcccttcagcaaattaacaaccctatgtcatcttttattttaatttcccgcaaaaataacagcctctaaagttcaatattgcagtagtggcacaaacacctttatcagcgaatatgccacaaatgactgggtaagattatattaattaattacttttgcatatatatatatatattcaaataattgtaagcttattggtttctaacttattcttaaaataggaacaaatgaagactaattatgacagtcgttctagtgcttttgattctgcaccaattgatgagatttagatacatcatgagaatcttggagagatgtgtggccatgagcgaggagtgggttgcaaattaaaagagcaatcatcatgacagcgcacacaacttgaaactacttaccaagtgcctaacttataacaaacgataggttagttggaaagaaaagttcagaaattctcttaaaaacttttacctgaaaaacatgcacaagtagatgttaagatggctgatgcagctccaacgcacccattaccatctcgttttcatatgcttgaagatggatttggtctatcttttcaaccaatgagttttcaacattagcagttgcagcagactcctcttttgtttcatcaactactacaacatcctcatgtcccttcattttgcacctttaacccctgaacagatggctcgatttcaacaatattagatgctccatccattcatgcaaatgatgttacaatcgccaaatagttcgcgagtaatgatgaagatgatgatcatacaatcccctcaaacgtctcaagtgtcacagtcacggataccacaaatgatgccgacataaaacatatcatagatgtcgcagacttttcagatgatgtcgacatgacaagggtagtaatatgggcagcacacattgcagaagttgtcgacaccacatgggtagaagacatcttaaacaatgtcgacgacacatgggcatcaaacatctcagataatgacgagctcgcagatgccgccatactacccataaatgtcggattcctcaacaaaaaattctgagagatgctagtaatgatgatgacgccactacaaatttccatcagtatttttatttacgttatatgaattctaggttttatatttatttaccttttatggatattgacttttactaagtaatcttaatttaacgatattgttatgtttaactttcaatatttgatatgaaattttttagtttgttattatgtttgactcttaatttaaatattttgtatattaatataaaatagaagaaaataaatatttaacacaaattaatttttatatatagaaaattaatttataattatattttttctaaaactgaacacatttagacttataatcatcattgatagtttaatagtataatcaataacgactaaatcatcaatgatagcccaccgtttaaaaataaaataaaataatagcatattatcaatgataacattgtcgttactgatgtttattttcagtaacgactttaaatgttggcattgatatttacttctggagacgagttatcaccaatgattttttgttgatgacatgtcactattgatagttatcactgataaaagaaaacaccattcaccgacgaaatttgtcctcgttatatagcctatttttcttgtagtggttgaagccacatggaaatgtgaggaagaaatgagggagttatacccacaagtgttttcagtttcgtggaaaaaaacctatgtaaattgtaggtattgtaacacccaacctttttgtaaatatttaataacttgtagacaggataaaggataaaaatattgtgtgaccattatttaaattattaaatatgtgaaatttgagaatttaacagtttaccctaagttgtggaagggatatataggaaattaaggtttaatggaaatcttggtgtggatgaccaaataaactaaccttaatgggtagaaactcgaaggaatagcatttcactaatatttgggggtaaattgaaaaatacattttttatttatcaattaatcaaatctac

SEQ ID NO: 386473 - DNA, 568 bp, Cannabis indica
atggggcagagagccatggaggtggctcgtaagcgtatggataaggcctaccctactatggatagagagttgtaggagcttggtgaccggtgagccagagaggctcttttccctcagtctttaggagttggccctggtaagttgcacatttagctttgttcactttttttctatgttattgtaagttggtcggccataggtgctgctgtagaaagctggttagccatgagtagtatcttggataggctggccagccagtgttgtttaggcactaatcttgaccatgtttagttttcaagcctttatgaagatgagctttttgcatggaaactccaaggagtcttcgagtgctcttcaggagcagataaggaccttagaggctgatctcctggcaaagggcaaggctttagatgatatggaggctcttggcctgcataaccagaacatgatttctggtttggggcccatgctaggattctatttatagtattaggaaatatctcactaaaagaaaagataactcatctttttttaaaaaaaattgtaactctacttgaaaaactatctt

SEQ ID NO: 386474 - DNA, 1358 bp, Cannabis indica
ttttaaaaaaaagaataaaaataaaagagggcaatataaaaatagtatagagtttaatttcctcccaaaaaaaatagttttaatcttgctcacccgctcatataagtgacatcagcctactgtcacttttttttaactctacccaacattgtcctcaacttttactatattatggaagtttatatattagattgaaaaaagtaaaaattcgcaaaaaaaaaaaaaataataaaaaataaatataatctcccaagtaattattaattatataaaacggtcataaaaaaaaaagttattaattatataaattctgtgagtgtgatgtagttgtgttgaattacgaagaagatgtagctgcttatactgtgaaggcggcttgtgatgaacgagcagtgaatcgggttattatatgtaggccccaacataatattactactcaactggatttgatatcttcttgggagagaaaaacaggtcgcacactccaaagaacctttgttcccgaggaggaattgatcaaacctctctgaaagtaagatttagaactttttgtcgtacacaacattagtaataataataaattatatattattaataaaaatttgtctacttttccctctttttgcttatatatgttctgtattataaagcaattaaataaatatatatatatatatgatgttatctgacatatatattgttttggtgataggtctaccatttccagagaacatacctgtgtctattattcataacatattcataaaaggagaccagatgagtttcgaactcacagaaagtgacttggaagcctctaagttatatcctgattacaaatatacacctgttgacagtttactcgacatttgcttggtcaatccttccaagcctaaattatcttcattttcttaatttctttaaaactcatgaatgatatacattatgtcaagttttcatacttctcacaaaaaaagtttgatttctgtattaagtttaagggtgtatttattattttagatccagacatctaaattttcatgcattttttgaataataaagtatcatctctgaatattaaaatatttatacaatttatttatttatttattttttcaaatctcaattgataatttttctaatatttttaattatataatattaaaaaatttattaaattatatttaattttaaagaatatctaaatacaaagcctaattagttttttaaaaattttgtatcaaattctaaaagaaacttatatttctcgtgtgtaaaaaaaaaataagattattaataggctaattagcaatttttcctcccgaactttaacatgtactaaatcatgtcccctaaacttt

SEQ ID NO: 386475 - DNA, 1831 bp, Cannabis indica
aatctttatcttcctcactgggtggaattgagacttgtcgccatatggaatattttggatttttaaaatcacaagtagactgttcagtgctgagaagctgaacggtctttaggttgatctcgtttagtagaaaattagacgatcgtactctcaacggaagacctaaaagaattttgtgccattctgccatatcgggggttgggattggtcttctcgtgactgttgtcaacacaataggcaaaaataagaaaatgtcttcaattttataaatccaaaaacttgaaaccaagctttagagaaaaaaggttaaacttacgtattatacgaaatgttgttgtgttgatgggggagagaacggtcgtccaaaacaattcatccttgaattctattttattgggtagcctcacaatgatcttgcgatcattcgtgtgggtaccaagatagtaaaaacctcctgaacattgctttctcgcaggaacaacaattctagaatataagtagacaattttaggggagtgggacactcccatcccataatatgatataaaactttagagaggccataattctgtaagagctcagacttaactgaaaaggtgcaattatgagataattacaaaatcccttatagtactctcttaggggagaactatctagccgtgatgtgctcgaggctccaagcgcctatcccagacgagccagtggtactggcaccaccacactcctcgcgaattactctttctaaaaggaagcagctatattctctcagagcaatggacctagcgcgacatcctcgcttttgcttgataccacaagcctttagtacatttccaacaaaaggagctattgatctgattttggactcaataagctctgcttcgaaagtgactgttggatcttgaggggtctttgatttacgatcttggtcacctggtgaaaaagcaacagtgactcgaggtaaaaacaaaggtctcactaaacggatagaagctaaaatttgggattctggccaagctgcatctcacagaaaatggcatttaccttcgctaaatcacttgtaacgactgtcaattttagctgggtgggtttctattaaatgatccctaattttggcatcatttatctcaagtttggatttaggtttttggatttcgcattcgaatagaagggctaattctttaggacattctgtttctaggaaatctggagatgaagtttcaaaaccagattaggacatattggcaacaaagaataatcccaatttttggaagaaattaattcaatctaaactagaaacctatgaatttaataaacctaaatttttttccttaaccctagaattaaacaacaaaataaaagttacctaaaccaaacgaagtaagtgatgatgcaatcgattacaaaaataagattactaaatcaggaaaagagaataacagagataaagaagtaaacaacttatcgtcttggcgaaggtttcgaggaaatgaagaacttgttgattgaaagtttgatgactgagatgatgagttctgagaatctttgaggttgaggatgaagtctgatgaaatacgcaagaaaaagtcagagatagtgagggcatgcaaagtgataggaaatcagagatggtttttttcataatggcttgaaggtttgaaaggcagtaatggcaaaatgattgtctattctcaaattttataccttggaagcgatcaccattaaattaaaagaaaaaaatctaacggatgggagcacgacaaaattagaaaagatgggcatttaatgccaaagatgtgcctcgaaatcctgaacggccaaaactcaaagcatg

SEQ ID NO: 386476 - DNA, 2834 bp, Cannabis indica
aaaaaataaaataaaaactattttatttctacatctttttttaaccaataccacctgaactaaaattaccgccgcccactacaaccacaaccacaccactgcaccaccataaacaatcaatgccacttccaccaccaccatcaccattgcatttttaagatccaaaaaatcaacacccaaaaaccaaaataaaaaaaaaaacaaaaaaataatcacaaattgggtctaagaaaacaaatgaaaacccataaataattattaattattcacacctctctttctctctctcccattcagtcgcctaccccttagaacaaagaaaaaaataatcagatatctcaccttatctccctctctaatattcagatctcaggtgttggaatgacattcgacagagacggagattggacaagacaggatgggacgaggtgacgttcgacgggatggacgggatgataatggggcgggactcgaggaggtggtttgctggtgacaatgtggtctcagtaggtggtggttccattgctagtggtaagcttctaagcttttattttctatttatttcttttctcctcagatctgaacttctcagcgggtcaacttatcgtgttcgattggggttctaggttttaagctcttaaggctggcaccagatctatcctataaggaataaccagttcagattctcgttaggaaggacaaagttctatggaacaagactatctccttagtcaagttactcttgaagaatagcaaggtggaagaggccacctgggagttagagactaaaatgaggactcaatatccagagttattcaagttagatttcgaggacaaaatctttttaacgggaggatagttgtaatgactattatacgtagacatgagattagtgggacacttagcactaattaatctaactatgtgattaattatgtattttatgctttatagatcctatttttatgaaaatatctgttatgattattatttctcaattctgaaaattttattgaattataggtgtaacatgcatgctatatgtgaattttcatatttttacatttttatgccctctaacattggaaatgggccgaatggcaagtttagtcacatggatacaaatttgtatcaagtattttatgggacaatattattggatatcttagaatatcagggtttaacgaaataacaaaattggaccgttttacccctagggttacgagataacttagcggggaagtaagggcatttcaatcttttcacccaaaaagattagtcactctttttggaagggataggtggatgtggctcatccttttgaggatgaccatcttctttggaagcaaacaaaaaggaaaagcaaagtaaaaaggaaccaaaaataaaaagtaaagtcaaaagcaaaagcaaaaaggaaagtcaaaaaaataccaaatcaccttttgcttttccctctacttcgtggcttctgaactagggctaaaacccagtgttttccaccatttcaagcctcttcttagctagaattcatcaaggagttcaacccctagctcttccaaactctaaggtaaaacctaacctgaaattttttagttttctagggtttttgttagttttcagtggctatttttggtagaacatgttgaataagtttataagggttatgaaatgtttattaaggttatttaggtctgtttagaagtggtttggattgttttgggtggttgtagcaaaagttgtatcaaacttaacttggttgtgataacttgaattctattgctaactgggttatggtttcttcatgaaatatgttcattatgttgtgtttaggtgttcaattggtaatgtttggatcaggattggattagttatgggatttccaaactcagacaaggaggtttcgggccattcgatttaggaagttttaggacagccatttagtttgatttctattgataattttattgagatttcttcttgaaaatttttcattatgattattttagttactttgaaaaattttgtaaggtttgtcttagaattgcatgagttatgcaagtttcaaaatcagatagtgttgttttggaccatccgatttaggcagaatttgggggtccatcttaagacttttcctgggaccccaattgagtattttctcaataattagggtatttccataatatcaatggggaaacttttagctgtgaatttaagtccctgaaagtgttagggcaacacatattggtttttttagaaaggtgacttagggccttcgattaccaacaactatttccactaaggttgaccggcatacctgaaattaaaattgcggtaagactagtataacacacatacatatgtacatgttcatatttatgtttgcctgacatatcgacgatagttggtgtatacatgattgtatcttgatatcgtgaatgtatgtgtttggcaattcagaagtatgaaccaatgccaccaacactagtatgccaggtaactgagtgcatgtggtattatggttggatatactttcgaagcatgaactagtgctatcgttctaacgagaaggccgacgttgtgcaccgtgagagagagtgtgtgagagggggttggagaaggttgggtcgaggtgtaggcgactggtagctagggtttttttagtaagaagaagaagaaaagaaaaaaggaaaagggaaaaaaaataaaagaaaataaaagaaaagaaaataatttttttatttttataattttaaattattttttaaaatattttaataattaatattacgtgggccactaaaaatttgccacgtgtacaagtgtgtacacgt

SEQ ID NO: 386477 - DNA, 1136 bp, Cannabis indica
tgattatcacgataataaaatcttgaattgacagtttgagaaggagagatattaccatgagatgaactctgcataggctggttgcctttagcagcagcagaggctttggctgctgaagatgcaggaggaggtgttggagcagatttggtcaatggaggttcgggttcaagatcagattcttcactgtcagaggggactcctgcaagctctttttgagaagggatagacatggatttggtcttgaaatcatcagacaggacttccattggtttcttcttcagaacttgaagaagctgaggggggattcaatttcagcttcttggcaggaggagttggtctgtcatgacttcgtttagtgcgaagttccttctcgagagacgcttgctgggcacaggtgcgagaggagggacctattggtgttgatgcagcaacaccctttcctgatgcagcaggaggcgacgcagttgcactaggaggagaccccttcgataatgaagatgatgaagtgcaaggtctgtggggtcgcacagattttcgagcaacttgtttgggaattcgttttggcttgggcttctcaggctgagatttacgctgaggaagcaatgaatcttctgggtttgatgcagttgcaacagcaagtagcgaaattggagcaacattcgagggggaaggatcaaattcttccatccttttttgatgccctaggttccttgtcttagccatgggaatctgaaagatagaaagaagaacaaagaagcagaaaaaaaaggaataggtttcgggtaggtggtgagaataaatgacaagagaaaattagttgaaataagcatgggagagtggagaaaaaaggaaaccaatttcaaattttgaataaccaccagcccacaaacattaaagaaaaccgctccactctttttccaaaattattttttaaaaaaaataaataaaagaaaactagaataaccaagatactttccaaaaataggcaaattaagaaaatccttcaagataaaaaacaaaatacaatgaatatgatatcaaacttcaaaaagtaacatatcaaaataaatcaatttagattaaatgttgatacttaccaaacaaagcacaaaattttcttagcccacaagccaagt

SEQ ID NO: 386478 - DNA, 1844 bp, Cannabis indica
aatcatttaatgacccaatgtacatcataaaagaaataaattagaaaattggtacaaattttccatgtaaatatagttttgcgatagtgaaataatttatccgcattttgtagtttttgctttttttatttttttatttattttttttttttttttttttttttgcagcattttgtaattttttaagttgattttctcaaaatttatatgtctgatatggaattctattctttttacactaattacattcattttgtaaaaagatttcttatgtagcctccatgcaaagtaatgtttaaagacaagacccaagccattccttacttggtgcaagcttacttgattaccaagcgtagaactcgatgtcctagtatatatttgcttcttctcttttcctcattatcccatcatctaaataaaacttcctctcccaccaccaaaatgtcagattcagataacgaaatatcaaatgggggaaggctttttggacgtgaaagacccatacatcaagttcttggaggaggaaaaggtactactactctcttatatttttacatatttctttttccacttcaaataaaatgtcatattacatttcaggttatttttctaattatgatcttgtattactgtcttacatatcctgtccgtattattttacatgagtatgtattagcatttctactttgaaacaaatttatccaaataatttaagaggtaccaaatattttttgaactattacacagagtattttgcaaaatgcctttataaaaataggacaattttgcaaaaaagttgaagaagttaaaccccattgcccaacaccacgagagtactgtaacaaaattcattaaaatatgtagcatatataaacatggtgaccgacaataattatttttcaattgatttttgtttgattgtaatctttacacatagaattcagatcaaaataggctgaacaataaacttaagatttagagtttaaattaaggagactataaaggaaaaagtttgatttcgaagtgtttgaaattggggtgcatatctattttgtacaccatattttgatagatgcatactctgttctgtatgccgactcttgtttaagggcatattattttaaagttattaattattgtttaggtggataatttggatagttttgagttagccaacaaatcaaagcgtgatatttgataaataaagatgtgaaattacagtggcagatgtgctattgtggaaggagaggaatatctcagctgcacttttggtgggaatgacagtaatttggtttctgtttgaagttgttgagtataactttgtgacactcctttgtcacatcttcatcaccactatgcttgtgttctacatatggtctacttgtgcagcacactttcactggtattacaccttattttcattctcatctctctgttcacatcatttgagttataacactactaatttaaaatccttgttatgctttgagaaaaattatataatagaatctttcaaacaaaaaaaaatatatatatatatagtagaataatacggggttttcttgatttcatttatggcacgtttactatacagtaatcagaatcggaataaattaatggagaaatgtaacggaataaatgaaaaataatcggaatcaatatttgtaatatgttgtttactaaaattttttagaaatggaatagttgtgatttatcttgtttactttattaggaaacgtaatcagaatgcttaaattgactaaattgcccttttgagttaaactatattatatggtagttattttgcaagacatattttaaaggacaaaattgtcattatatat

SEQ ID NO: 386479 - DNA, 2895 bp, Cannabis indica
aacgactaaaaagcaaaatttagaaaaaataaaaaactgctattatccggttagtttcggagctgtgaaactacctaggaatcgcagtcccttcatgggaaggtgaagtcggccattacgaacatgattttactgggaattgctgtaattttgtgtgtgtgttcaatggatttggaattggttaatcgacttgctgaagttttggttcttgatgagggcaatggccctgttctttccttgaataaggccggtattgaggaagggaagaagagaatggatttatgtcttattggtaaagttattggccctagaccggccaacaaggatggtattgagaaagctatgaaggggatatggaaaattaaccatcggtttcaggtggaagaactgagttcgaagaatgtgtgatttttctttggaagtcgggaggataggcagagggtgtatggtggcggcccctagacaattgataaacagctgatttgttttgtgaagccaatggggttgggtgaaatttctaaaatggattttgagtttacatctttttggatatcgatcaacaatgtcccattagcttgtatgacagagttatttgcaagagaatggggggagcggattgggaagcttgaagacatcaagattgtcaatggcaccatgaaggtgagggtgcgaattaacatcatcgaacctcttaaatggggtttccgtgtggcggtggatgatcacggtaatgaggtctcactcctttttcaatatgaacacttacctgatttttgttttgattgtgggatcattgggcataaggccttggattgtcctttgagggactttgctgaggataatcccgatttcgatcgtgggagatatggttcgtgaatgtgtgctccgggttcgccgcctcgtgattgtcctcggttccaaaaaaaaacaagagaactctccatcgaataggccgattatgactatgggtgaagctttgaggattgtctctgctgttgagaggaaccgggttcgttactctggccctacaccagaggagctggcccctacctctgttttagaggctcgagaacgcgatgaggaattggtctgcagtgctaatgctgatcagaatgctaccatggcacttggggtatagttgtcgatggctggttttgagtcgggggtgcagaatgttggtagcatgaagatggaaaaggtcatgtcgaaatccttttcatctctgggtagtttggccgatgtggggactgtgttacccgatgatgataacgggaagcaagtggtgggcggtgagtgctctatgggtgtggacaatgcttcaactagtgtgaatgtggatatgtctggtgaggttgaattgattgaacacagtaagcaaaggttgaagaacacaaagggtaagggtgttatagctcattcatctcaggatgagctttcttttcgccatgcgcttcaacaaacgttcgaacctcttataaaagcgcaaaaatctaagacatggaagaggctcaattcctcaattggccgtggctctaaaggggtatccaagccgtcttcttttcctattagccctaagttatcccatgtcatggttgcaaatgctaaatacaagttgagtcctaaggttggtggaggtgggaaacagaaaatggacatggaggttgctaccgaaagtgtgaaaaagggacgattggatgagcaatctgaaatggctcccggggatgtgaatattttattggcgaagcctgcggagcaggctcgccaagagcaatgagtctgctatgttggaacgctcggggattggggaatcccggtgcattgacttccttgcgaatgattgttcctaagttctccccaagtttagttttcttgtctgaaactaaactttatggtggttgggcggaaggtgtacgacgacatgttaattttccaaatagttttcatgttgattgtgtgtggaagagtggtggttttttattgttgtggaatgatgattgggaggtgtcggttaagtctttttcggttggacacattgatgctttggtgcaatgtccgggtaggaatttatggaggttcactggcttttatgggaatcctaaggcaagttgtagatccgaatcttggagattattgtgtcggcttaaggacctttttgatcttccatggatatgtggtggtgactttaatgaaattctttccattaatgagaagaagggtggtgctgaccgtagtatatctgctatgactgaattccaacaagctctggataagtgctccttggttgatatggggtttgaagggcaatgctttacatggcttaataaaaggcaaggtgctgcgcatgtgcaagaacgacttgatcgctattgttgtaaccaggattggcataatttgtaagtcattaatggggatttgatacactcggatcatagactggttgtggctactctagaaaatgtcattcgggttgagaagaatgataaaaagagacgtttccggtttaaaactcattggttgaaagatgatgaatgtcatgaaattgttaatcagacatgggttgctctagatgttcctttggagagtcaagattgtattcttgatatttttggaaggtgtgccgatcggttgggggcgtggaataagagtaagttgggttcgatacgtaggctggtgagagaaacagagaaacagttggatgatctcctcagtgtgtctgcaccattggttcgaatggatgaggtaaaatagcttgagactaaactaaatgatcttttgtcccgggaggagtgttattggaaattgaggtctcgtgcggattggctggtcctaagtgataggaatactaaatattttcacaataaagcgacgggtaggaagaagaagaatgaaattgtg

SEQ ID NO: 386480 - DNA, 514 bp, Cannabis indica
ttatgtaattattcctaaaaaatttaaacaaaatttttatgtatattatatttataatcttaattaattaaataaacaaataataattaaaatatttttttatattatatctaaattcttaataaatattgtttattgaaattttcagaaaccaaattaaaatataagaaagctaaagaaatagatcaaaatgtggttcgagggttaatgacctctagtccacaagtcaatattattatatggctggaaaggcctaattcatttacacaagtgttttaccaggattatgaaccttagaatctttcatatttctcaagtatcgagattctaattctttgcatgaattgagttttcttatatttatagagctaggattctcgtatgtaaatcttgcccactaatggggtaaataacgataacatattgacttcaatttcatttggtgaagcccaattcatggggcattgatcttttgttgacgttgttgggttttgtaccctaaataaaactcatt

SEQ ID NO: 386481 - DNA, 890 bp, Cannabis indica
cgtgactgtattggtgatggcaaagatactgaagaccatcaaaaggaagaagtagatgatgagggttgcgccaaagatgggttttacaaagatgaccaccgttacgaacacaatcattaggttatgagagtttccaaggagttgttcgaaactcggcaaaatttggctagtcaataaagattttctcgaaagatggaaaagaagttggtctgcctttgaagtaagtttggagatctagatgaaggagactctgatgatgatccttcagtaggatgtgtcagaaggaacaccaaggagaaccccactagcatcagaacctcttctcttgaacaagacaagggaaaggcaaaagtgggtgacccaaaaaactcttatgccctcgaactttctcgaaaaaatgcaaatcaggccaacaaggtctttcaggcacagaaatggccaatgcttttgggcttgggtttctttcggcccagaaaagtcctttagcaccgaaggggattggtacgaaagtaccaaaacctagaggaaggaaaggccgccctaatgattcagtaaaccagggcgatggggcaaaggagcagtacttcgatgataattggtccattgtggacctcggaaggtgtttggatgcaatatatgaaaaagataagagaaagaatgtgaactcacgtggtgatgacctcagaaaccactttagcaaaaatgcctatggaaaggatcttctaaatagtgacataaaatgactagaagagcaaataagcaccttaaaaaattggtctaaaagcagagtagggccttcactgattcgaaagatgaagacttggcctagagtcttgtctcaagaggatcatagaggctcctctcctagagaacttcaaaatgcctcaaat

SEQ ID NO: 386482 - DNA, 526 bp, Cannabis indica
acgatcgaaaacaactcataatcgagcgtctcaacgaaggtggcaatcctaggactgtgccgctcaatacaattgacttatgggttcagattcatgatctatagtccggtttctcaactatgaaagtggccaaagatgctggtaattatgttggtaagtttcacgaatccgacccaaacaacttcacaggtgtttggcgtgagttcttgcggatccgtgtcactctatctcttgactgccctttgaaaagacgaatgaaattcaagaagcgtgatggcagttcattctacgccatttttcggtatgaaaacgttccaaccttctactttatttgtggactcatggggcattcggaacgattctacccacggctttttaatacccctgagcacctcatcgttaaaccatacaaccttcacatgaaagcagctcatcggcgacacgagaatttcactgaatcaccttacctccgatcgggcaaagctggcagcagcttctcgcctggtgtgtgttgggttttatgccc

SEQ ID NO: 386483 - DNA, 1376 bp, Cannabis indica
caatgagcttgattcacagaagagcctccattatgttcactcgccatatcaaaagcaaccgcatacccactccttacagtataggacccatttgaagtataatgccaacaccagcgatcttcacatacctcactactcaacgggatgccaagaatgatagctatatccaacctcaagaaataatgagacaacaatggatatcccaagacccatccacaccaatcaaatcattaaccagcacactacaaataggggaaggcgtgataggacgaaacgttctaggtcagggaatctaaggatcccgaaacgcgtcaatactctggccatcccccactactttcctcatccccgatcgcaacaactccaacccctaaatcagactagacaacaaatgagacgaaccttggcgatctgtagcctccaatattgacatgtggggaaaatacttgtgcttcaagacacggcctggtaacaaattcggcgattggagtaaccgccaaacttgtttagcaaccatagcctgattaaaaatcatgagatccttaaagcctaagcctcccttggacttaggctagcacacattctcccatttctcccaagcaattttcctcttatcattcttcgtaccccaccgaaattgtagaataatagagcaaagtttgtcacaggtcgccacaggcagctgaaacatacttattagatagtttggaacagcttgcagaattgccttaattagaatctctcggccaccagccaaaaagaagctccgcttccacaccctcgaacccgtttctgtactttgtcacaaatactagcaaaattctgcttcttattcctcccaataaccgttggcaagcccaaataattatcatgagtggccactgaccccaagcctaaaatacccaatacacatgtacgatccgcatgtagaacattcgggctgaatgtgatagcagatttctaaaaattgacttgctggctagaggcacactcataacactgaagaatctgacaaatagtttctgcctccctcccattggctctaccaaatatcaagttgtcatcagcaaagaaaagatgagacacccgaggtccagtcttggaacaccgaaatcccatcaaatcaccattcaactctgcttgtcgaagaagggtagaaagcgcatcaacacagaaaagaattaaataaggtgaaagaggacaacctttgtaatacccagaattaagaaaaggattagcaaaaccctaattagataattatgagttaattgaggaattatattattatatagttcaatatatgtgaaattatatgaaatttaacatgttaaagaccccgttggtgagccaggggcattttggtaattatgacccga

SEQ ID NO: 386484 - DNA, 1418 bp, Cannabis indica
aagcaagctctccaaagtgctcactggaaccgtgccatgtctactgaaatggttgccctcaagaaaaataaaacatggacttatgtggtcttacccgaaggaagagaggctattgggtgcaagtgggtttatcgaaagaaggaaaatcctgatggcactacatccaagttcaaggctcgccttgttgctaaagggttccatcaacaacccggtttcgacttcaccgaaacgtttagtcctgttgtgaaaccggttaccataagagttgttctctctatggctatttcaaggggctgggatatcaaacaattagatgtgaacaatgcgtttcttaatggtgatttgcaagaggaagtttacatgcaacaaccccccgggttcgttctccccaatgctcctcatctagtgtgcaaattacacaaagccttgtatggcctcaaacaagcccctcgggcttggtttgacaaattgcacactagcctccttactcttgggttctcctcttcaaagtctgacaggtccttgttcactcttcacacatctacttctactactctcatcctagtatatgtagatgacattatcatcactggaagtgactctaatctcattaccaccattgtgcaatccttaaactctcagttctctctaaaagacctcggggatttgagttattttcttggtattgaagtacaatctactccccaagggctgcacttatcacaatccaaatacattagagatcttctactcaaggctcaaatgcaggatgcaaaacctcttcccaccctatggtgagtggtttaaagctctcggcacatggtcatgaaccgtttgataatccccaactctacaggtcaattgtaggtgctttacaatatcttctaatcactcgccccgagcttgcatttagtgttaacaaagtttgtcaattcatgaaaactcctctccaaccacattggcaagctgtgaaacggattctccgttatcttagtggcacaattgaccatggcctgcatctacataagtcaccctcgactgatctcactgctttctgtgatgccgattgggcttccgatcctgatgatcggcgatctacctctggttttgcaatttttctaggtggcaatctcatcacttggcagtgtaagaagcaacagacaataagccgatccagtacagaagctgaataccggagcttggctaattgtgtttctgaactcacatggctgcactcactctttactgagcttcagatacctcaaacaacacctcccactgtttggtgcgacaatcttagcactgttctgcttgctgccaatccggttcttcacgcgcgcaccaaacacatcgaacttgacctttactttgttcgtgagaaggttcttcgtaaacaagttcaagtcaaacatgtccct

SEQ ID NO: 386485 - DNA, 1009 bp, Cannabis indica
cttgactcatcttcctcctttattacaaaaaatttaaaaattaggatttcagtttgttccaacctaacattatgtgaactttccaattcaatacaatctcatacatctatgccacaaacccatttctctattcaaccagttacagttagatttctccttaatttttaataatttgcttgctattttcctactgttacgcttatttgtgaaaaagtagcaacaattttaattataaattggtaatctactttgaaatatttttttataatctttagattaatgaagatgatttcaacgaggagcgaaaataattaacaatcattaattttatagttgttattatattttttaacttaatttttcattttttaaaagaaaaaaaaataaattacttgatttaatcttggactgacacactaatttggcacttaaaagtgttaaaaaataagattgagtgtaaaattacctctaattagaggtcattcatactattttttataaataaggttatgtgtgtaataactttaaattataaggagttttgttgcaaatatttcaattatttaagttaaaaataataattgctaaaagatctttacttattaacaaattgcataaaattaattaataattattagtaatttaattttaaatataattaagtttaattaagtttttataaggaaataaagtatcaagttacaagctatttatttatttttttttaattttaaattaatcacactattacaatgatctaatggttaaaaataaatgtaaccatgatggttacatatttgatgtaaccattgaaacttcttccatatatttatttatcttatatgggtgcactcttaatgggtattacccatgaattggtaatattaaaaaaaattgagtttttatgattaatttttttatttaaattaaaaaaatttctcaatttttatattatatgggctggggttgttccatcagctgaaaaaaaaaatataaaaaaaagttttcg

SEQ ID NO: 386486 - DNA, 808 bp, Cannabis indica
aggatctaggtttgcctccccgctttgggccggacttcattgccctttaatgggctcttggtcagagctcttgccaggcatcttttctttcttggctgtagacaaagccaagttgtagtattgtcgggcagattgttaatctccccttaggtatcccaccctatgccttgttggaaactttaggtagaggtggtattttaatgttactgcctttaggtcgtataagcctggctagcctatcattacattgaagggagatgacatgttaattgtcacgaattgagccatcaatgttcttgttatgggactttctccgactgttaggggcagtcagatgtatcccaagggtgcaaggccttgaccaaaaatgtcgtacattagttgtgtacaaggtgctagatctgttaactggagccccatcttttcataagttgattttaaaagaatgttgaagaggctccgttatcaaccatgcacctagcaactttcatgttccctatttgtgcagttatgactagagggtcattatgagggaagctgacctgggcagcatctccttctgtaaaggatatgacaggctcttcgagcttgagttgtttggagtctctttcttccatagctaggatgtcattttttgctcatgatagagggttcgagcatagcgctccctggctttgcttatttctgctgctatgtggggtctgcctattatgacccctaggtgacccacaactaggggttgcatcgagtctctattctgagtagcttgtgcctgagctattggaaattatcttaccaggatcttaga

SEQ ID NO: 386487 - DNA, 2682 bp, Cannabis indica
aaaaaaaaaaaaaaaacataatgagagcatcgcccaaaagagtttatgcattaacaaagaaatagttcgtagatggacagaacgtgtttcataatcactaccccccttgacccttccttggcttcttggtctagtcaagcatcaaagttatgaacatgataagctataatcaatcaaatgaataaagaggaaacatacttttaggttaatttaagaagaagatgataaaccatttgaacataattttattgtatatttgaacgaatttgtagtgatcagaacaagtgtctaaatatttaaatgtatgcatcggtttcatatagacaaatattaatgaaactatctttgaagccaacatttatgaaatcaacatgttaatttaaatttttaaacttttttgaacattttttaagtttaacaatgggacaaaatatatataatcacatatatatgctttctagtatgtaaataggtcttcaaccttatctttaatgggtggaaagaagtcaatgttattgtccggcacttgctgtgcacatttccataattattacaccttgtccactcttatgatccaaatacaaaagtaaagaaaaaccttatataatccaaccattataatcatcaaatatctctgccattaaaaatggagatccaaaacataattcccattatcctcttcatcactttcgtccatttctactacccttgtcaatccgagctctgccacccagaagacaagaaagtccttctccaaatcaagcaagccttcaacaatccacgtgtcttctccagatgggacccaaaaaccgactgctgcgctgactggacagactccctcaaatgcgatgagaccacacaccgtatcacctccttcatgctcctctccggtgatctttccggacccatcccctctcaattcggagaccttccatatctcgatgtcttatggcttcacaagcaacccaatctcaccggacccatcccacgagccctaaccaagctccacaagctcaggttccttgtagttagctgggccaatctatcgggaccggtcccggactttcttagcgagatgaaaaatctagaagacattcaactctctttcaacaatctctctggacccatcccggaatctatctccaaactacccaaactcacagggcttagcttagaccgtaacaaactgacgggaccaataccggactcattcggagaattccaaggcaagagcttttatcttgatctgtcccacaatcaaatttccggaaatataccaatctcgctggggaatatgatggaattcaaccacgtggacctgtcccggaaccatctcggtggtgatgcttctgtgttcttcggttctaataagaagagtttgcagtacgtggacttttcaaggaatttattggagtttgacctgtccaacgttgagtttccagagaacttgttttggttagatctgaaccataataagataagagggagtcttccagtgggattggcctcactgaaatattttcagtttataaatgtgagttacaacagattgtgtggacaaattcccgttggtggacggctaaagagtttggacaatacgtcgtactttcataaccgttgcctgtgtggtgctcctctagaaatttgttagaagctatgaaataaatataatggggatgtagctcagatggtagagcgctcgcttagcatgcgagaggtacggggatcgataccccgcatctccagattttttgtacacagttcagaattgttggacacttctacttattattattacttcttttttatttactttagggaagatagaagatatataaattaaaattttacctccattcaacttgaactcctacctccgttaaaaaaattgtgcttttaaaagtgagaataaaaaataatttttatcattttaaaagttaaatggtatttggcaaagtatgttagaagtattttaagatttttacttactaaaaaaaatcaatattctacactataccatgacatgaatccatcttacctaggacccaacttgaacttggactctggcctgaacctggacctagacgcgaactcaaacccatactcgaaaccagacccggcacccgaactttggacccagacttagacactgaccccggaccctagacccgaacttgaacctcagaccaagatcctgactcggacctcgaacctagacctgaacttgaacacgaacccgaacttgtatccaaaaccttgggctagctctgaggtctttggctgggttcggggttcgagttcgggcctagggtttagggttttggtcggggtttaaggttcgggatcccggtccaagatttgggttgggtcagggtcggggtccggggtttgggtcgagttctaaactgagtttcgcattcgggtctagggtctgatgtctgggttcgggtttagtattattgtaattttataattttattaagggtaaaattggtatagtcaatatgcacaccattaccacatttttataatagtaagatattgaagtattattataattaaggttattaaaaaaaaagggatattggcggttaaaccacctaaactttaaattttttacacttaaccacaaaaattgatttttggggggcaaaagtacctgaactcccattctattttgct

SEQ ID NO: 386488 - DNA, 809 bp, Cannabis indica
aatattttaaaattagtctaagtatttacaaattattatctaaccaaacataaaaaaataaagaaaaacaaatttacaagctatctaatcaaataaagaaaaatagggagaaaaaattcttatgcaatttagcatcactgcaagccttcgtgaatcactgcaggtctttatgaatcatcgcaagtaatagttctatctactgtcgttgtaacggtaacaactcaatttttgcatcatatgccttcttacttccaaactgtaaaaaaaatatttttattagtacatgtatttgttatacccaaaatttggctatttaccagaagctgacacgtgtactacaaaagaaatatgaataagctcaatgattataatactaaattgcattattaaatgcgactaaataactcatctcaattaattatagttgatagaaatattcaaactcgctaccacataagcatatgcgagataagagtaataattattaatagatgtaattgacgagataatatgcctatctctgaataaatagaatatatgtgatgatcttcagtagacaacctgacagctctaataccaaaattataacgccttaatgattaggcacgctatagtgacttttaattacaatgcacacatttgctaatcaaagggttttattaaaaatcgagataattttaaacttttatattctaaatatgtataaacttatccaaaagggttgggatcccatttttaaacttatttatacaatcaaaataaactttataaacatgtcgcacatcgactacaaaaggaaacttgagttg

SEQ ID NO: 386489 - DNA, 1560 bp, Cannabis indica
aaaatctcaggcttatcccatcacgacccagagcattctctgaatgtatttaaaacaaggccctacaaaattcctcttccgaaataggtcgcaccaaatcgtcattttgagaagctaaaattgaatgttgaatatcatcaagcaggttaccccactcggcatctaaggcagtaaaaacatcctagaaatactcttgtactaactgaagaagaccatcatcccatgtaaaccaagcaccactctcatcttgtagcttagaaatatgatttgtccttttacgagaactcaccgctgcatgaaaataacgactatttttatcaccatctttcaaccaaaacttcttcgctctttgcttccacaatacttcttattgagttaaaatctcataaaactttttgttcttcctcatacaacttttgtgaaacaacattagttttttgacaaagttatctcaatcgtctcttgcactgtaacaatctctctttaaaacaatcggtcagaaccactccacaactagaaattttctcaaaaagatccacctccaaattaccctcccaaacacccctcgctaacttctcacatatgggctctcgtaaccatgaattttcaaatttaaatttttttcacacacactaagaaatgacctaaatacacggttcttagaaaattagacaatgatctaaggtagacaactaaagattagctagacgagcgtccttagaaacatctagccaagattgcgtaacaagagccttatcaaggcgaacctcaatctatgcatctgtaccgtgaccacgtccccatgtaaaaggatatcaactcaactaaaaatcaaacaacccacattcatctaacatatctcaaaatccatctaatagccagttagatacactctcccccctctcttctcattattactccccacattattcagatcgccaataatacaccacgtgagagtagaatgatcctttagagtacaaaccaaatcccaagtatcccgctatcttagattttcatatttcttctccaatcgttactttgcatcatgtgttctttcttggtttttgatccaatgttcaatctagtttaccatgtcaaacaacaatcaagaatataggactaaagctggagttccaagcactatcatcactggaaatccacaacaaactacagatctaacaatcaaagtctccatgtcatgactccaagaaatccaatcgaagatccgtcgaatccttactaccttcaccatggagatagccttgggaatatccttgtttctcaaccactcataggctaggacaattacatttcttagagttgttctatggagcttgctatctctttcaagaatgaattaagattcttggatgcttctatccttaaacccctttctactaattacaatctttacaatgcttggattctgaataacaatattgtcctatcttggttcttaatttgatttttaaagaaacttcttctagcctattatatgatgaacctgtagcagccatttggacaaaccagttgtaatgaccgctctagtaatgtgga

SEQ ID NO: 386490 - DNA, 528 bp, Cannabis indica
atttagaatagacacatttttttaatcttaattacaaaaataacttaattttttttgaaagaaaacttagaagcggttgttgtttccggtggggcttttgatttcggattgtgttgctcttatgcaatcctcttttttgtttcctatttcaattaattttgttaaacggtccgggaatcaggcggctaactttttagctcgttcttcaagttctatttctggctgtatttttcgcgggggttttgtccctgctggtttggaagctatcttggtagctaatttgatttaataaaatttaattttttcgactaaaaaaataacgtttaataaaacgttaataacatgtcctatccgctatcctatttttctttttctcttttgctttatatttttttttctcttctgtctttctttattttttctcaaattttaaaaataatttctggtcatatcataattcaagggagcctaaaaaaatatcattataatttacctttcaatatcaatatttgagaaatatatattttt

SEQ ID NO: 386491 - DNA, 1270 bp, Cannabis indica
gtggtgttatgtattttttttttctgttttgcagcccacaaactctagttcgtgctttgaagtaagtgctgaatagtgtttcatttgttgctgatttatttactttagtactactaagaatttggtattagttttgtccctattgtcatacattttcttattatttatgggattaaactagtttaattgaatgcaagatctgtttcgatattaagttttactgtagtcttattttcatttgctttctaatttccttcatgctataaactattcgagaacttttggaagctttggccccttttttcttgatattcatgttatgctagttattggtagattattagcaaatgacttttcatatggaatagaattcacaagctaggatttaccacaaatagttgaacctacctttcttctatcttaaagctacacttttaaacaatagtaattgaaaaagatacaccttttatgaatggtaactagtagctcccgctgaaacaatctaggggacactccatgtactattataacttgtattgctattagttggagaactatgtgtagcactgtcgtttcttaagtggaaatcatggcttggtgcttacattattttattctcatatgagctctaaggaaagaaagagatttcattatcacatctttagtctttaaagagcaatgttgtggagcactaatgctgtccaacatcgcagctaactgaaatgtaagatctacatgcgaattaatctctgtgggagtcatttgtattaatatttgatgctaaacaacacacttccattgagtattttccttatcaaaattcacatacatataagggtacaaaatgacttatcaatttttcataagttcctaatttgtttactttagtgctactcttgtagttgttaaaggtttttctgtcacttcttttcaagggttgttgaaatgcaagaaattcttgatcaacaacttgctgaggaagcagcagaggctgaaggaggtggtgctatggcgtcagttgcaaatcctcgtagaacggccaagtaactattctgatgtggttttaaatttttctcttagtttgccttctaacgttttgcatacacgtttgtgattatggggaattcatattgtgttgcttagaagtaagttaataatatgatgcattttgtactcactttagcacaaaactgcatcgaaagtttttttttctttttctgttcttctcatcttttattctttgctccactgccctctgcagaaaatctaa

SEQ ID NO: 386492 - DNA, 1983 bp, Cannabis indica
tgccttgttatggagtttatcaagattgatatgaaatttttaaagacttttatgcattgttattaacaggtacaaatttttggttgaatattttttttccttgtgacaatatactttggaagttttaattttaaacaacccaaactgctcaaaaaacggcataaaaccgtcccctaaaaaaccgcccaacccaaacttttactgggcaggtatgggttgtgattttaagaaactgtcaaataaaaaaacgcccaacccaacccacgtgtaacctatggtgaatagcaaagcatatagtatctatgatctgaatgcacatgttatagtggaatctaatgatgttgatttttatgaacacaaattttgctttaaattaagaaatagtgggggcgcatgtactagcaatgttcctacagttaggaataatgagtagatagagagtattgaaatggaacctagaagaaacaagagagctagagtagcaaaagactttggttcagaattttgtccttacaccttagaggaggatcttgttaacttccaagaagtcttgtcttccctagatgctgactagtggcaagaggtcattgatgatgaaatagactcacttgttacgaacaaaacctagcattatacaaacttatcacctgactgccaaactataggttgtaagtggattttgaaaaagaaaatgaaactcgatgaaactgttgacaaatacaaagctcgtctagtagtaaaaagttttagacaaagagaaaatgtagatttctttgacaccttttcatctgtcactagaataacatctattagagttttaatttcactagttgctatacacaatttagttgtacaccaaatgaatgttaggacaacttgtttaatattgaattagaagaaagtactcgacgaggatcaacttgaagggttcgtgatccctggccaagaacataagatttgcaagttagataaatatatgtatggtcttaagcaggcacttatgcaatgacatgagaaattcgacaattcaattaatgaaagtaacaaatgcatttactataaatctgagaatgacatttgcactattatatgtctatatgtggatgaattgcttatatttggttcaaagttcaaatattcatgttgtgaaatcattgttatgtgataactttgacatgaaggaccttggagaagctgatgcaatccttggtattaagattactaggtttgaaaaaggaaattctttggatcaatctcattacattgagaagattctgaagaaatataattactttaactataaacctgcttgctcaccatatgatccaagtgtaaagctatttaagaatactggtgacggtgtgaggcaaattgaatatgcgagcatcattgacagtctttgatatgcactgattgtacgagaccttacattgcttatgtcgcgggatttatgtcgctatttaccctcttttaataaaaaaagaaccaatatattcttagctatttttttaaaagaaaaaaaaattaaaataaagctaattaaaatttttgctcccaaattttgacaagtacccaattatgctttgaactttccatgaactttttttattgttaaaaattctctttgaaaaattaaaattattagattcaagatttctatctaaatccgttcaattttaataacgtggtgattgtctaatattaaactgtgtcccctaaatgttgatatgtatcaaaatgtattcttcaaatttgaatatgtactagagaaaattttagtgacttaaaagtttagaggattgatacgggtcaaaattcgagaaaaaaatcctaatttacctaaaatatgtgactgaaattaaagggtatatatcattttagattttttaaaagttataaattggactttctgttttgttaaatgacaaaatagactttgtattttctaaaaaaatatgaaaatagaaccatgagcttaatttt

SEQ ID NO: 386493 - DNA, 2552 bp, Cannabis indica
agccgacgactttttttaccgtcacctatattataggtcgtgaaaaaacttttcaacaatgctactttatattatcgatggttttgcacaattgagaaaacttttctcgatgttttttacagatgcatattctacccagtgttgcaacagtcgaataggcgttagtcttagagagaaataaaaatactttatctgactgtttaaaacagctaaaaaaactcaatttttcagtagtatttattaaaaaaatatatttaatttaagtattatttataaaaataaaatataataatattcattatttgttgttaattataattttagtctaaccgtaatacttttaattttataatatatattttttttttagaaatatcatacattttttctattttattttttaaaaaataataatagaaagatatttttttagtaaccgcaataaaaaatgttcacaatagtgatttttcagaaacataaacactttttttatattattgtttaaaaagataataataattgatatttttttttaaacatgtggatgaaataaaaaaaaataataatagaaagattttttttaaatatgcgcaatggctttaaacttgaattgcaatattagaaaaaattctttatattatatagctacatttaatataagataaataataagatagatatgtgtagtatgttttaaatttaaattgtaatgtttttaaaaaagaacaatagtttctgtaatatagtcacatttaatataacataaatattgctagtttgtagttcaattctcctaaagtatctctaatttatattcgccgcacataataattagcagttcgtacactcaaagtaaataatgaactaattttggtcctcttagatggatgatttccattattttctttatataaagtattaaactcttaatgaatatctttttttttattaaaacttgccttcattagaaacaaaagaaaatcgaaaaccaacaaggtcacccacaagaagggggggagactcccctaaaccagagaagattggcacagatgatttgctctggcttgagaggccaggaaatccgccaaactgttcagattgcgaggaataaaagtaaaaacaactgaaataaacttaggtataaaagctaaacacttcgagaaaacagggtaagtgccccacgccattggcaactccctcagatttagagcatccacaacaatcttggagtccgattgaatgactatagattgaatccgagcattccaagcatactccagggcagataaaattgccacaagttcagcttcaaggacattgtgagctaaacaagaagactgacaggattcactatcagctgccccaggccttttcaccactactccaatccctgcaatcccatcagcaaacgaggcatccacttggaaacaaccagcagaagcctcaacattcgactgctgctgcacctgatcaggttccaggataacgcggggatcatagttgttgtttacttcagccaacatggaaaattccaaggcacgcttagatatcgaacggattatgtcttaatgaatattcattatttaaaaatttacatgtaaaatatgaaggagatttcaatagttacattaaatatgtaatcatcatggttatattttgtagctattagattactattaaatgattgtaattaatttagaatagaataaaaataaataataattaacttataacctgatagtcacctaataatttatttccttataaaactttaattaaaattaattatattttaaaattaaactaattataattattaattaattttttgtaatttattactaaataaggatcttttagtatttttttgcccttaatttattaaattttttatagcaaaattctttataatttaaaattatacacatagggttcgtttggtacgccgtattacaccctattgtattgtatattattatattgaattgtattttatgcaatatttttatgtaaaattatatgtggtattaacttttatggacacctaaatatataatattttagtataaataaaagtttaacatagtattatataaaaatatgatatataatccaattaaatataatacaatacgacctaatacgacgttctaaacgagctcataattttataattaaaattttattacacctataactttaatttaaaattatttcacttaattatttagttttttttttttatttaaataggtggaatgtattttccaaaaaaaaaatgctaaactcctccctcctttcttttttggataatgagacatttattgaaaaaaccaaactagagttaaaaaaaaataaagtcaagctcccccagaaaataaagcaacctcaaactcgaaaagaaaaactcctccctccttgcttcgacttgttttgtacaaacattgaaggaacctttcacacttgaagacccttcgttagtaatcccctatataatatacatattaaagttttctaagaaaaaatctgaaaagcaatttctaatttcaaag

SEQ ID NO: 386494 - DNA, 633 bp, Cannabis indica
gtgttgttgttgtgtcgacttctggtaggtacagtaagtctgtaatggatgatacgggttcttctgaagttgtgagttatagttctggcaagaagaggcaaaaacttttggtatccaccccagggatgggggtctacccccaatgtcacgatccttaattgaggctgggccaaccttagtcttcctaccccttggccctatcaagggtacctttggtggggctcatcttccccatgcaggtgattcctttcgaccatctcgatatgcagaagtagagggaggcaaacagggcgttgaaggggtgcttggaggccaaaaggccacaagtctgtaggagggaaattgtgctgtcaatggtgtgtaaggctaaaatctcgaaggacgtgcatactccaccctctacgggctaactatggaggtcgaggcctcggagaagagggtggcattcaaggtgagtagaaaggctgcaccttttgccaccaactcctacactaggttggtgggagtgcctctaaatatcctatggagacctgggcatcctacagtagcatagacgtttttgcgctagcccattctgccaagcagcatgcagttagggtaaggcctcgagacattgcctccacttttctcttt

SEQ ID NO: 386495 - DNA, 835 bp, Cannabis indica
agcataatgcttgtacgattaaataatacaagtttcttatatatacaagatttaatggtatcgattactatatggcaagatttacagtaatcttgtatatcatatcgactactctttttgttttgttttgttgttatgccttttttgtcgattactggtataatatatattcaagtgtttttgaaagttctgcaaaagcatttataatgctttacgattgaaaatcatgttttggtttatatgagttcatgcaagagatttgtatatatatataagtcatatgcattctgctaatgtatgaaattttgcaaacgtcaccgacaatatatattctgctatttgattatgaaagtaatcgtaaatatatctatatgaaagtaattgtttacagaatatattagttggtgcatttaatatatgtgtgcatcattttattaattttggaataattcagtaacaattaaatttaaattttggtttaaagtttattaaggatatctaatatttaattaaattaattgaaacaaaatatcaccaaagtgatctgtgtagattaatttaataaaaatattatgataattgtgtatatgtgattcataaatttattaactaacccaaaggtgagttaatatttggatgaatttcatgcatgtttgtggtgataaatgtgtgacaattataaggtattttgtgtgaacaatgtgtcagtccaaagattgcatattgtttgacataatttattgtcaatatttgatcactacaacaagagtaccgcttacaattaatattactgtccaaagacttaatattaatgttgtgtttggtatcttgagat

SEQ ID NO: 386496 - DNA, 3870 bp, Cannabis indica
caaagaaaacttaaaaatcctcacctcccacttctcgcttctgttcaagattccagtcaacaacctgctgcccttgctcagaatccttcagcttctgcaacatctaccaatcctcaacccaataaaaaaatgcgaccctattgttctaattgtcacaaaccagggcatttaaaagaaaaatgctacttcttgattggttttcccttggttatggtgacaaaaggaaaactgatcatcctttagtccataatgcatccacttctgttgatcagtatggtgttcttgccaaccttaccaagcaagaagacattcaagcaataatttcactcctaacgcagaagttgcagcctactcctactaccacagatgcttttgcatctaatgtctctggtaacaactctaaaaaccatttatggattgttgatagttgtgcttcacaccacatctgttgtaatttttctcttctttctaatgtgcataagaatactatagctaatactgttacacttccaaatggatcgacaatcaaagtacataattcaaatgatatcaaattttcaccagattttcatacatcgaatgtactctttgttcctacattccaattttatctctttagtgtatctagctttctcaatcatacctctaagagtattcttttcaacaattattcttgcatattacagggtacacagaagaagaggattgtgactgctaaacggattggcaacttatacttcttgctgcaatctgtcaaatctcacagcccttttatttcttcttcttgtaatcaatacaataattcttataacagtgtccattcatggcactttagacttggacatccttccatgtccacaacaaagttgcttaataaacaattacattctgaacatattgatgcttccccatgttctatatgtcatttagctaaacataaaagattaccttttcattcccaaaataacattgctaattctagctttgatttaattcatttagacatatggggtccttttcatgttcatagcattgaaggttatagatatttcttgaccattatggatgaccacgcagatatgttacaatccaattctgatgtgcaacatttaattccacaattctataaccttgtatttactcaattcaataaaaacataaaatctgtcaggtgtgataatgcaaaggaacttaatatcaaatccttttatgttcaaaaaggcattcaagtgtataattcatgtgttgagagacctcaacaaaattctgtcgttgaaagaaaacatcaacacatcctaaatgtggcccgagctttggcttttcaatcttctatagccttggtatattggccccatcttatacacactgctgtctatttgataaatcgcacaccaacaccattattacaacttttgataccctaccaattgatgcacaataaaccaccatcatatgaccatttaaggaattttggatgccttgcttatgcctcatccttaccaagcactaggcacaaattttctcctcgtgcacatgcatgcatattcattggctatcccaatggcatgaaagcatacacacttctcgatcttgctactaataaaattttccactctcgagatgtggtgttctatgagcagatttttcctctaaaaggatccctcaaaacacaaactttagatcaattactccctgctcaatgcaccaaaactccagctcaatctagtaacactcttgtttttcaacctgtcgatcaacaacacttgacaactgctggacctccatcaaaaattacatctgctgatctcacactagctctgcacttgctgacttctcatcatcaaaggcacatgttgactccacaccagcacctgcctctaataatctcacaccaacaaaagcacctgataattctcaagcccctgatgcaccttccacagccttacaacaaccatccattactaaggcaggtagaaaaacatctactcctgcccatctcaaagactatatttgtcagtcctccactaaacatcctttggttaaatatctaagctatgacaaattaagtgttgcttttcgaaatgccatttttcatgcatatactgagtttgtacctactactttcaaacaagcatctcaattcattcaatggttaaaagccatggatgctggattctttgctctcaagaaaaacaaaacttggtcagttgtctcattaccaccaggttgtcaaccaattggtaacaaatgggtctataaaataaaatacagtgaacaaggtgaaattgacagatacaaggaacgccttgttgctaaagggtattcacaacaacagggcattgattacactgaaacatttgcccctgctgcgaaattcaataccctcaaactattcttagccttggctgccatcaataactggactcttcaccaaatggacattgataacgcctttttacatggagatcttgctgaaaaagtctacatgacactccccaaaggttatgtccatgagggggagctgcccccaaccctgtttgccttttgcacaaatgcctttatggctttaagcaggcttctcgggtttgccaaattaagcaacaccctgattgaacatggtttccatcaatctgcatatgatcattcactcttcataaatcaactccatctagcttccttgcacttctagtctatgtcgatgacattgtgattgcaatcaccaatgacacagaggtaacaaatttaaagcattccttaattcaaaattttagctaaaggatcttggccatttaagatttttttcttggtctctaaattgctcgatccaaggtagggatctctgtttctcagagacctttcactctccaacttcttaatgaaacaggcctcctcggttcaaaggctgtttccacaccaatggatgctaacctttctctcaataaggatgttggccctcgtgtcaacgatgccacttcatattccagcctcattggaaaactcttgtttttaaccatcacaaggcctgacattagttatgctatcaatagactcagtcagtacataagtgaccctcgacaaccacacctcaaagcagcctatcgaattgttcaatatcttaaaggcactcttggccagggacttatgttccactctaactttcagcaccaacttcctacagattgattgttccaccttcaagccttctcagatgcggattggggcacctgccctgatacacagcggtccattactggtttctgtatattcctaggccagtccgtcatatcctggaaatccaagaagcaatcaacggtctccaagtcgtctactgaagctgagtaccggtcacttgccaacactacctgtgaaattctatggctgcacaacatcctaactgactttggtatttcttcaccacaactaacaacagttcattgtgacaaccaagctgcaatccacatatctgagaacgcagcctttcatgaacgcaccaaacatattgacatagactgccatatagtacgtgaacaaatcaacaagaacaaaataaaattttgttctatgttccttctcggcacaatattgcagatataatgagtaaggccccctatttcctactcaatttcgatctttgttgtccaagatgagtgtatccaatctttatacttcatcttgagggggagtcttagacatagtcggttattggttgttagttggtttcgtttaataacagttttctgttatgatatgttttatccaaacaactaattcctctttgtataactgtttgatttattaataaaataagtcttttttacagcttttcactaataattattaatattatatatagtaaaataaaaaaaaaaa

SEQ ID NO: 386497 - DNA, 999 bp, Cannabis indica
accagtttgtatattagttcctctcctaagaccttagagtctataggttacaaatatactttaatacttacgtaattaatgggttattctataaaaagcgattgcaccgatccatattcccattattttaacacgtgtcatccactgagatggcagccgaattttgaatataacattagtaaatatagttctatacttactaagggtacaattctatatttatattagagtaatcatagaattaataaataggattatttggttgttgagattcaataaatattctagtttattggagcatagaattttaggtctatgttctgtggatcgccaccttgaaacaccgtcattgatatagataaaaattgtataaagatgtttgaaaaatttattttaatttttgaaagtagtaattatttattttttaagaaataatttattatttaaataaattagggaaaagaaaaagtattatctagacaaaggcaccaccactatctggttaagataagggtagcgccactatcacagtgtcttgatacagtgatagccgcctataagatatggtgggtgctagtagatttgtttttgggttaattaattaattcaaaagataaatatttatttcaatttaaatttaaaatgtagttatagatatttaagttggttgagatattatcaagttgagagattctttccgagtggttgacattctctcaattagttgagagattctttcaatctattattggaaataaatatctataatagattccgttataaatatttattcaaataattaatatgttaatttaaattttttaatttaaacgtttatttgaataaaactttttattgattttattatatatatataccgtataaacataaaaatattatgaaatattagtattatataatattataatttagagtaagaatatagagaagagatgagaattttctgagtgttttattccaataggtgatctcctattt

SEQ ID NO: 386498 - DNA, 1592 bp, Cannabis indica
gcatggatcacaaatttcttgaacctaatgctctttgattgaaccacaagcaatagtaataattattggagtccgagagaagcaaaggacctacgtgatccgagaaaatgcacaaaatctcatgtcaattccttgggaaatttgaaattatataaatccaaaacttataaattgaaaactttctacttagcctcttttgagctgagatttcttcaactatttttgtgcattctttaacttgttatcagagcaacaaaaaggctcgtaccaatgtctgctcactcttagactcccaagggaatcatcactgctgcagtaggtgctcactataaaaaaatcttacttttagtcacaattaacatgtgattaaaagtgaaaaaattgttcttaattataaattattattcttacgttgtgactaaaaaatctatgcctaaaactattagtcacaaaaatcacaatttattgttaaattagtgacaatttgtaactaaatactatatttagtcacaagtaatttttttgttgtgactaaaagtcacatttagtcacaatttttttttgttgtgtgatgattaaaagattgtcactaaaaagtgacattttctttgtagtggctgctagctcaccaggccggcccttttacccaatcaacctacacacaaccctttaacacacttaaccaaccttttcctctgacgttggatcgtaagaactatgttctatggaagacaatggtctccactatcatcaggggttatcgtcttgatggcttcgttagtggcaatcccatgcagagttcattctaacacccacaacaatataaggcgaacctggttttggtctcaccatcaatccagagtatgaaaactggatagtgagtgatcagttgctaatgggctggctgtacaactcaatgaccaaaggaatagcaactgaggtgatgggatgtgactctgctgctgctctgtggagagcccttgaaaatctctatggagctcactcaaaatcgcgaatcgatgatactcgcaccctgatgcacacaacacaaaaaggttcaacatctatggagaactatctgaaagtaaaaaaaaaagggcttggtcaaattcattagctcttgctagtaacccatacccagaaaccaactcatatcaaattttacctctggtttagatattgagtatctgcccattgttcttcaaatcgaagctcgatcattaacaacctggcaagagctacaggggatcctccttgctttagacaacaagatggagtgacttcagaacttgagtctcaacagcaacaataaatctacacatccccctatttaaccaaatgcaaatctggccaatcaatcatttccaaacaacagaggaggaggaaaaaattcctaactcaaatcaagggaatcaccatcaacatcaaaatcagtcaagaggtggttgaggtaactacaaccgtggtggtggcagcaatggaagaggatgtggtggtcgttcaaatggacccaaaccaacctctcaagtttgtggccgttatggtcattttgctactatatgctatcacagatacgatgaagcttatacggg

SEQ ID NO: 386499 - DNA, 2191 bp, Cannabis indica
tctgctaaatcactccgaatgaatcggcccgccttggcagccaaagtacgagagttgacaccgttaagatatggagttggtaacccggataccataacccagaaaatggctttacgcatattcgcattgtaccaatctccatcctctagccattctttgatgatgagtagcttcccatttatgatccacggtctattctgaagcacctctgcacaatcttcctctttatcaaagaaaatgccccaaacaccgggtttcaaagtcttgaacttccaatatccttttaacttccatatctgactgaggatatctttaagtctagatcttgaaactcccttgccgtcgaaaatgctgactaacactcatgtgcgaacaatctcggccgtgagctcaaaggctggctccaaatcaatggtcattgactacaggaaattgttgcgtagggcctcaaggtcctcattgggtttgtcaatattatcgttgggaggcggctcaacaaacccttcctcagcctcagcagcattaactccctcattgatatcgttggaaggttgttgggagtcatcaatgttcataataacttcagggttctcaaaagaaggttctgagccgaccgaacctggaccacgtgagacattattgttgtcccccataacagcatacaaaagagacaacaaaaaggaacaaaggaatagaacaggggattaaagaatagaaaaagctggtaaccaagagaaaagactttagacttgaaaagataacaaaagactaaagaggagtttaatataagtaagatcaaacaacgtcaactcttaaaaacatagagcgctggaatggactctggttaaagacatggttgtcaagttgcacttccaatactatagattggttgctttgtccaacttggtgatgcatttttcaacttactccaatacaatagctacataattcctctttatataataaatacatatatttttatttgaatatcagtcaccatcattggtagtccatagagggattttccattagagtaagagaagaaaagaaaaaactatagaaggttttatttgagggaagactataggacgttttaagaactaaagaaataagaaggatgttcatacacatttttttatgagcttaatgaaatatttgaaacatagtattagggtaatgtttcatctacacagtaaaggtacgcttggtatgtcgtataagggggtcctataatattaattattacaatcattttttttataaaatcaaaattatatttttcaattcataataaatggtctctaataaatttattataatatttatgaaccgggttgtatcgtagtaaagtcagagttggagtctgggttcaaaggtcaaggtctagggttcgggtgaaggttggggtcgagttcgagtttgaggtcaaggttggggtcatggtcgagatccaaggtctaggttgaggttcaggtccaagtcatgctccaaggtccgagttagggtaataggttggggtcaaggtctgagatcgggattaagattgaggtcgggatcatggtgagggttcaaggtcggataacaattaaaaactaaaagtatagatgaaaaaaaatcctttgagcaatggttcttcattttaactatgggtacatgtggcataatttttggagaatcaaaaagctgtttatttgaaaaaattgtgctaaaaagatgtttagtaaacagttaaaaaataatttattgaataatttatgaagaagttatagctgaaagttaaaactggtacaactcacattttagaaaaagaattgttttgattgaaagactataataaatttatttttattaaaaatatatttacttatttgttatatattatgtattataaaaaaaattataataaaatacataatatttaaatctcttattgtttttttctcaaaaaaaaaaaaaatctcttattgttttattttgttttaaaaaatatttgatattctatatttattatatatattttatttttatttttaaaagggtaaataccattttagaccctctgttttacaaaagttaccaattagaccctgtgttttgttaaatgacaaaatggaccctgtattttcaaaaatagtacaaataggaccctgacttgattttttgtcaaattaaagtttaattataatccgat

SEQ ID NO: 386500 - DNA, 2003 bp, Cannabis indica
aattaaagacgtgtttaatgcacaatttttttgatccagtgaaagtgggaaaatcattgttccatgattttcaaatcataaatcgcatttacactacgtgatatgtaatcaaatcctataattatagggataattgttgtaaacatattacagttaactctataattaattgtccactatgtaattataaatagtgacaaagaaagatgaaagggggaggaaaatctcatacgagagaggccctgagaaaaacaatcagaaatttgaataagattgactcgtggactatgcagaatttttactgcaaaaccacgtaaaaaaccctgtgttcatatttttatttttacagcctttatttttatagtgtcaaatcactactgtgaggctcaaatttagttaacaaaaatatgcgttaacagtttggtgctttcaataagagcctctgtgaaaaagctcattcttttgaagaaaaatcacctccttaaaagctgaaaaatccagaaaaatgttaacaccccacatgaggaaactaaccatcatcctgggaaagagcctctgggctccaggaggtctaccaacctgcggtccaaacggactacccattgcaggaggactcaacccgagggtggccccagtgcacggaccacacgtaccgggagaactcgacccaacgtttgtcatgtgtgcgtggacaacacgctcgaatagaactccgcgtggggatggtgagaaccctgggacgacggatgaagggcccaatcgtggaggtgccgagtctatggaagaaggcgttatgaaacgaaaaatcgccgcctaagacgctgtctggaagagatgcagtgttgaaacgttgagttagaacgtgatgttgcgtcggccagggtggcacaaggaacaaatgctcaaactgaacttgaacctggagtgagaagaccacgaggcagacctcgtggttcacgaacaaggagacaggaaaatgcccagaaggaacaacccaaggaacatgagacaccccctataaatcagagcgaacaactagactggagacaaccagaaactgatgaacgagaaacccctcaagccaatgaggaggatcttgggactcaattaggagaacggaggtcacctaccggaaatctccaacattcttcccaaacccatagagcgaggactcgtacaaaccctaatggggatttatgacaaaccgctctcggggggaaagaacagagcgtgaagaaggaagtgtgaccttgaggcgatcaagtacttattgtcgatcaactcaaagacaagaaagtactcaacaagttaatgattaagaatgtatgggaacaagtaaatccgtgagccacttaaagacaatgtctatgagtaggacaagatctgtgagtaagacaaggtctgccagcaattactccaaaccggatctacgagagcacttgaattggaagaaacctgaccttcgccaacaactttgtctaaagcaagaggatccaatccaattgcagataaacgagctggaggacaagttcatgagatatcaagtgggggaattagggaaagcatctggatatgactctgacaaggagcttgagctgtatcatccagatataattaataccccttttccttcaggattcaaatacccgcatgtctcgtcatatgatggaaccattgatccgatctcgcatttgaataactttaatacaataatgcgagcgagtaatgtgacgaacaattcatgctgtattttgttccccacctcgcttgttggagcagccagtagctggtttaacaagtttactcgtcattcaataacttcaagggggcagttgtgcagggatttcaagaaacaattccaggctgctagggataggcgacctgaagcgaccacactagcaaatataaagcagcagctcggtgagacacttaaggcatattaagttgttttagcacggctgtggctagggttaggaattcggatgacaacacacaacttacag

SEQ ID NO: 386501 - DNA, 961 bp, Cannabis indica
gcccattcctcctaacttttgggctcataaaacttgttccatgtgctccaatgaatcttctcttttttctctgaggaaccccactagaacttggccaccatcccatggagatcattgatgatattattcagaatgcaaaaataactcataatgtaagacatgagagcttggaccactgctttaatgagaactttacgacccgcttgagaaaagaggctcaccttcctgtctctaagttttttccaaactttttgtttgagtttttcaaagacctccttctttcttctacgcacaaaagttggcatgcccaaatagtagggtggcactcaactagtttgacccccaaccactgagcaatattgacggtaatccccgaactaaccttgttgcccatacttacttcagacttctcaaaatggatgcattgaccagacaccctctcataagctttcaaattttgttgtaaggtgtctgcttcttttaaagaagccttaagaaaaatgaagttatcatctgcaaagaagagatgagataatcaaagcccattatgcctaaaatgaaccccatcaataaggccttgtctttcagcagccaagattaaacaagataaccttttcgcacaaaggaaaagcaattaaggagatagatggtctccttgacggagcccacgctcggaacaatcttccccttaggtttaccattaagatgaaccaaaaaggtgaatgttttaacataacccatgaccttatgaatccacacttcttcatacccaagccaaagcatcatattctctataaaaggccactctacctagtcataagttttggacatgttaagtttcaccgccattcatttgacattttcaaaacgccccattttcatcacattatcgatatattataagctattaatatatctcttttcaaaaattgactgaaaattattaattttcaatgattgt

SEQ ID NO: 386502 - DNA, 820 bp, Cannabis indica
gagcaacaaggagttctcttgttcatgagattgccagaaaaatttccaacattaatggcagtgccttgtggaaggccagtggaggaagctgcctcctgagcagccaatgcctttttgcttattatctggtaaatgtcaagcaaaatgctttggaatgccttctcaacattgagggcctccagagctgatgtctccaggaatgacaacccttccttctcggcaagagcaccggcttcctccgccgagatggcacgaaggtgattgaggtcggctttgttaccggccatcatgatgacaatgttggaatctgcatggtccctcaactcgcgcagccacctctggacattctcaaaggtttgcctctttgttatgtcatacactaagagggcaccaacggctcctctgtagtaagcactcgtaatggctcggtacctttcttggccggctgtgtcccatatttgtgctttcactgtcttaccttctacctgaaaatattgacacttgaaatatgactaatcaattcaacttttcgttttcttaataatgaacattttgttcaaaataattactccatctattcagaaaataaaaataagtatttactccatatactttctcaaagattattaatattattattttaaaataataggaaatttcactaatatggtcaacccaataacgtatatatcaaaatcaaatgcatattcaaattaccaatattaacggctaaactacataacagtttaatttcctatgctataaagatatgcttcttgttttttcaaccaatgtggaaaccgctcatgtgattttcatg

SEQ ID NO: 386503 - DNA, 1217 bp, Cannabis indica
aagaattccacagtgatagaaatagttttgaagaccctcatagagaaacttgagtcacttagtaatggccaatttcttaaatcggacgttcatacatcggtgtagaggtttggaaatgtcaaagaggactctgatcctcataaatggagtgatggaatcatagagggaggcaatatgagtctcaagaagatcacctactacgtcaaccacaaatagggcaagcttgagagacctattgccaaatggaataaaatgcacttgcatcaacagaggaacatagcgaagctggttagggagaatagtgtcgaaaccattaaggatggcaaagatcatcaaggaacggtcaaagtgccatggttgcccttcaacaattctactacgattgccttcacaaccaaaacgcacaagaaaaagctagaatgatagttagagaaagtgaaagggaaacagatagtccaggcgtccttcatagcattacccacccaattaggcttaacagacttaggggtaagaactttgacaacagtaagactcagtatgaggttatgggttaagggagacatgatcaaaatcatggatgagagcttcctcaggtgtgagatggatagtagaatcgggggttagggtgctagtattcattgctaacgacatacaaaaaggaaataagaaaatatagtagaaatttaagtagaaaagtaggtaagaccaggagaaaccatacaaccttaaatagttaaaaaaaaaggtaagaaatacctgatacataaggtagtcgaaaggtgtagagatgccaaaactatcatagcttcgtctagcccagatcttacccaaataggcataatgatgatcgaaatcctcctaaggataaaaattctagctattaaatacatgaggggatgcgaaggaggagaagaaccaagagatttttgagagatcaataaatgtaaatgattgcgtgagatatttgttggggattattttaccaggatctagatttactaccatgtatgttgtttaacatcctaaatatgattttctaaaacaatagaatttaaacacatatagagttcaagaaaccttacattgattgcagcggaattaaatgactccttccactcagatctctaacccgtgttcctttctttcccagagtactatcaagatatgagtccgattctcgtttaggtgttggattcttcacagtcttacacactatg

SEQ ID NO: 386504 - DNA, 557 bp, Cannabis indica
gtgatgacactcacatcctccttccttgtcctaataatggtaatgatatggaagaccaacattttcttggtgatcacatacattgtggtgattggctcagtcgaatttctttacctaagctcagtcctttacaagttcaaccaaggaggatatcttcctctggctttcgcagggctattaatggctgtcatgtttgtttggaacgacgtgtatagaagaaaatactattacgaactcgaccacaaactttcccctgaaaaagtcaaggaaattactaacgacaccaactttcatcgattaccaggacttgcaatgttttactcagaacttgttcaaggaattcctcccatttttaagcactatgcagagaacgtccctgcattgcactctgtcctcgtttttgtctcaataaaatcattaccaattagtaaggttccacaggaagaacgattcttgtttcgaagaatagagcccaagaatctcttcgtgtttcgatgcgttgcaaggtacggttacacagatgttcgtaatgaacagggccgtcttaaacattgtgg

SEQ ID NO: 386505 - DNA, 1149 bp, Cannabis indica
gctttaagctggattgaccgtcatttgtggggacaattgattttaaaaactgatagtttagtttgtgttcaagccgtgcaaagccaaattactttgtcatcctcttttagtcttttagttcatgatgttcgtactcctctcttatctttaaataatgttgagttgtgtttaatttgttaaacgatctgcaaacaagttggctcatgttttagttaggattcttgtttctctccaggtcgtgtgcttcagtttgagaattgttccaacgaaatgcgttttattattattaacgattgctagttaataaaattgctaagtttattacaaaaaaaattaattatacgtagtttttttttatttatgacttatatatactgtctatagttgttattagtaattttttttatataaataatagttttttatattattaatctattaaattaaaatttatgaaatcagatattaaaatatattaataacgatatgtcattttgttttttggtgttgggcaacttaggttaacatttttttttatatataaactgtaaacatgtctttattcacttttaattaaaattataactttgtgttaatttattttttcaattttttttatttttctcttatttatattatctacaatcaattatatttattagtaatttttttttttataaatttatttaattcgtttttattttgcagtatacatgtaaaaggatatatataaatatctttgagatatgtgtattttataatttaattattttttattagtaaaatttgaattaaatatatcattttagataaacaattacatattaaaatttcttcaaaattataagtgattttatacagtaaaatttatgtggaattctgtatgacaatactacagtataataatattttttgtaaatatttatgtttatttttaatatttttgtattttaaatgtaagaatagagaaaagaaaattgtgtgaaaagtagaagaatggagtagagagaaaacaggggagaaaatgtaaaatggctctgattcaatatcagagagccctgctgctatttatattgaattcaatattaagatgagttagttacagatgtaagccacagctgagaacaggaaaccaatacagttacaaca

SEQ ID NO: 386506 - DNA, 1594 bp, Cannabis indica
aaaaaaaaatcacctcgttctgtttgtatttatgattaatatggatttgtttgcagcctgtactagccgttatgtatttggtgcaattcatgccaactattgggttttggctcatggacaaggtattatacatttttcatattagtctcaagatgtatttggctcaaacaaaggtcttttatggtgttgttcaattccactactatggttttctcaggtagggggaaggcgggttgaggctgctgcacagaaggggaacacttattcactaggcttactgtttgggaaaaagaagtcatcttgatttgatcaaatggaactaattatgtccaaaccagttttccactttaaaatcttactctaatatgccttttttgttgttgtgttgtgaaaattagaataccaataaatattctcgcagatgtaatttacaacataattcacagcttagggattaattagaaagatttagaaagaaaaaaaaagtcttaattcgttagctgaatgtttgtcttgtttccaaataatttgccttaaagctgtttgtgtaatgttcacaactaaataatgccctcagatttgtaagtattaacctgccatgctcacaattctaaggcttttcttcaaacgaattatcattttgaagttcttttaaaccctgaccttactttttaaattttcttttaagaacttatcattacattttggatatcctcctcccaaattttcagtttgatggtaacttgagcgaagattgatctttgaaaagaccgacttaccctttaattggtcaaacaagtcatcaatttggggtagcagatatttattcttgatagtgagcttattcagttcccgatagtcaatacacattcgaagcgaccagactttcttttttacgaacaacactagagcatcctaaggggaataactcgatctggtaaatcccaagttgcgtaattcctggagttggatcttcaactctttcaattctgtacggtacctttgatactagtttcactcccaaaattaactctattatgaactcaatctctcgggaaggtggtaatccaggtaagtcctttgaaaatagatttagaaattcgcacaccagtctcgtattttcaggtccagatgacataggttgggtagtatccactgtagtaactaagaatcctagacaacctcagcgcatcagatatttagcttttaggagtgttattctaggtatgcgcaatccttgtactttacctacaaacaccactaggttggcattgtcgggttcaaacatcaccatcttccgcttgcagtcaattgttgccccatacttagacaagaaatccattcccagtattatatcaaaatcagacaattgtagctcaattaggttggcggttaattcataaccgtcaatccaaaaagacaaagacctaatccactgagtagatacaattaggtctcctgagggtaacagggtaccaaaccccgaagcatacacatcacatggtttatgaaaactttcaattactctactcgatacataagaatgagtagctcccgaatcaaataatacagaataagtgttggaaatatttta

SEQ ID NO: 386507 - DNA, 2083 bp, Cannabis indica
ctccactgtaaataatttcagagccacaaactaagaagctagtaaactaacaaacaattggaataagaaagagaaaaagctagaacaagattgcttaccagataaaaagggtaagcgagcatagggaaaggcaaggtaaacctcagcaatttggtacccttatccaagctattgtagattttctcagacagctgagaaatcaaatgatataaaatcactgaatcatagagttgttgcatgacacaaacacaaacacatatatgcatatatgtaagaggttacacacttaccggatgccaagattcatcgttttcaatgtgtccatggttctgatgatgggtcctgtggcttattctcctggcgaaacaaatgaaaaaagtgcaattatgtaagctcaaaacacacgcaaagcaaagaataccttagatgagatataatataataaaaagagattctacccttcatttatgtgtgaaactcaccatccatggtatgggacaaggattgaagaatgaagaatatgacccaccacgctattaaggtttgcgttattagaaaaacttccatgaccactgtaaaagaaaaaaaaaacaagacgattgaaacattgatatccaaaataacagaatgtataatcatattggtaaccagagaaaatataaacatgacaaagctaaataacctattacatctaaatccaatgaaggtatcaacttctcagccaaagttttctttcttaagaagagagagagagagatcataattaccagtcgtggccaagaacaaaaagagcccagaacatggttccttgagcaatccagtacagaggccaaacggcccagttgtttaaataagcagccgcagccgccataccaaaaacgacaacaacgtctctcaaaacatagctcatagatctccatgggtccttaatccaacagtgtttaggaatggctgctctaatatcagccaacttaaatggaggcggcgcaccagggtcgaatccactttcatcttccactaccctcttctcattatcttcttcaccaacatcggagactcttaatggagcactcacattaagtttccaattctgccccctaaacccacttgaggaagacaatgagaaacccaattggctactcttacagaccggcaatgtcctaagactcgaagggatggaaggcttcaacaacattccggttctgggttgagggtagactctaagaagaggttttacgccacattctgataagacccaagtcgccattggagacccagatgaagaaacacacaagaattgttcaaacttgaggtgtgagaccagagtatctttccctggcgaaaggggtggagatgactgaatgtgaagaggacagagtagctaatataagatgaggagaggagataacgaaaaggtttctctcctcaactccaaagaagagaaagaataaaaaaaatcacaacttgtgcttgttgttgcttgacgcttctactctatctttaatagacggggtgttctccctctcacaaagttgggtaatgtggtacggtgaccacctcagacttagttgatagagagttgatttttggtacgtgtgaaattattaatgtaaataaaaaatgaaaggttggattggttcgattgggccattgctattgcaaatgggtccaaaggtacgtggtcaagtctgccaaaggtcggagcaatagaaactccattaatccattttttttaagatggtattaaattttataccgaatttactttatttaatttaatttctacttctatttgtaatgatgtttttattagattttttagcttaatgtaaattatataggcagtcgattttgtgcccaaatgtgcaaaacacggattggaatccgtgtacggcaggtaggtcccacgttagaatagttataatttttaattatttaattaagttggcaaccggttattctaggtttggtaaccggttataaatttgaatttttaattaaaaaataaaaaggtacaattttattactgttcacgtcagttaaagtaaaaaaaagtacaacagttaattgtacaaatatactg

SEQ ID NO: 386508 - DNA, 697 bp, Cannabis indica
attttcaaaagaaacatagtgctatataacaaaaatagattgaaaaacaaatatctaactggtttttctgataaaagaaaagaataattgtaccacccacccaaaagcaacttgagctatttgagagcacacgaacgacccaaaaggtggctaaactatttctcctcaccataaacaaaataaacttgtactgcaacaccatcattaaaaataaagacatgcataaaaaaccagctagataccacatttttatgagaaaatcttgatagttattattcactcgagttagaaatctagcattttttgtacttctgtgatactttacctttggcgacatacttagttctttagcttaaagtactatcaagattttcttccttattattgtaaatggtgtagttagtctatttttgttgattctgttctcaatgcttcatttatataatagactattttttctgatttacattccatttttctcaaacattttatttcatacagatttgatctaatcgtgtgttatcgtgtttaccccactttacctacatattcacttatgaaaaaaatcctctcgtattttagtacgcaaaaaatgacatttttttaaggtctttctcaccgtcacctagtctattattattatttattattattaaacttgacctagttattattattagggatattggcggttaaa

SEQ ID NO: 386509 - DNA, 1779 bp, Cannabis indica
aaactaagcggtctttacaagagcaatgactcgatccaactaaattgatcttttttacatgcatactaggggacatgaggcactttataattaatattcgtgtgaagtaacaaacactatgttgcccattgcttggggccaaaaggaagaagcctaatgaaaaagttggcagaactttctctgctaaaaatatcgagacagacatagcgaagaaactagggaatgctcttcaggaggtctttggggaggttagtttgaatccttgctagaacgcaaatatctcctgatcctagagatacaaaccgaaagaaaatttttctgggcaacaattcaaagtgtgattcgtttgcaaaactgtagagggacactattgatgttactagtttagagggaaagagaattcaactgctttagaggtgggggtgcgctattcgagtaatccttaagctcactcgacaaaagttttctcagtgtgtttagacgctagagatcctaatcaggtgcacgaacatggaactcacagcaagggaaagttcgattttcatacgaccgaggaagctagccttgtcatgccccccaaggcctcgtgaaggtccttctatggaatttttggggattaggaaatttccatgcaatgagtgctctttgatccataattcatgctaagaatgcaagtgtgattttcttatagagactaaacttgatcctggttgtatggctcagtgagctttgccaccagctgcccaacttgaatttgtatctttgtttatgcccctccagtttccactgatcgagaaatttttggggaaaattagacattatatgttagctttattgacaatcagtggtctcttcttagggatctcaatatgatggttggcagtattaaaagttttgaggtaataagttacaagacaaggattgtaagggcttcaagattttctagccatcactaggggagttgatttgggaagtgtggaaaatctctttaaatagtctaatggttgtgaagtggagtatcatattcatagaaggttggatggagttgttttaaaccttgagtggttgctatcttacccaaaggctagggttaaatcccttgttatcaaccattcagatcacacccccattttcttttctttactatttgatcgagaatgctttccaaccacattccgctatctagaggcctagacgtgagatgatagctacaaagaagttattcgtaaggcttaggagattgagattcatagggttaagggttttcaattagttgggaagctcaacaatactagaagatgattaggttaatggaacaaggctttaagagtgctctctaaaaaactccactccaaccaatcataggttttatcggcataaatttaccctccccgcgagaaggacttgtttacagagaactcgctgtatggaaagtggctcacaatattattgtactcacagtactgaaagaaaggatctcgagatattaactgaaaggcacacctcgcatataagtcgcagtatcaataagaaaagacgcaaatacatacataattcaacggaattcaacagtcaagcattaaaggagtattcatgataaacgttacacatattttataaccgttgtaattaatttgattaaggagcctattattaccattatcattattttgtaacagtctcattatgaccattatttgtaaccgatgcctactacccataagtaggggcttccccctccacttcaaaagggggctgatctgaataaagaaacagagc

SEQ ID NO: 386510 - DNA, 2861 bp, Cannabis indica
taacttgattttccagtttaccaatagtgttcaaatattgtccttcgtattttggaaaaggcctaaagcaacaattgtttcagatatatgatgtggttaggtacagactgcatcgtatgaagaaaaaattgaaagatgaattggaggacaagaacacagttcaggaatatatatgccccagccccacttgcaatagaaggttttgaactttgtgttttttttttttaaagtagtcagatcaactgtctgatatgatttaaaaattaatccagtaatgttttggtgataactatgtaggtacactgcgttggatgccttgcggttgtattctatggtagatgaatattttcactgcgaaatgtgtaatacggaacttgtggctgatagtgataagtttgttgctcaagaaggaggagatggagatgacaacgcaaggaggcgaaggcgtgaaaagattaaggacatgctccaaaagatggaggtccattttatattattttcattgttctatatatatttttgttttgctgtgatgcttatgtgttaatgattaatagtaatatgtatttttctatttagtttctttattcaactgtttactctttccatttttgtggggtgaatttctatatgattgtgtgcatttgtggatcggaacacatgggaaactctaaacaagtttagcattctgtgcttactgcttataattcccttaaaaagaatagttgttttttttttatgtgaaggtccatccagttaagaaacttataggtattataggttctggtatcataggtaagaaacttataggtattataggtactggtaaatattttaaaagacgactcatcatgatgattgttgtgatttgggattcagtaaagctctgatagcttcatggttgaataacaattttattttactttctaattttaaatataatttttcttatctctgattttccttttcaatttgtattttgttttctttatcatctctttgcttaggtaagctgtttgtcttcttgtttgttgcccttctttattccgtgtctaaatgtatatgttatttccatgttattgatatcattcaagtcatttaatatgatagacatggcttaacatacccgagtaaggacctggtttaatttatgataagttagtgagtgtatagaaaataaggatgacaattcacaataagtcattgttagcattttttctgggcatacattagttaatgtttagtcgaggagcccagtttgattaacattcggctcggcaaggagcctaatttcaaaaaagaatatagtagtattatgtgtggcatgcatttcttcctgttaatcttttactctctgtgttttacttgattaagtgctactttttctccggtttatatgttgacaaaataaggtaaatgcaggtacaacttaaaccattaatggatcaacttgcaagagtaaaagacttggctgttcctgagtttggaactcttctagcctgggaattaagagcaagtgctgctgcacgtgcagcaaatggtgacgccaatggtaatgatccttccaaatcatcccagaatggttatgggggaccaccaatgcccttttttggagaaaccaaggtaaatctttcttccatttttttgtgtctttccctttctctctgtttttggagtgtgttttgtaggaagtggaagtaagaaaaatggttgattagtagatggattttgagggtaggattgttgtttggtatgaaaatttgagggaagagatgagatgagtagatgaaatttaattccttattttgagcaaatttttagtttagatattgaatagaatttagctgatcaatgctcacttgaagtctactttgaatttcatttacatacttaaccttcaactctgtatcataaaataaatacaagaggatggaatgataattttacagttaaaactttcctcgttcctcttcttcctccttctaaacatgggaggggattttcactaccattcaagggatgtgattcctctcatactacacataacatgagaatagagtgtgctctttttccattcccaattttactctattcctccctcctatcaaaaatagcatggagtcaaataatacaagtcttagattgacctgctcccaattttatagataactttttttttctggattttttttttaaattggattatttgtaatgatgatacttggcaacactgctggttttcagctttccagtcatctgggatttaataaaatagtttccaacttgatgcttatacaagtttttgtgttatttgaactcctggaacgcatcagtaacgagattggaaaatctgtttgtttattggatttcttccattaatgagttctgctttatcattacacttatgataagatgttttgcaatattaggcatttgttttccatgaagttggcttgtatgtaatttacatgtggggtttggcaggtggaagttgcgttttctggaactgagggccaggaagataaaaaatctgaagttgatcatacaagtctaaggggcaaccatgaatgtgcttccatcaaccgtatatatgggttttatgacgagtgcaaaataataggattatacaaaataataataataaaaaaaagatgtaaatatatttatatttgaattagtacatacttgtacaaaatatcaactgatatttatatgcaaaataacgtcctagagtattctactgattaactatattctaataataataatagatatcacactataatatcacctgatattttaaatatctatattctgctgatttagttgaaaatttgaatatataataataatatttatat

SEQ ID NO: 386511 - DNA, 949 bp, Cannabis indica
atatgtatatatatacacatatgcagtaaagtgggctcaattaatcatacggtataatttgtataaaatgttcaaatattatgtatataactaaagataaaaattgtgcctctaatcttatcaattatcatgaagttcgacattcattttttctagagaaattgtaaataaaattgacattaattattattaacttgaactatatatatgtacacataaatatacatatattgtaacatataataattttttaaaattaaattttttattaactatatatatacacaatatctttgttatatattattataattaatatatttacgtgtttataatatttttttggtggggctgggaacaatggaacatgttcaatattataattgacatgatcatgattaccacctttttggggaattctatatatatgtctgccactaatgcatgataatcaaaaatctccatgcaaatatatataatagaaattaaatatttaaatatataatataattgttacagtaccacattttacatgtgccaaacacagtaagaattagggatatatttttaattacccatatatggtaactaggaacatctaagttgcatcttgataattatttaagaaaaataacaaataaaaataaaagattcaaaaaaaaaaaataaagaaattaaggtttttaatttaaggtgaattaccccataatataatttttttaaattttttttttttttaaaatttacggtttggatttctaaagtggttgcagcgctagttgcagtaggagtttccgtacgattttttgttgcaatttaggttgcagcgctagttgcagtaggggtttctgtacgattttttgttgcaatttagttgcagcgctagttgcaatataggagattctatgcctaatttcgtaaaaatgcaaaaaaaaaaatgcaaaaaaaa

SEQ ID NO: 386512 - DNA, 1111 bp, Cannabis indica
acaagccatggtggcgcgtggtttcaaattctcggaggtggccggcagagagtgaggtccaccgtgtgtgtggtagctgaagttttagctcatatattttttttttctagaaaccattcaatgtttttcactttatttttttagaagataaagcaaaagaagagccaagtaaataataatattatttaatcattacttttcaaaaaaatatattatttagtcatttgagaaaagataaatacagaaggagatgtttttttgttttctcttaactcaaaaggagtgatgttgagttgatctatcaacgagtttctctctacaaaaaaaaaaaaaaaagaaaatactaataataataataataataataaaaacctagttttacttttattaatgatttataactaattaaattttatttttggtaaattatacaatggttttaaaaactatcataataataaaaaaaattagactaaaaattctctttaatgtcgaaacagatacgataatcatttacaacatttcttaaaaaagtatactataaaattttcctaatatattaaagatgtgtttcacttacatacactctattaaatgaatatttcgatagatcttctaacttgttcgacgttcaggaggggtttttagtctatcttttatttcataatcgtttagaatcacatatgaaaaatttagaatagtttacaatattaaaaataaataactacatctgtttgaactttattttgagtaaattaatttagaaataatctcaaataactacaacgtacactatcataaaagaaatttgatcaaaaaaatttaaacatgccatatcagatcagaagtctacccccaacaattcgaattttttttgggagttccactaaaactttttctaagagtatgtttggaagtaacagtgtaattactagctagggtaataataaacagtctagtctagtaattacattttatttaaatacaatattacttgaatatgagatggtaattacatataattttttaatatcttgtttaacaaaataattaataattacacgaagaatcattttttttaaatatttaatgtttaaattggaatattttt

SEQ ID NO: 386513 - DNA, 1092 bp, Cannabis indica
ttttttttttttttttgacattgtgtacttattaatttcacgcgttattgaattattttaccatatatatggaaaaaattataggtgcctaattgacggggatatttttttattttattttattgagaaaaaatgacggggatattgagtatatactatgtacctacatatatttttatataaacaaaaaataattttatagtattaggtacgtacatatttttattgtactcttttgatgtttgtaattttatttacattaacccttcggttaaaatactatcgttgatgatacttcaatttttgttaagtttgaataaagtaaatagaaattctactttaattagatatgtaatttaacgtgaattttttgaattactttattttcattaaaaggttcggtttcgcactcgattatacgaaatttttgtttggccaaaaatgttaaaatttcttggcatgatggcggaattcttttaagggaggggttcccttttgttgttctcatctttatttgctaaggaatttcatcattaaaaaaaaaagagaggaagggaatcaaaatatcaaagtactaagcttgattgtaaataatcaaaataaagaaatagaaatagcatagaatttaatatgtttctccaattttcgttaggaataggttccacgtggagcaaactcaaactttaaataagcaacactacttgccgtgaatgtgaactcagattccgaaaaaagaaaagtaacaaattattattaaacacaaataggaaaaatgatgaatactaaaaagcgtgttctttttcaagcatctctaattacattctttgaaggtaaaaatattaatatgctctaaatataactaaattcaatataatattatttactaattaataaaagattagaaattattttatgttgcatggttcacatgattatatatttaatatataaattctattaaatctcgaacatatagttactaatgattatactgttctatcagtgaaaaataatcgtgattatatgcttcaaactatttagttccacgatttatctgtgtattagatttacactaatgtgataattagcgat

SEQ ID NO: 386514 - DNA, 2065 bp, Cannabis indica
ggtacagaatattgaaagatagtcagttggattcatgttatggatgtctaaaattccatccaagaattcttgaagtcatcttggccgtagggctagggactcctcccaggtcgacttgttatgactcgggtccacttaactctgagatgtcatctttcttgtcacgtgtgaaaaaattatgtccctgtcatcaaggatacttttggtgtaaacacataccaccctcttcttttggacaaaacaatcattgccaaggactccaatgcatccttttcttttttgaggaggacgcccaccagaaagtcattgcaagagtttgtatttctttaagagcacccttaaggagccaaaaataactcattacgtaacaagaaagatcgtgaataattgctttaagaagaatctcaaggccagcttgcgagaaaagactagctctccaaccttaaagcgtggaccacactttgtcaggaaagttagcaaaaacctcttctttattatgccccataaaagctggcagtcccaggtacttagaatgtttttccacaaacttcacccccatctcagtggccaaatgcatgcctaactcatcagagatacgacacccgacactaggcttagacttgaccaagttaatactttgccctgaaagagaggaataaattcccatcaactctttcaaaattgtcccctcctcttctatataattaaggaataccaagctatcgtctgcaacaaaaaaaaattgatgatatatggacagccccatgcgcctaaagagaatgtcattaagattgtttcttattttttcctcgtgtatcaagcaggaaaatccttcagtgcaaataagaaataaataaggcaagagcatatctccttgttgtatcccttttctttaaatgatatgactttttttttttcctatttagtaaaatagaaaaggagaacgatttaacacagtgcataatcttttgaatccattccccctcatacccaaggcacaccatcatgactcttaaaaagtgttatttcatcctgtcataaaccgtagacatatcaactttgagagccatcttttggccatttccaaacttcccttttttcatacaatgaagactctcaaagcctaacatatctttatcatggatttatctcctcccgataaaggtgctctaatatttcaagataacaatactaggactcacctttatcctactagaaggacatttcgaaatggccctacatgctacatgaaaaagacctagtgggaaaaaattcaagaccaaagctggtttctcttttttcaagataaggcacatgtattattcatgactacagttcgtgccatcattaaaacctccatgcaggccttggtcacctctgaacgcaccaaatctcaatgattttgataaaaaccccaaggaagaccatctttctgttaggttttgtgtcctaaataaaacatataccaatataattagtttaactaattaataaatgatcagaaatcgttttatgttgcatggttcacatatttatttcatgattatatatttaatgtataaattctattaaggccagaacatatataaatatatatatttgttcatgattgtagtgtcgtcagcacagtagaatccatgattctatgtttaaaagtttaagtcccatgatttgtcagttcactggatttataaattgggttgaaaaaagggaagctaaaggcttacattgtagtagtgttagactgacatgataatcgacaataaggtatacttacaacttggataagtgttatgtcgtttccagggtattggaaaagtctaccaatatttgatgtatggagtatatgttgggattttatgccctaaataaaacccatttcaatctaatctgatttgttatcaataaaatattagaagtcatttatgtttacatgtagttttcatgtttatggtttaatatatacaaaatctgttaagtccagaacatatagtcatttacaattatagtgatgtgaacatagtggaatgtgattgttgattatatgcttcgaaagacaaattcc

SEQ ID NO: 386515 - DNA, 2610 bp, Cannabis indica
tatccaatgaagttgcaagatgatatgcactctgaactgtaaagttccctgaggagtgatgatgccaaatcaatttatcttgtgtggggaaaaaactcagaggcaaggtgaggatcttctcaacatcaagagggctaaagtattgttgtagcaaaggaatgttccattgccgctcctcagtgatgagattagcaaccataccattaggaggtcccaagtaagagattggtaaaaagtttgaatgaccaggcagccaagggtcaaatccacttctaatagttcgaccttcaccaatcttccatctcagcccatgaaccaataactcacaaccccaacgaattccttgccatgtaagagaaggagaatggcccatacttgcctcaaggaatgagttatgagggaaatatctgcttttgagaagtttactaaggagtgagtttgggtattcaacaatccgccaagcttgcttagcaaggagagcttggttaaattgaataaaagatcagaaacccattccacgttcacccttagttttacaaagcaagttccatgatcgccaatgaatcttagaaccattctcattcattccccaccaaaagttagccatcatactttcaagttgattgcaaaagtacactggaaatcggaagcaactcatagcataggtagggatagactgaataccactactttgagaaggacctccctacccccagttgagaagagtttttcactccaagattgcatgagtttctaaatacgctctttgatgttgctaaacagctcccttttgtcacggccagagtaagatgggaggccaaggtatcgttcgtgacattcactaattggcattgagagttgccgatgaaagaaaatttgggcagccaatgttgtatttagagagaaggacataacagatttgtcacgattgatgaattggccagaagctttatggtaagtatccaataccctcttgatagcaaggcatgaactctcatctgcttgacaaaaaagaagactatcatcagcgaagagtaagtgggaaatcatgggagcccttctcgtaagtctgaagccgtgcagattgccttggtcttgctcgtgttgcaataatcttgagaggccctcagcacatattaaaaacagataaggagattacgggcaaccttgtcttaagcctcttgttggaaccaaagatcctgtcacttcaccgtttatgaggaaagaaaatttgttagtggtaaggcagctcataataagtgaaatccaaccactagcaaaccccattttctgcataactgcttctatgaaagtccattcaactctatcgaacgccttactcatatcaagcttgagggaggcaataccatggcggccgaaagtcttgttcttgatagcatggactaactcaaaagcaaccaagacgttgtcggtgatcaatctatttgacaaaaaggcactctgagtttcagatataaccaaaggaagcacctccttgaattttgcaacaattatttttgtgacgagtttagagattacgttgcataggctaatcggccgaaagtctttcacatggtgaggcttcttaatttttgggatgagtgtgatgagagtatggttgaaacttgaggggtcggctccatggttaagaatattcagaaccgcacgagaaacaagatcacccacaattgaccaacgttgttgataaaacatggccgacattccatcaattcccgggctcttatattcatacatgacaaattaataagtgtctaaggatcatttaatgttttttaactggagaatactaccataatttttgtacgataatattacttgaaagaaagtaaaaaaaataaaaacaaaaaacaaacataataagacaaacacatttattgagattcaataatattttctcaatatttattgcaatatagattgaaacaaataaagaggctacccaaggccaaataaatcagttaacttactttttcgtgggaagtttctcctagaagcatgaccgattcaacatcttccggtactgcaattgcaatgtctaatatatattgctagagacatggaatgggattgaatcagagaagaaataaggaaggagttttggaatgagaaagttcaagtatgtaaacaacatcaagctccagtcaaaaataaatgccctcttactgtttcatgtgctgatattgtttctctttctgcaagagacggcattgtcatggtatatatatacatacatctaactaatacatactatttaattaaattttagactaatatataattaacattacttatatatatacatgcatatataattgtaaaataatatgatgaatatatataataagtgtagttaggagggtgctctcttaatgggtattacccatgaatggataaaattaaaaaattttgagtttttatgcttaatttttctatctaattaataaaaaaatctctcatttgtatatcatatgggctgagattgttccatcagtaaaaaaaaattaaaaaaaaaaaaaatttacagcaagaaaaataagaaaagaaaaagttgaatttaagttaaatatttttgtatgaacatatttttga

SEQ ID NO: 386516 - DNA, 1544 bp, Cannabis indica
ttgtttttaacaaaaaaaaaaaagtcaaaatcgatcttatttattacaatataataattatttaaattccaatatcaacttatttgaattttagttacataaatattattccttaaaaaaaaaattacttaaacaatatatagtagaaaatagatattttttattgttattattaatttattgacaactataaattatagaaaaaatagaagaaaaaataaagaagattgataaatttagtgttttttatttatcacctttatattgatatatagaataaatataatttactttattcatgatttgaggaaatggggctgaagtatatatagaagttgacttgtgtttggtaattataatttaaaattaatgtgagagatgcaaaaaataattgtgtaatgtttgttaaattgtacgtaatattgttactaataaagaatatttttaaacacatcattcaaagttaaaagatatttctgagaacaaataatttaatttttttattccaatttattttattatattatttttttgaatggcaatttatcttatttaaataatctatgttaataaaatctgaaacaaatagaataatatggactaaaacgaaaggatattttcgtgaaaaaaagggacaattacatgctgtgcagtagatacaaagaacgttcaaattgttgaaagaagggtaatttcgtaattaagagcagacagtacagagacaaataggtaactcaggcaaaggcaattaattcctgctcagaataagaggggttattactattaactttttttatttcttgaaaaaaaaaaagaaatcgtaaggaccaaaatattttgatcggacggccagaattgactgttaagcaaaataataatgacgtctgcactatggtaaatggaaatgttctttctttctctcatctattttcctcgacttttcgcttctttttttttttattattatccctcaaaataacaaattttcacattttaattgtatttttaaaaatatatataaggtatttgcaaatcttcactctcttatattgggatcttgaaactcaaatttctggactgaacttcactctctttctcttctcggctaggtttttctttttccctctcatttttttttcatgagctaaataaccatttttgatctttctttctctttctttacctaatacaacgaagttttgatctccatatatatgaactctcgctcggcgttttctctttttatatggactttgatgaaatcgatgagaaaggaataagcggaatcattcatcatcggagtcgatattgatcggaatcgaaatcaattcattattatacaaggtcagagtattatttattgctttcttttttgtatcgaattaatgaatcaaagagagattgatcatttcctttctgttttgggagattttcaaatagtgtgccgtcaaaattttttgtttgattatagaattgtaaatcggattcttgatgacgccatcttttttcttcattttcattagagttgcactatctttttcgtc

SEQ ID NO: 386517 - DNA, 1432 bp, Cannabis indica
ggaagagaatgaagaagtaatgagattagatgtgagagctaccatggctggttaattcagagataaattataacataatattacagaacttgatgaacatttttatactatagttgagattaattattagaaatggtaataatgatacaaacaatatttgtcacgttccttttttatttttgaaaaaaaatattctttattaaaatgatgacaacaccaccaatctatgtcctaagacataaggcagtggtaagtaagtggtagtctgttttgcataattcaccaaaagaaacaatgtgatttttgcatagtagtgatgtcttgtcaatttcattttatcatttaaggtaatcaatttaatttcttttttcttcttgatggaacctactcaatctaatcggtttcaaaagttaattatatgaaaatttttggtttcttcaactagtacaatactttacacatatagtataaaaaattaaattaaaataattataatttaaatatttgttagtatataaatatgtatttttattatgattattattatcaaatcatataagaatttttaatgtttacattaggctactaatctattcgtgttcacgtgtcgtacttttgaacttcttgtgttgtgttgtgctttaattttttatttttttttcgtgttgtctggtgtcaatttctaacatcatgttgtgtcatgattgaaaccatatttttttgtacttgcttcgtgccatatcaaaaaacctgatccctacttacagcactacatacaagtagttcttccacattagtaattaaccatagagatgagagatcaatcatcttctatgagtaagcctaattgcaaaagtgaaaataaaacatatacttcttatactaattgcaacaacatattataattttttagtcaatttttatgtccaaaattatatctcaaaatattttttatagcgatgttcgttatagatataactgtaaatttttttaaaaatttcgagtagtttataatactgaaaatatactttttaatattctagtctacaacacgtgttcaaaaaacttcaaatttattttcgacattgtaaactattcgaatttttttaaacatttacaaggatggtgttgtaactatgacaaacaccctcatgaaaaaaaattgaaaatatgtattccagcatgtgttttcaagtacaaaggccgactaagaggttttaataaaaaattgacaataatacatttcattgattaatatattagtactctcgactttatatatagggcttaattagttggaacattagtattaagtacttgtggtgtctagtaccacttaaaagtgtcacaataaaatgacaaattgaattatgtattttttaaaatagtataaaatagtaccctaaataaatttttgttaaaataaaactta

SEQ ID NO: 386518 - DNA, 1239 bp, Cannabis indica
aggcctcgacagtgcgaattgtactgaccttggctgtgatgaagtcgttggaggttaggcaactcgacattaacaatgctttcttgaatggacatttaactgaagatgtttacatgacacaaccaagtggctttgaagacaaaacacagccagatttagtgtgcaaactgtccaaagctttgtatggactaaggcaggcaccgagagcctggttcgatcgattgaaaggaactctagtgagctggaattttaaaaactcaaaggcagattcgtcactgttcttttaccaaacatcatcacttgtgattcttatattaatctacgtggatgatataattgttacaggtaatgattctgaaaaactgaagccattcacttcaaaattgaatgagatctttgctttaaaagaccttgggcctttacattactttctgggaatagaggtgcatcgggatgagtcaggcttttacttaaactagtcgaagtacgttgaagagctgctgcaatgaaccaagatgctgcacttgaagtcgtgtccaactccaatgtcagtaggaagaacaatgtctattattgatggagtacttcttgagaatccaactgagtacataagtattattggagggttatagtatttgacttataccaggccagatatcagctatgcaacaaataaattaagtcaattcttaaaagctccaacaaatgttcatctcagtgcagcaaagcgtgtgttaagatatatcaagggaactccacatcacggcttacacattccatattgagaaagatttgtgctaacaggtttttctgatgccgagtgggcgtgttgcccagatgatcgaaggtcaattgcaaggtattctgtatatcttggtgatgctcttgtctcgtggtgctccaagaaacagccagtggtctctcgatcaagcacatagccctcgctcaagtaactgctgagatatcctggattcaagctcttctacaagaacttaacctgcctcttgacagtacaccaattacttggtgtgacaatatgggtgccagtgctttagcctcgaatcccgactaccatgctcgaacaaaacacattcagttggatattgattttatctgagaaaaggtgctaaacaaaactttggagattagatacattcccttaagtgaacaaatcgctgactgccttaccagagtcttctcacactcaatttcattttctgtcaccaaactcggtgtgtt

SEQ ID NO: 386519 - DNA, 1388 bp, Cannabis indica
aaggtggaaaatagggaatggaatttctgtcaaatgtgcttcagatctttggttgcctggaaatactactttccgtccttatactttttgtggaacattatatcactcatgataggcaatgggatcttaacttgctgagacaacattttggccaaattggtattgatcgaattctttctctttcgatcagccccaactctagagaggatcggttgatttggcatcattctgattttggattttaaactgtgaagtctggctaccacttggttgttcaattggataaaattaatgagtcttcaacttctgatctaaatcatggctggtggaattgaatgtgggctcttaaattgcctaagaatgttaaaatcttcgcttggaggtttattaatgatgctcttcctacacaggtcaacctaatgcatcaaaaattttttgctgttgccacctgttctctttgcaattgtctgcgtgagtcctctggtcatgcgctttttttctgcacctgagcacagcaagtttggtctctctcccatgtgtttagtccggatccacttatctcacgaatgaatggctttgagattttttcatctatagctgtagtgcatcagaatgatgttttggcaaaaatcctttgtctaatgtggtgcatttggacagaacgaaataaggaaatccatggtactaagcctaaaccgaccggggtaatctgctcttttgctgacatgtatgttcaacaattcttcttggctcaagctaagcaggtttctatggattctagctgcaattctattaacaatggatctgttagagcccctcagggcagtcatcctcaagctcctagtatatgggctccaccccctgctggatcatataatattaatatcgatgttgcgtttaatgctgaaggctctaccattggtattggggctgttgtgcgtgactattttggtgatgttgtgggagctttatcaaagcctctgtttggtcgttgttcggttcgcgaaatggaggcaactgctattcttcacagtttgtagtgggcgcttcaacacgggctgcaaatagattatattgaaacagattctctccttgttgcaaatgcaatcaataaacactcgcagaggggttatgtttctattttctatgatcttgttgctgacatatctcttttattgtcctcttttcctagagttctagtttctcatgtaaagcgtaatgctaataaagcggctcacgaattagcgagatttgctcttcgattggataataattgttcttggtttgaggaaataccatctctaatccactctgttattgttatggattctattcaataataataatagtgttttctaaaaaaaaaatgatattttactattttatat

SEQ ID NO: 386520 - DNA, 2905 bp, Cannabis indica
ctaataatattattttacattttcggtctccgagtgttgggacccaaaacgcatgatatgtacatacgacgcacaggtgtacaaatgtatttataacttctatcttgttcacagaattcgatttctctttttcttcgaacaatctactctaaaattgtcatgggtgggtcttgaaaaaggaaaaagaaaaaacattttagtcattaagaaattcgaaagaaacttcccactgaatagccctccaccatatgtacccaagaaactaataatatttaattgattcgaaaacaaataaattggtactactcactaaactgcaaaactctacggagagaaatggctgaattgtttgttaagcaatcagagccgtacgcccaagctcggcctgattacccaaaagagctctttgaattcattgccaccaagactccctttcacgaccttgcctgggatgtcggcactggaactggacaagctgctcactcggtgagtagattctcttttgctctatgattaatatcttcttcttcttcttatttttttccctcgctgagattaattgttattgttgttgttgttccatttagctatttcattttttttttcatatgtttcagctagctgagatatacaagaacgttattggaacagacacaagcttaaaacaactccaattcacaacatcacgcccaaatattcgttatgagcaaaccccaccagtcatgtccacaactgaagtcaatgaaaaagtagcaccggaatcaagcgtcgatttggttacagtagcccaagcgcttcattggctcgacctcccaaacttctatgagcaagtaaggtttgtactcaagaaaccaaacggcgtcgtcgcggcttggtgctataccctgccacgtgtcaacgattcagtagatcaagtcttggatcggttctacgctgaatctcatccttactgggactcagctcgaaaattagtggagaacgaatacagggacattgattttccctttgagcccgtggatgggaccaacgaaacggggccgtttcaatttgtcagtgagaagttgatgaacttggaggagtttttgacatatctgaagtcatggtcagcatatcaaacagctaaggacaagggcgtggagcttttggtggatcgtgtggttgaggattttaaaggagcatgggaaagtgatgaaggtggatcatatggtaaaaaggttgtcaagtatcctgtgtttttgaggattggaaaagtgaagaacgtgtaaggtaaaagcttttagtaatttgatgtttttccaataattgattttgtaaatcaaactttggatgttcttagaaattactatgtacctaagaagcaaaatagtgatctattgctaaattaatatagctcattttgttcaagtttgttggagtattaaaagtggattcaaatttggattgattcaaatttgaattataatatagcacaatataaaatttgtatcataataaatatattagatgagtgctaagaaaccttttatctcactctttattgtattctctcttgaatgtgatgacaaatgtcatattttcagcaaaatttatttttacttaataattagttatgatattataatgttattacaattgtgctattactatttctcataattatttaactaacttcttatttataaaagaattaacccattaagaataaaaatgaaaaaaaaacatatacatatattttaaaataaaataaagtaataattaatatttatttaaaaattgtaatttttttccttttaaaaaattatgcaatataaaaattaatacaacttcaatctttttttctttatgaaaaagtaatattttttttatgattattataattatattatttatcaatataaatacaccaataaaccatctaatatatttaggaattattacataaaaaatataatttgatactttatttacaaaaatacatccataaggtgtggacaatatttataccttttatgtaattttaattaccaaaatactgtattagaagtggagtgaattttcacttgtataagaagaataaaaaaataatttaaaaatagagtgataaatccaaaaaaaaaaaaaaactagtactatataataaaagaactaataaaatataaaatagtacaaaaagattaataataataatagttttaagtcattgaattttttttaattgtattaacttttgtatacattaaacttattacagtttttactttttgaaaaaaaaaaaatcttgcaattaatctatgtataatttaaatgtatatatattgtacttttttattttttttcttccaaatatatatttttttgcttgtaattaagtaaaacaaaaaaattaatcaagtaatcagattataataaataactagttattataaaataatttagttagaatggcataattataataacattagaatattataattaaatattaagcaaaaacaaaccttacttaaaatttgacatttgtcattatattaaacagagggtgcaaaagagaatgagatataaagtctccttagtaatccttaatatattatttttatatgagaaatgctaaaagacatctatgattatgtattaatatcgctattagttgaagccaattataaggtgacataatatttaaggctttttttcagttttaaccaaaaaagtaataatattgccaaaaatactttcagctggccaaataaacatatgtacaacccaaataaaaaaaattacacacactttcaacccaggatccatgcttcttgggcaactatcgcgcaaccatcgcgcaaccccaaacccaaccgaaacgaaaattcaaccagaaagagaaacaccattaatttcggcgacttcacct

SEQ ID NO: 386521 - DNA, 930 bp, Cannabis indica
agatgaagctagctttactggcttttaatctcaacaaagctaagcaaagcaaaaagaatagagtagtagtagtgaaggaaaaagactgttaaacttataaataatatatcataaaagcattttaagctggtgagttgctcttgttggagaagcagggcacgtgcaatagtaatttagtaattagcatttgatctaattcaaacaatatcaaaaaaatacaaattgcttttagatatatggttcaatttgtttgtaatagatcagattatcttaatatgaagaaattttgtagggaagataaagaataggtgaaagctttacaaagctttgtaagattaggagattttggtagatttttgaattatttgtgttttgttgttattactttgaataataataaaaattacatctatatcacagcgtgatccagagtctggacgattggcaccgatcccagatgcttggcaggccactcaccataagcagggcaaaggatgggtgaccgacactgctagagaaacatgggtatattttaaacaaatattatctttatattttttgtctaaataaattttataattaatttaaatattattgtttaataggaaaaaatgattgccatacgtgagaaacaaacacagtccattccaaatactgaagtgtcaggcaatgtcattaatccagaagacgaagatttatcacttgtgcaatctgtttttggaagacatcgtgggcaccaaaagggttatgggcgtctaattagcacaagagagatgacaggaccacctacatttacccaacctcctccacccagactggtgcatatgttggagctgatgtcatagctgatatgcaagagcggattagacagctggaggaattggttaggacaaatggtgtcactccgagaacgcagaatccacctcaaca

SEQ ID NO: 386522 - DNA, 865 bp, Cannabis indica
catcttcgattgtgagattggttctaaaaatagcaaatcgactacttgaaatagccttagtaaatccatcttctagctgatcaaaggatggaacatgcttcacttcaatgaggccctgttgaaccttttctctaacaaaatagagatctaactcaatatacttggttcgagcatgtaaaacaaggtttggagtgagcattatagtgctcaagttatcgcactagatcactgatgtccgaggcagattgagatgcaattcagagaacaatgattgcagctaggagatttcagcaaccacacttgctaaactcttatacttggcttcagtactagagcttgacatcgtatgttgcttcttgctttttcaagagatcagatttgagcctagaaacacagcaaaaccagaagttccccttctatcatcactgtctgtggcccaatctgcatcacagaaggctttgagatcaagttatgccgattgttttatgtataacctatgatgttgtattctactaacatatcttaaaattcttttgactgctagctagccagtgactttgtagagtattgtgcatgaattgacacactttattcacactaaagacaatcccttgtcttgtgatggttagatattgtaaggctcttacaattgatttgtatagctgagcatcttcaatgggatcattgccataagcagagagtctttggccacttttcatgggagttggattaggtttagcttcctgcattttagccttgcagagaagatccttgatgtacttagtttgacctatgaatatgccatccttttgttgcttgatttgaagtccaagaaaaaagttgagttctcccatcatgctcatct

SEQ ID NO: 386523 - DNA, 1156 bp, Cannabis indica
tttttgtaaaaaacaatgtctcgtttcaaatttcgtcctaggcctctcaacaccttgagacggtcctgacactgttcatttttaaacataattaatgaaagtaagatatataattaacttacaaattttgatagatgttacgttaaactaattaatacacgggtgagatgtgtaccttagtatgtataaaactatatatctattctatataaagtgtggttatgtaacagaattattggtttaacgatactttttgggtttctacatcaactttaatggaatatcttattaattaacataatattctttattaattttataatattattatatatatttaaaaataaaaattatgtacatattttatataaagaaattttaatttaaatttaaaatacttaaaatattatagatatttttaaatttattagtttaactttgaattaaaattttaaaaaaaattatgtaaatattttatataaaaaaatttaaatttaaaatatcataaatatttctaaccatattttaactttcttattatttattttatattttcaaatgaaatgattgtaataagaaattgattgctttctattttaattatggtgaatcgatttacacaccatgtttttcgtaaagtataagaatcaaaaccctttatatcaaatttacaaatccaacctatatatagacacactcaaatttaactatgtgagttttggttaagaatataatatacgttatctaattaagaaaattttaaaaatacgtgtatatatataattatatccaaatgacacaccaatgtagtattagctaaattttttttcttaaagatcaaaatctcaaatcccatttaaaaactaaaaaaatgcattacttaattaaaaaaaataaaacatacatgtattatacttaacatcaactaattgaaactaattaaaaaaaactaatgatacgtggattgcacgtaatatcaaccttatatatatatatttatatatttataatctttccaaacattgatagtaatggaatattgacgataaaagttatagaatgcagatagtaaacttcaattttctattattttttttagggtaaatggcggcaaaacctctaaaacttttatttggtttcacttaaccctcaaaac

SEQ ID NO: 386524 - DNA, 1110 bp, Cannabis indica
aataaagaaataatcattctattaatatagtaaaaaaattatttcactagaataacattctaataatcaaataaatgaatgaaatgaatccatttaatggtgttatgataaggacaacacacaacatgcatgttcacatttataatacaaagtaataactctaaagcagtttgtagttggataaatcataaatggaggttgcaacaaggatgctttttaacgttctaatttaagatacaaccactttaatgtcttaacactaaatcctgtaattagtacaattaatattacatatgtgaccactttgattcttgattttggtatccaaattatccaaaaagatttgaaaatttgatagaaatcccatttataattaactaaaaaaattatataaattatatatataaaagaaaaaattatttgtacccaaaacacttataaatgcatcttattttaataatttttaatttacataaaatatatctttaattatattattttttttaattttttcttctattcatattcttaaaaatatacctattaaacaaaagtaattatatttcaaatattataataaaaaattaaaataaaaaaaaaaaagacttttttcatttatacggttggagttaaaactttatgcacatatacaataacttataaagtaattcatttatacaatataattttttttattgcaaatttacagtgtttgatcaaatgtgtcattcaaacaaagaagaaagaaagaaaaaaatggtttgaagcttctcatacggcatatcatctcctttagctctgacaactttcaacaatcattgtcagagtggagattcaccagaccaccattaccttgcttctctatctctgtattgccatctaaactcatatcgaaaccttaaatcacaagttttctcaaaaattgaaactcaatatgcaaccctaaattacaaatagagtggtgatttgggtgggtttctttgcaactagagcaattgcatgggagagtggtgtgagttgtggcgtgggttgcgatgtaggctacaattttggcttcaatacagtgtgagatgtaagatacgctgcaattatcgtctctcacaactaaaa

SEQ ID NO: 386525 - DNA, 916 bp, Cannabis indica
ttaattaatataaattataaaaatagaagaaagaaagagaaaaaagaattaatgtggtttacctagaaatattttttatttgaagaatatgtttattagtttaaatttatttattaaaaaattaaatattaacaaatatctttttcaaatttgaattatcgttgttgaattataaatgatctcttaattttagaaatttaaagttttaactctaagcaataaaataacaataaaaattgagccttatgtaaatttcgtataatgataagaataataaaaataatatatataaaaatctagactttacatatacatattttcaaccttcccaaatgtattgcttcaataggatgaatgtataatttacaaatacatatatttcaaccttcccaaaatgtattgcttcaataggatttttaaaattatattctcctctttcacttaatattaattttaagattattaatagtgtccgagcttttcacaacaaagtgatggtttaagaattttgacgaacattttcatccaaaatcatagaattaaaacaaaaaatttacaaataataaagttatgaacacacaaaacctaattttcatatcgtcgtctcttctcctcctttattttcacctctgtaatattattttctttggtgatttacagcaactccaaaaggatttgtatgaggaagactcgagtcttctacaaacgacatcatcattaccaatattatacatggtgagaataattttctggaagaaatttatgagtttgcctttgattaaaattatgagtatgatattataagtggcaaaagataataattaaacggaactgcaaaggctttcaactgaagagccctaacagatttgaatcgcctcctccctctctcttgttttatcggctgtccaccatctct

SEQ ID NO: 386526 - DNA, 608 bp, Cannabis indica
ttgagttgagaagtcttgccttagattgactagcaaatttctgttccaaggctctccagacagaattcgatgtgttatagcaagccacagtagccaatattccttctgtcatagacgatcggagccaagacagcaatagttaatctttacgcctccattgcaagaacaaaggattatcaccaccattgatgagttttactggaggagcatcattactaaaaagtaaatcatcaagatcatgacctataacagtaggtatggcttatgatttctaggagagaaaattcgtgcgatcaagcttcagagtaagagaagctgtcagagagttcaaaaacggattccatggtggtcccgtcgaggaggactgagctggcaccacggcaggatcagaacctccagcttgagacgagtggtcaccgaaagaagtaattgatgcaagtcaagggctttgatattatgaagaaacaaagcagaaaagagaaaagggaagaacatagtatgtagggctgtacagaaattttcgtaaaccgcccaacccgaataacccgactaaaccaaaccgacaaaactgaaaaaaaaatacaaaccgacataacttgacaaaattc

SEQ ID NO: 386527 - DNA, 2308 bp, Cannabis indica
gagagagagaaagagaaagaggacatgtgtattccagtttcttctttggttttctctaatattaaccctttttatttctttatttacattaataaaatataatttctattcagattataatcatctagtaaaagacatggaaacttaactaaaatgaccaacttgcccccttaacacaaaaagataacaatatgcccctcaaggggtagtttggtcattaccaaaccccaacaaattcccaatactaccgaatcaaccaaatggtgccgacattaccaaaactctaaaccatataaagcatgactctctattggcccaacgtcgcttcccactgctactgaatacaaacacagaaaacgagaaattcacatatagcataattaccacatgataaaattaagtaaatttccataattatacaaatcataataaataactaattctcataaataaaccctaattatttaataatccaacatatcaacataggcggtctttacatctacaatcccacatcgcttgaggaaggtcatgtgtaatgattatgagactgtgtaggtataggattacatagttgaagagggcttaaatggattgaatggtactacctatattaacaaggtgtatcttgttttactgtagcccatcacaaaagaactccatagttaaacgtacttgacctggtgtaattttaggatgagtgacctcctcggaagttttcctaagaagtgtgcgagtgaggacaaagcacgctggaaacactcgtgttggtttgtagggtcagtcgacattccatgaagcatccaaagtgacgtactcatgtataagatccatcattccgtgggtgtatgggcctaatggaagcttgaagtggggacgttacaatggatccatgaattcaggctacgataaaacattactataaatttatcaaccaagtaaatatattgttttatcaattccttgtaactccactatatactcagaattgcactcttaaactcacaaaatgctctataaccaatatagatacgttatccattattataaccattaccgtcttcaatcctctatagatgatttataatttaggagttcaaattaccattctacccttcattataatttattcttaaaacatctggctcattgtaaatgatatttttgtaaactaatataattacaaaaatgagtgctctataatttagctacctttgaaccaaactcttaggagatcatcgtttcacttcttattgtagaagctatagatgtccatatatatgattaacactctcactcaattatactaccgagttcctaacatgtatgtatggactagacagtaaggtaagatggtaatagacaaatcaaagaacttgaataacataattagcttaaagtttaattgtttcaggatttaggtttaactaacctatgatcaactattgtgatttgaaaggataagataaccaacaatattctttgttaaatatgaagtctagatcggccttgtctaatgcaacaaatacattcaatcttatctacttttctaatgttctggaaaaaacataacacttgtgaagtgtaagtagatcatatcgtagattatctagtcagtgtaaatctagtgtcactactacaatttgggcttttagtgacactctttagtgacatgcacaaaagtgctaaagactaggaagaatttctagtgacacacacaattagactctaaactttcaatgttagcctcatgtaatgtgtgtcactaaaaacataaagtgtcactaaagagtaatatccataatttttctatttattttttttataaaaaatattgactaatagagtcacgccaagagagactaggaaagtgtatccccacatgcctggcgtgtcactatatgtactcaaccctaatttaaaaaaaatacatatattattaattttttattaatttttttttaagaatacacttatacgttgggaaaaaaaaaagctaaaaagaaaaaaaaaaaaaaaaaaagcttatataaaatacaatattaaggtttacagtaaccttaaattattattttttttaaaaaaaaatacaagattacattaaaataaatatatattgctgagttttaattattctctctctatttctcatttaatctctcattatttctctttccttataaataaaaaatcctaaattttctaaacacataatactcagcccctttttcttctcagccgcacgaccctcacttctcagccgcaccccttcttcttctcacttctcagccgcaccttctctctcaat

SEQ ID NO: 386528 - DNA, 1592 bp, Cannabis indica
gtagtgggtgtaaatttccccttataaattcttaataagatgaactcgtgaactataaagataactttaaaatcacataaaaaatcttcttatttattattgctattcatattattaattaccatacaatatttaattttgtagtttatttattacaaaaaagactaattatttaggtaataaaaatctgtgttaatattcgtattttaagaaaatcttctttcttaaaaacttataaagaacacttaaccttattgtgtatatatatacacgtataaatttatatatattgggtgttcttataaaaatatatatatatatatgtatatatagctatgtatattgtttgtactatcccccgatactagtctagtattagcggctaatatttggttcgtcgctaataataaatagcgaccaagtattagcggcagaaaatgaaaattttaccagcagacccctctgcttttaaaagtcttaattgttgtagagttgtagtgtatgcaagcaattttggtcaaaacttaagatttctattgcttcacctaaagttaaacatttgatgtggtgtgtgctttctcattccatcctagttgcttcttccttattctcttgacacatcattccttctcttatttgcctctttgtcatatgaaatcgaagattgtgaaacatgccatcttggaatgttctaatgcgaaaaaaacttggaagcactcctcattctttgctttttacagtagtcacaaggattatgacattaatgattacattgctaaagtgtttgacctatatgataaatataatttggctgtgttattttgtataatttagatgatatagaattaatgaaataaccttttcataataaaaaaaatcctttctcatttaaagctttatgatcatgttgttaattacttgtatgaatatgataatgctcatcattttggttttaagctgcaacctcgagggcaaggaaaagatgagcaggtacctcgacttgcctctggatattggaaagtcaatacagatgctgccattgatattgcatcaaagaagcataattttggagttgtggctaggaatggctgtgacaatatcaaggctggactagtcatttcaattgtaggtatggttcctcctgaagttgttgaagttaaagcaatccttgctgctctttgttggatccaagcaacaaggtttccagtctcaattcttgaatcagattgtaaaagtgttgttgataaaatttatagcttttattgtactaattatgtacttagtgatactattagttgtattaagaattcattattgttcagtcttggcctgctaatagttcatgttctaagagagtataattggatagcacatagttatgctaaagcaagtttagagttaaacagtaagtgtgtttggaatggttctctactgttagactataatgtagtatatgtaatatagcatatacaaacgatatgaaatgcggaaaactaattgtaatcatatcaataatatatgcaatgacaggatcgatatacctccagccattgatctttgagcttcaatccctgcgatagcttcggtattgg

SEQ ID NO: 386529 - DNA, 1185 bp, Cannabis indica
tggaatcccttctcacactctctttctacaactttaacaatcaaacttgacagatctaactttttgtcatggaaatctcaggttctcccaatctgttatagggcatgatttggatgaaatcttgctctctgataatcctcccccagccactttggtcactggtggaccaaatccattgtttagccaatggaaacgtcaagatcaactattgctttcttggattcgagcatccatgacagagggtgttcttgcttccgttgcccacttcacgacatctcattctgtttggcgtgcgcttgagcagcgtttttctagccaatccaaagataagcttcttcagcttaaaggccaattttcgaatctcaggaaagggggtctttccatttcagattatgtcgacaaaatgcagtccattgcagattctcttgcgattgctggttcaccaatctctgaccaagccatgattcttcaacttctcaacggtcttggtccggaatttgattccgtcgtgtctggtattactgcgaggagtgattctttaactccagaagaagtgcaggcccttcttctttcacatgaaagtcgactggaaaatcacaattccattactgatctcaacatgaaattgcaagccaatgtggccttctccaattcaagaaccaatgtgtacagaccccctcaccaattcaagaatggaaatcgtggcggataccgtggaccaaatcagaataataggcctcaatgccaactgtgcttacgatttggccacactgcccctgtgtgccactatcgtttcgataaaaattgggttccacccaaaccaggcgccaaccatccacctggtacctcatcaaaccctccccctcgtgcctttgtcactgagcatgaattcgactatgatccgcaagcatattctacatcgttcttgcctgattttggggacgattctggttggtttgtcgacactggtgccacaaaccatatcactgctggtgctgaaaatttggatacagcagtcacctacaatggatctgaaggagtggctataggagacggtaagaaattgtctatttctcatattggcaatagttctttgcagtctactcattctataccacttcgtttacaatctgtcttacatgttccctcaattactaaaaacttagttagtgtttctcaactaac

SEQ ID NO: 386530 - DNA, 2903 bp, Cannabis indica
aagtgacttgcacatccatggccgagtgaattttatgttgcatggccaaggaatgtgaaagtttttcacatggtcaagtgacttacacacccatggtcgagtgacttcatgatgcatagccaagggatgtgcaagtttttcacatgaccgagtgactacagatttagggtcgagtgactttcctgttgcatggccaagtgatgtgcaagtctgtcacatgaccaagtgacttgcacattaatcgccgagtgactttcatgtttcatggccatgggatgtgcaagtctttcacgtggccgagtgacctgcacaccaatggtcgagtgactttcatgttgaatggctaagggatgtgcaagtttgtcacttggtcgagtgatttgcacacccatggccaagtgactttcatgttgcatggccaaggggtgtgcaagtttcgcacatgggcgagtgactttgatcttgacatggtcgagtgaccttgatgctaacatggtcgagtgaccatcaattctacttggtcgtgtgaccatcagccctacttggccaagtgaccctcaagtttgggtttggttaaatggttcgtacacgcgtcgatctagtcattccttgcacgactcttaatgtggattttttttaaatactcgagactaatctatgactaatctgaagaattttcctttgtaatttttggggtttaaaaattttatttaggcccaattagtattgagcttattcaatgaataacaatcatttatataatggttaaatttctttattttgtgccttgtgtgagagttaggggtcattaatagcaggtatgacatactaaagacaaccctcttttacatgaacaactctaattgtgaaggttcatttaccttgtttggataattatattaggctaattatataagttaaacctaattaaaattgattagcaacataattaattcaaaaaatattttaaatttattgttcaattgattattatttgattaatttagaacatctacacttagtttgatgagataaattctagataattaatttataaggaaactcatttgtactttttgtaagtatttacttagatagaaaattaatatttaagttgaacttaattcaagatatataaatattggacaattattctgtgacatttaattaaacaagaaaattatatttacgatgaaaattaatttttaattagttgtacatcaacataaattaagaataactttcataatttattttattgtattttaaaaagtattagagttttgaagttaatatgtaaatatagaaaattaaatttaaggttaaaaattaattttataataacttaaattaattttcattaatatttatttaagataaatattaattaaaattatcatacaattttttttttttacaaaataataaaatttattataagatattcgatctctattgttggctttacgtagttactatttttaatcggattcgtctctaatagatggtcatcaatttgataattaaacatcgttagatctcaaaagataactattttctaggttcaaattctaagagcttcatcaatataatgactacatagagttgaatttacaactatgaaacaatggtagaagcacataacataagaataacattgattcttacctaaaatgagataacgttgatttcttattttaatcggatacggatacaatgttgtcaaaggttgtcagaatggtgtccattctagatgagctaagtactctatttaactaatagtatctctgactctcgtctaaatgggacactatgtatatcatttggtaaaaaacccttggaaaatatttgagatatttattttgtatcatttttaatatcttcattacttgttaaatgcttacaaatttctaaaattatgtgtatgaatttgtattgaactaataattgattttttgtttattgatgtttatagttctttaaatggcctttaatgatcccaacctgatccttactgccttaatatctttgcaaatgaacttgaacttatgaagatgactcttggttaaggtatcattgcacacttactcttggttaatgacaattccaaaaagctgccatggttgaaattttactttcaaaagaaagataagttcaattcattctcaacagtttattccctgaattccaccaatttattgtattgttcatgatgaataattggaattcatccgacattgacaagcccaaagctgaactaagagcttataaaaagataatagtaagggtaaggaacttaggttcaaagattattcccgacactaaaggaaaaggaaaaattgttgttaaagaagatgattcaaaattagagaaatctaatttgaaaagtcttataatttctgaaaatgctataccattggactcagttgaaagaattttggggcactcttcatcttcttcgattgttcttgatcgaaaaattgaaccaacaaaaagaacaacaaggaaaaaaatgaaatcacggttcttttcaattgcctagtcaaaatattttgaagatacctataagatgtttttacagtggtaagaggggacatttaaaatctaaatgtcccaaatatcttgctaccaaaaatgaaagtaatacttcttatgattttttctttgaatcatacgtttttaaagaatgataaatccatttggattgttgattatagatctactaaccatgtttgtacttcattataggttcttgaaacatgggagtatttgagtcctagcgagttgaatctaagagttggtaatggtgaaatggtttcggtcaaagctagaggaaaagctttcctcaagtttaggaataaattttctttttagacaatgttttatttattttaaaatttagt

SEQ ID NO: 386531 - DNA, 921 bp, Cannabis indica
aaaaaaaaaaagaaaaaagtaaaccaagcatattgatggctatatatgtgagagagaatgtgggatgttttgaattaaagttgaggtttatatagattcggatataacatagggttagtttgatagatttttttatttgtttatttatatattttttaaaatacttgctattagaatttcattagggtacaatagttatataaaatattttaatttttcttttaattttcataatcattcaaaataatattttttaagatttaaattaatttgttaaaatttattaaaaaaatattaaatttttctatttttattttaagggggtacaatttgatagttgtcaaagtttaggaagcaaagttatttatttatttatttatttattttgaataataggaggcaaagtacttatatattaatttacaaagacacattaaaatttgaacggaaaaatgggaaaaacctaacagaatgactaaatttctttaaatgtaaaagttcagagaaatttttaacaaaccatatatattagggagaaaattaatattgtccaaaatttagagagcaaaattactaattattcgaaaagaaaaaaatcaaaactaaatttcaaataaaaaatatatatatatttttaatttcatcatcttcattcattacatttcattgaaaaagtaactaaatatttctgaaacaatataaaccattcaatagcactgacatatgcaatagcatataatcttcatctatattacattgatttgcttaaaaaaaaaattattggtgtttggaaataattactttactggttggatttatgaagtaataattatatataaatttttatattgtttggcaaaatagtttgtaattacacaaaaaaaaaaaaggaaaaagccagaaaaatacaaaaaggaaaaa

SEQ ID NO: 386532 - DNA, 845 bp, Cannabis indica
tcattcttgctaaacatccaaaccttgtctcagcatgatgacgtctcacaatagcatcccgcttatcattttgacaatacccttcacaagagcaatataaagttctatttatcatcacaccatgcttatctttatatcttttactttttctaatgccaaaaccaactttataagcataagcattgtaaaaattataagcttcatcttcagtttcaaactccatgccaatatttggaattaatttctcagatatttcaaaatgaatcacttctatactctttatattattatccaccaacttatcttcattgatttcttcttctcccctttcaaactctaatttacgacgagattgaaattctatttccatagttttattatggtcatccataatttcaaaacgtaatatcctgtatcaccaaaataaatatataatattcacatatatttttttttattaaattgctatctttaataatacataaacaaaattattcatttattgaaaaaataaaaataccatacactaccaatatatataaataacctatatttcttaattaaaaaatttgtaaattttttaccttataataaatatatactagtatatattaaaaaaaagaaagaaagaaaaggaactcaagtataagaacgtcatgaagttcaatacaatttacagttttaatttcatacttgaaaccatttataattacaacatatcaacaattcaagtgaaaataaaaacaatagtaaaatcttaaaaagtagtaattatttttttaataaatatattataatataatttaaaaaaactaaaaacaataataagaatacacataccttca

SEQ ID NO: 386533 - DNA, 687 bp, Cannabis indica
aagaattcataatggccataccttgtacaaaaggcagtatttggaatgtcctcctctcaaattctcaattgatgatagcctgatcggaggtcaatcttagagaagactgtcttttcttgaagctaatcaaataaatcgtcgaacctaggtaaagtgtatatattttttattatcaacttatttaattcccagtagtcaatacacatacgaagtgatccatctatctttttaacaaatagtactgaagctccccagggtgacacactaggtcgagaaaatcctaaatcaagcatcctctaatgatgaatctttaattctttgagttccacagaagccattctataaggtgccttagaaactggctcccctctatgggctaagtctattgcaaagtctcttggagataactaattctctgccaggcattagggtttcaaaccttttatcataattatcacatggcctacctactttttcaattactctgtctgccacataagaataagtggccttagagttaaacaaaacagagtaataagagttatcgactgagagctgacctataataactgaagggctagcttctgttggaaattattttgccgggatctagatttactaacaagtatgtttgattaacatcctaatatgaattctaaagcaatgaaataaacacataagagttta

SEQ ID NO: 386534 - DNA, 1510 bp, Cannabis indica
tcctcgggtgggagttacttgactagtgacttcgccatttacaatgaaggagaagctattaatagtaaggcatcccattattagtgaaatccaagaattagcaaaccccattttcctcataacttcttccaagaaacgcaattcaactctatatcaaaagccttgctcatgtcgagtttaatagttgcaataccatggcgccccgatgttttatttttaattgcatggaccaattcgaaggcaatcaaaatgttgtccgttatcaatcggttaggtaagaaggcactttatgattcggaaatgaccataggaagaatctctttgaatctagccacaaggattttggtaaccatctttgaaatgacattgcaaaggctaatcggcctgaaatccttcatgcgttgtggtttcttgatcttcggtatgagagtgattatggtgcggttgaactgtgagggtcagctccattgttcaagatactgagtacagccgaagttacaagatctcctacaattgaccaattttattggtaaaacatggctgacattccgtcaattcccaggcttttatccgatcccatgttcttgatggcagcttcaacttccatagctgtgaagggtgcaagtaaagtggcattatgagcatcagacaccatattgggaatacattccagagtagtttgaagagccaaatcatttatgtcaccagctcgaaaaaagttcagcataataatcttgaataaccaaagaaattttagcatttgatttcactttgagtcccatatcatcaataaggaaattaattcggttgttggattttcgagcattcgctttggcatggaagaactttgtatttctgtctccacaagctaaccaatccactcgggagcactgttgccaataggtttcttcttgttctaaaagctcatcaagaatggtttcagcttgtttaagttcatcaaggtggctgctagaattaatgtaggagttgttgagtgtttccacctttttttggcattctttgatgttcttcttcatgctgccgtacttcctttcatgccaactttgtaaattttcagcacaggatttcagattgttggaaacaactgtaatcgggtctgaagtggttgagttcaaccaatgatcaacaataatatctttgtattcagggtctgccagccacattttttcaaatcgaaaatgacttctacgtttagctttgcaagtttgggcagagagaagattaaaggcagtggttatagctcgatggtccgattgatagtaatcaagatgatggacttgtggtgtattgaaataattctcccaatgattgttaacaaaacaccaatcaagacgttcttttattgtgtgcagggcttttcggcatttagactaagtgaatagatcaccctcaaatggtgtttcatggagattactgttgggttttatgccctaaataaaactccatttcaatgtaatctatttcatttaacatcaataaagaaacagaa

SEQ ID NO: 386535 - DNA, 657 bp, Cannabis indica
aaaacggatgaaaaatgaaaaaataggtggttggtcgagaatttcgtagttcgagaggaataatgactgctgattattttgaagtttgtagaagatgatagcagaaaagggttacatggacgccatatgtatttttttattacaattaaaaaattattatcttatgacgttgattattataaaataatctttattaaatttcattgagttacactccatagtgtcggttgataattagctgaagaaaaaaaacactcctctaaaagcttgttttgtcatatctagtgcaaatggattgtgggctcattaaatgcatgggtccttaagaccttaaagatacgtaggataagttgttcaaggcatcctcttacaagtagtagcaaaagtattcttgtattctttctacgcatcttgattgaattttagtagagaatattacatcccttaatttaatttaaacgaaagtactaaaatgtggaacacatatttggccaatgataagtaaacatatttacgatagatttaaatgagagttgaaacataagttagtagcacttgagttaggtaacgtttggtaacatttttgtttttttttttttgtaaaatcacaaaatacaaaaatgaaagtaaaatttttgtttttaaaaaaattatttt

SEQ ID NO: 386536 - DNA, 896 bp, Cannabis indica
actttgttctcctcctgtggttcatcaatctccccagggtttaaggcgaatgtgatatcatcttgtgtgatctgtaccgagtcttggaacaggtcacaaacttttgaaggatccattgtgtggttgtcgatggtagtaagcaagcaaggaaatgtgaaggtggtaatgttagaaactatgattcaacagtagtgagcgtttgagcagacactctagagcagaactctaaaaaacttccaagaagtgagctcctatagagctatatcggaacagacatcttattggtcttttttatctatctattgattagttgtctctttttttttttttggtgtgtcctgcttcattgcaaacatagctcgatctacagattttttgtttcatataatagtttcatattaaatcaattagtgtttgttttatttttaaattttagtattatttagattatgatacttttaaatttgaaatatatatctcttcttaaaaaaaattaatactgaacactaaaaattaactacaataatatatatatatggataaatatatcttagaacatctttaatactaatagagtgccaaagaagtactatatatattgctatatattaataatttttgtaaacaaaatcaaatgatgtgctaaaatttataatatactattttaattacaatattgcctatatatttaatttatcaactattattaatgataattactttttatgttaatttgtatcttaatttattattatatattagagcataaggaagaggtttcaatggttacatttttattgtaaccatcatggttacatttttttaattcattggattactatttaatggttgtgattaatttggaaattaaataaaaataaataaaaaataacttg

SEQ ID NO: 386537 - DNA, 1198 bp, Cannabis indica
atctatctacaactaaacctctaatacgaactagtaacaaactttgctagtgcatggaccacaccatttgcaatacgtgagatggcacgacaagaactaccaccaacaacagctaaaacaaaattaatctcttcaacaattaatttaaacataataacagaattaggattcttttgtttgttgagtgtgtattacatttacatttgctacattattgagaatcgtaataatactattggaaaacatatagtataacatagaaagagttattttgatataaaagtacaaaatataatatgttcacagtctctgaaaatctaacagggtgtttggctttataatttcgaaattatttttactttttaaaagcagaaaattacattttaaaaaacaataagagtgtttaggccatattttttgaaaacttagttaaaaaattaaaaaatatcagaatattgtgttctattttgaaatatttttttgtcaatattttttattttacattttctttctcatcactttttttctcatcatattatcacatcactttttctcaagtacgaggtcggggccaaggtctaagaccgcccgagtttgaatctaggtctgggtgttgctctgggacttaataggggtcagcgtctgaggccaaagtttggatcttgactgagttagggtttgtattgaggtataaagtatagagtaattgaaggaaattaaagcattctgaaaatacccctacaccaacaccacaaagccacaaaaacaaggtcaaatctgacctttccccttgtgcggataacaaggtatttccctcaaaaccctactccactttaatggtagtataaagcctttcttttcttcaaaacctagcagctgaaaataacccttcagcctctcttcttctttgctttaaaaccctagcagcccttcaaccttcgaataatgcagcagcccctttcttcttttcctcctttcttcttgctgcaaaatattgcagccaagccttctttctccaagctattctatggccgaccctacacacaaacaatcaactacaaacagtaacaacaaagatctaaaatgatctttgttgattatagaagagagacccgaaaacacaacaaggaaaaataaagaagaacacaatagagattgatttcggagttcccctcaaatcaagggtacatctccgtca

SEQ ID NO: 386538 - DNA, 785 bp, Cannabis indica
atatctttattctgaataggcttacctcagcttctatcttggaaactaaacattgtgttgaagtttccaagaataatccaaggctcattcagcttactgaagctagctagactgtcccaaagttctttacgaacttccattgcattacttccatacactgccgtgaccactattcccttttttcgcccaatgaatctgattttataatgcaccagctgctgagtctcatttaaaatatcaaaatgaacaaatttttcttgccaaataagcaagattctcccagaagtgacatcactagagtgataattccaattaggaaagctctctaccatcatgctttgaacctttacatgttttattttagtctctaacaaagctctaaaactaattttattcaacatacaaacaacaagaacaaccttttgcttttctttcttattcatgcctctaacagtccaccctattttattatttacttccatcaagaatttgtgtggaattaggggccattacctcttcatcaatcgcggcctgtaacgcagcatagccattgttggaattagtttctctcccatcctcctttgcctctttgaaatctgtttgccttattgctttcctcttaggagtgatccactcgcttccatcatcatcatgatcttttccccccatccttgtcatttttcccacatcaggagcctcttgattaattgtcacacttttaggtttttcatctgtcactacagcagcttcccctgtgtctcgaacaaccttttcttgcaccttct

SEQ ID NO: 386539 - DNA, 2368 bp, Cannabis indica
aaataaataagaaaatacttacgtgagctgcttctttaaggaccccgctcatcaccaactccaaggacagttcattgtctgccatggacaattgatcgctcacctcgggaagtgaccgatcaaggtaatacttgagcatgtccttgcctttcttgtcctccaagcttagcaccacggcggtagaggaggccttggtcgggctggacccatccgagctcccccctttggcactgtttgacttggataccttttgggctgaagggtccacaacaggcaccacctcctcggagaggtcaatccctatctcaaccaggcccttttccttcaacagagccttgtctcccctagatcgcttgggtggaggagttaggcccaaactgtcactagtccttttccttagaggttggagcaccttgagacatgattgcatataaacaaggcaagaaagctaaaggcaaatataatttaaagcatgtcatggaaaaaataaatacaagttaaaataccctacacgtgagcaggagcattctttcgaacaagtaaggacagagcctcatcgtttgaagaagcttcttgttcctactccgtcaggatggtttttccttttcctttcactggggcagatggccgaataggtcaatcaagttccctaatcttgatagcatgctcaagtggtgcctggtcacccggaagagccttcttcctctttttgcccgatttttcctacctggtcacttcgtcctggttaggcttggccttctttgccttcgtcacggcccttagcacaaagtctattgggaaaagtttgtacttgatgaaattggccttggtggccaggagaaagatgttccagtagcttatggtagttgaagaattctttgtgccctcttcctaagccccaaggtgatgggagggcgatagtacgatggtatatgctagagccaagtgtgtatggtgtcaattccttggatgaagcagtattcgtccacgaagttccctatcttgctcacctcaaagtctacggtgctcgtcaaccacttctcctcgatctgagaaaagtagaaatatcccgacctgctctgcttgggagttgatttcagatcaaaaagccaattagtatcatgcagggatggctcaccccatccttgtgaggcatagaggatgaacaaggcagacaagtacttgatgcccttaggagtaaactgggtcgggtagaggtggtagtaatctgcaattctttgatgtacagaagttagggtaacatagcaccctgcttagtgtgagcgccgaccaatcgtagtaaccctcccttggactggtcaccaactggtagtaatcacgcttgagcaaattcttcatcttttccttggttaccacggatggaggagaaatccaccaagctcctagtacgtcttgtcttctctgaggaacaaccttgttgtattccttggtagcatagtcttcactggcctccaggacctccttgacctcagacataggttttccacctcattaaaaccacgaaagggtaacctccgagctacaccttcctcctcagctttagagggagtatcatgacggacctcaccctaatcctccacctcttggacttcagaatccccatcagtttcttcttccttagaagcaggtcgagcctgttcctcactcaacattgtgacgagccgagctacatgtgggtcagatagagaagactagagcacagtttgtttggttcgtccaatcatcctattcttgaacagagccttgttggtatgtctagcgatggttgcgacgattttagcaatgattgtacctacaacagcaggatttggacgcccatcgggcaaggtgtcaataatatttggtcgtagaatatatgtctagttggatggtagatattgcctccaccctttcctaagctgccagatgaaacatccgtaaccttgaccttcaatttggctgaggtaaaaatggtgttgcacttcaagttctagggaaggtgtatgtttgctacttatctcctaatctttgaagcttgaattggagaggttgtcactagatgaagacagactagcacagaggtgaagttaatcctcgtatagtagttgaagcagatcatgatcgatacgatgttcgcttccctaaaactcaaaaaggttcatttaaaaaaggtaggacataagatgaacatttggcaaggataacgaacagaaacaggttggttatactgactaggtctgatcaaagggattaaaaattaaaattatgcatgataacgaggtttgcaatcaagaattttaaaatttagaattaagggttgattttcactaagcttcgaatgggtaagtgaaagtgagtatcgtggaat

SEQ ID NO: 386540 - DNA, 707 bp, Cannabis indica
cataaaacccaacagattctcctgtacccatgctatcttctttagtataggtatttatctacttggatttttctttttgttcttaattctagttcacaccatggctgacactattcaagctggcgaagttgaagctttggagcaagtagaagttgcagcaccagtagtggtgtataattcatctccctgggagatggatcaatacgcgaacatgtttagaaattatgagtccctctgtatgtatgaagaggatcgtgacctcaagagtattccaaacttgttctggagcatgctatctgttttcggggaatccctatggaagtgtgcagacgactttagagtctggagattggcccatattgagatgggagcacacattacacttaggatctatttttcacacttttatgcaaaagtaggtgttgctccattctcatttgtccccaagtctacaagttgttggctagatgtatcgtgctttgtcgatccaagaaggtagaggttgcatctctagaggaaatcctttacttttatcaagtaaaaccaaaccccatggagaagaataggagaaaaattgacctttatcatcttgagaaaagatacagagtgctggtttttccgaccagcactgtgaagtatatgtacaactttcaagactactgattttttaacactggcttccacgttgaagaggattccaacactgt

SEQ ID NO: 386541 - DNA, 1017 bp, Cannabis indica
taatataattaaaaggagagtagatctttactcgctatcacaagggggccgaacctctataataaatccctttgtctattgccttttattcttatttgtgcacacttagcaagcatcgtatatgcacgatcccgctgtcagttaatcaattttcaaggtcaacaaataagtaagggcatttttgctattttacatcacacacttatattcatatgattacatatatttcaaattatagccctaacaaaaaagttaataaattttggatcccaaacctaatttgagccaaaatacttgatgatgactataccgtgctaatttgtaaaaaattacctgtaataaggcaaaatgaacatactacaataatatagtccattagcacaacatataccaaaattaggattttaaccttattaggccaaaacaatgaaaatgcccctaactcataaatagggtcttaaatgaaataaatctcaaataattttacataattcattatattacaatataattccttatttataatttgttaatttagttaatgttgctaatccatttactaatctcaagatattacaaatataatatttaaaatgtctcgaaaacaactattagcaattacatatatatattttttatagaagtaattttatatttaagtcttatcttaacagataattataggtaatttaaaagatattaattgttacatagagagccagcgagaataaaatagcatatgttataatcatcttaaagataactaagtatagagcatgcacactaaacggaatacgagatatacgaatgtgagatgagtcaccatgtaaaaatatttaaaatgcgagatgaacttaaagaaactcacatgaagaattaaaagttattaacgagcaacataatttaggaagatttcgccgtgaacaaaattattattggataaaccaagtgatggttacttggcggtgttgggttttagtgccctaaataaaactctttacaatctcgattagttat

SEQ ID NO: 386542 - DNA, 748 bp, Cannabis indica
tcacctatagtaatttccaaacattaacgccagcaacgttctttaacttgatgtttgtgtttatagccagatatttctgtggctcaaatctttgaaaacaaactttggatgaaggtgatttttgagaagaaaccaggtgggtttactaagctgatagaggccttaagtgctttaggattcgaaatcactgataccaatttaacaaccttcaaaggagtaatgcaagttacattatgtctacaggtaaaacacaacaacaaatgtgtaaccctccgttgtctttaattttgtattgtttagttatccaaaaagttatatttaagttcattggttacagggattttctcgtgaattgcttgccgttgaagaaattaaggaactgttgcttaaggttgttaattaaggcacatacaagaatacagactggatagaatgattaggcatggccatgggctcttagcattagaggaatgttataatctaaaataatattttgtgaggtaacaattaagaaaaatcgacactaattcatacatttaaacatatataattataatgaatgggttatagaaagaatattatttatttggtgaagagtctaaactccattagtctattttgatccataccatttcacagtaatgaagaaatgaatgaagttttaccaaatccatcgtagccagcaaattaatgaaaccatgtacagattgattttgtgatctcagcccccatatttggtatagaatcc

SEQ ID NO: 386543 - DNA, 708 bp, Cannabis indica
taaagcacgacacgaactaaacacgacacgaaagtagtcgaagtttgcggaccgtgactggccaaatctataaattaattgcacagtcacgacatgacctattttttcaaggcacggtaggacagaattcctttttttatagctcagaacgatacgatcctatattttaagaaacacaaaaaatatatgttgggttagcatgacctgcacttatttacaactatgagtatacccatcacggtcggccctatgttaattttggcctaagtcaaaaataaaaattggggcccaatgaaaaagtgattgctattggggtttgaactctcaacctattgtttattaaactaattaaattaccactaggctacaacacatgtttagcattaaaagtattattatttattttattactaactatattttaattttttcttcgtcttagctcagggccgaccctaacacccactaaagttgtgatttggtagaccccctactttttttatgatcgtgtatgttataattatttaagattacctgtaatttttttttaaaaaaaatatgagtagtttctaatgccaaaaataagatttaaatattgtattgcatgctcggcttttatttcttacatggatggtaagtaacttttctttttattaggggaggatggattcgaacttgggacatcctctttgggaggagaagtgtgga

SEQ ID NO: 386544 - DNA, 1103 bp, Cannabis indica
ttttgttttttttttcaactcaccaaagaatagtgtcccaaattaatagtcactctcatattagtctctattataacttaatattcggatttttcggattgaagatgagtgtgtttgtttattttttactttataagatcatttgtatatgtatattttaattatatttataaaattaaactttataatggtttaaattaatatgttgacgttgtatcaaatttggtctaaaatataatatggactaaattttacactataataaagatcacttttaatttacctttttgccattcattaatataattaataattttttatatttttatttatatatttaatataatttttatatactttcaataaaaatttaatatttttgttaatatttttatacatctcaattaaaataaaatttattttacggttgctgtattgaaacacaattataaaatttaagtcaaatataatattaactcatttttttagtcaaatatagcacaaaacttacaccatacattggagatagttttaaaacaatatttaaacctaatcaaaaagactttttagttgttgtagtagtaagtaccaaagataaaaggatcataaacaataatgagaggaaaaagagtagaggactaatatataataaagggtaagtctatactacaatctctaaagaagtgttttggtacaccttttatttgtttcagcatatggaggatttttagtcaatttttttttttatcaggtacattatagttatttagaaccacttgtaaatttttcaaaaaattccaaataatttacaatgtccaaaaaaaaaaagatataaatattttgttgcgcacgcgattattttttcttatacgcgtggtatgtgactttaaacttaatttttggcattgttaactatttcaaatttttaaaaaatttactagtggttctaaatagctataacatacgcaattattaaaaaaaaaaataaatagactcatttttttagatgtcgaaacacaaaaagaatctaccataacggccctttagagggtctactacagaaatttcctataatctaaaaaaaaaaaaaaaacgaaaaaggt

SEQ ID NO: 386545 - DNA, 1392 bp, Cannabis indica
aagcctaatttgagaaatcagaatataattctacactgttataatgttacacagagagaaaaaaaattatttttttgtcaagaacagttcttgctcatgtgttgagaattcaacaagaacaaattatacactgttttctagtagcccacactactccttgtatgtggtagatcgattttgaagactatgatgtgagatttattggatcaaacttacaaaaagttttgaggataccctgatagttatcgagatgtatttatttccatgtaattaatatttcagatttaatgtttatacatacggtgagttatggtacaatgataattgaatatataatttttcgttgagtacctaatttagtaccataaaatcaacaattagtatcaagagcggttccattatgtatatacattgaatgttatgagttttatgcatttacatataatatgtatgtgatatgtatgtgaatggatggtaatataattgtgaatgtacgagaggtgatggattgttaattttatggtaaaattaggtgtagcgtgtaggtcttgatattatttttttctataaaataatgtaagccaattgtggggcatagaaatttttatgtaaatttttattttctaaaattatttttttacataaaaattttacaatgtaatactcatggcatgagagctcagtttctaatctcgaaacctaaccatgcacaaccacaaacccccatgcatgcgagctctcatggaggaaccccgaccatgcacagccacaatgtggcttcaggtttcgtgccccatgaaccatcgcatgcccatgcatgcatgtgcatgctacgcatgaaggacatgcaacgtccatgacctgaacggaataagggatttcagtccctgagattgacctcgaaggtcaacatcatggcgtttggctgccagtcctcctccattcttggtccacgaccgaagcatgcatggacggtttggtccagttgtggagacccattattgggttcgagtttgacccgctagttgatcatccttttcgttgtcggccataaccaccatggctgtggtggctactacagctgccgaccatggtgaccagtcccctcctatatatacttgaacccactatattatatatatatggaacacttcttaataggtattatcgatgaatggttactaaataaattaaactataaatattaattttaaaaatatcaaactatcgaattttgatctaataacgaataatgaaatcacaaattttgaggcttttattataactaaattaattataattattaaagtggttaatatgtattaattctgaaattaataaaataaatacattaacctaaaatagtgagtgggagaaggagtacatgtcaat

SEQ ID NO: 386546 - DNA, 1484 bp, Cannabis indica
tatactatacaaaaaatagataattattacaatgaaagaaatttgggaatattaaaaatttaatcatttggaagagtttttacaaaggtaacaattaattattaatttagccaaagtataaaatatatatggtactgaaaaaatagcttcagaaatacaccaagaccaaagatgcaaggaacatttttaaggaactgagagttaaaagatatcattgatagatggccttagcaataataacggttttgatacaagagagacactcaaaccaccagactgtattagttgttgtttatagaacaaatttagtcaaaatatcagcagcaacatttacgacaataaaataaattcacaaaagattagaagaagctttaatatatggtactttttttaaatgtgtatttggacaaaaacacgttttaatataaacaagattaatgtaaattcaataaagatggctacgtctacggttgaaacttgaaagcaattcattcattcattccactccgtcaggattggcacgctaaatatgttgttagagccaactttatggtttcttgtcgtagttgttgttttaaatgggaattaatagttagtgtgtttcataatgtaattggagaataggaattagataagaaagggatgttagaatctctaaacaagttttcacttttacttttattgggtgctccaaattcaattgtctatcaattaagactgattagacaattatctttttagtttcaccgtaatcaatggattagattaagactaaacacacacaccaatcctatctcatttccgtgaactcaaatgagtcttctttttctataatttgtgtttacagtaggtatagtggtttcaagctttaacaacaccttaaaccaaaattaaattagatatttttaccaaaattattaattttatttttagaaaaattaattttatattcttattattatatctttttaatttttttcttcataaataaaatttaatttatttataaaaatctttcgtaaaaataaatcaacaattataaaaatactcaaaataaaccacgtgttgtgtagtggtaggaatttcctttaccgtctttgctggaggtggtgccatctgtataatgggaacccttgaggtcactatcgatgacccaattaaggaagactgaggtataagacttatagctaacacgtggtccttggaattgccataaatagccgaaggggtggggaaagaatctgcaccacgtgatcccttcttctcataaaaaaaaatactcaaaataaaataagtataattataagaaaacattatgatattatttaaatttattttatatataaaattttttatttaaaaaattattaattattaattgatagtccaaagttttagatttaaaaataattaaattgtaatgttgacatttagtagtgaacgaagaaagaagatttttttttctaaaaatatatgaaatatat

SEQ ID NO: 386547 - DNA, 643 bp, Cannabis indica
atattttttttattattattaaagaaaaaaaacgcaaattttgtgcaagtttctactgatctttgactggctcgaattctcgttacaaaaataaataaatattataataatgaaaatactcacgtaaagagaatggcgacctgagaggccaagaccacgaaccaaaccgatgcactgattctcggcaccggcgaagccgtttcctatgatgacggcacgtttgataacgccgtggattccacgggagaatatctccggcgatccagaaattccgattgtaacttcggggagcctgattggcctcatttgaggaggctccaccgcaagcaacctgttctgcgttttagagaatcttattcaaattccatggaaatttcatgatcatcattctggttctagttgcagttgcactgtcggaactgtttttttgcaacacttgggccttgggatgacttcttgggctttctagatttgagcccagataaattgggccatcaatgtcgtaggttgtggaggaaattagatgtagattgtacaggggtatgttgaaaataccacttttattaatcaattaatcaaatttacctctaattttatatttaattgaaacatacctgtttttatatgtattgtaaccaaaata

SEQ ID NO: 386548 - DNA, 1673 bp, Cannabis indica
ggcataaaacccaacaaaaactatgtgcttgcgagaatcacgttgaatttcatgcagtaaactttattttccatgaaggaagcataaagtcgctctaaaattcaagagatgatttctctttaaaataccaaaggctgcgaaacatcactgggtgtgtgacagatttcaagcagtccttctcttccaggaaggagggttgaagatgtatcgaaccccaatgatctttcacacatggaaaactacgtgcccacaagaatcatgttgacttttatgtggctgactttggcttctgtgaagaaaggctgaagttgccctaaaattcaagtgatgatttcgtgttaaaagaccaaagggtgtgaaaaatcattgggtgtgtgatagacttcaagcagtccttctcttccaggaaggagggttgaagacgtatcaaaccccagtgatctttcacgcacaaaaaaattacatgcttgcaagaataatgttgaaatttaggctgcaaatttaaactttcgtgaaggaaggctaaactcgcactaaaattcaagctatgattttggtttaaaagaccaaagggtgtgaaacatcactgggcatgtgacagaatttaagtagtccttctcttgcaggaaggaaggttgaagaggtatagaacctccagtgatctttcaggcacaaaaaaactatgtgctcgtgagaatctgcttgaattttatgtggcgaaatttttcttccttgaagaaaggttgaagttgcactagaatttaaactatgatttagcattagaagaccaaagggtgtgaaacatcgctgggtgtgtgccagactttaagtagtccttctcttccaggaaggaaggttgaggacgtatcgaaccttcagtgatatttcacgcacggaaaaactacgtgctcgacctatccacgctcctagaagcctcagagaatgtgttcaattcgtgcggatccacctagggcctatgaatccgagatttccaaaaaatcagcttcgggatatcgaggacagcttactcctcgaggggatctcagggcaccccgtagtccgaaaactggcatacttttgggagtaacccccaacttaatacacgagacaagaactcaggcttcttgcactataactgttactctagtagtgattccttaactagtttataatgtcttgagttgattttttcgatgtgacctcaagagttatagttacatcataatggcagaaattcctgtcaacagccttaaccagaagtgatttgcattaactacacagtattctaccaactgtaccataaccaggcttgactagaaacctagcaaactttgatgatgctggaggaaaaatcacagtcgtcaccactgcggggtcttgcaatgttagtttttgatcaacttcacggctcaacgaaaaggcagtagatgtagttgacggtgacatatctagcaccgacattagcaccggcaccttgattgaatgttgaaggatcagtgtagtgatgaaatgcttatctttataagccgatgatatcaattagtcctccgtagcttacttttgttgggttttatgccctaaataaaactctattcaatgtaatccagattattcaatatcaataaagtaacagaagtatttttcattcatttgtgtatgttttggttcacctt

SEQ ID NO: 386549 - DNA, 512 bp, Cannabis indica
caagattacatattacatgaaaaaaatatgatgacatggttgccatattcaagaagaaaagcactacaacttacaaagttatttgctcagtaagttgtcccaattcctttggtacctcccctgacaatgcattgatgccaaaactcctagtaatgcaaaaagaaaagaaaaaagattaataaagaagtagtagcattaacaatttaacaatttaaatctatttggttcaaagctcaaattttaagttggcttacaggtattgcatcctagtgaggtttccaattgatggagaaagagagcctgtcaataagttcttgcgcaaatctctaccaaagatggagaaaaccaattaagaaattgtaataagagattgacgctagcaatttttttttaaaattccttgcaagctatatttattgggttaatttcacacatgcacaaaaacaacaaaaatacggtttcatggaattttaaacatttttacgatttttttgattttatttacataaaat

SEQ ID NO: 386550 - DNA, 1176 bp, Cannabis indica
ttttattttttatttttaaaagacaaaaaaatgtgttgcataactttttttagtttgttatttcaaaaacaaaaaataaaaacgtgtttcgtaaattttatttttgtttttgttcatttttatttaagtgaggtgtaagaaagaaagttagggattagggttctagggtctacggtctaggtcaaagttttgggtttggctctaggtctgagttcgaggtctgagtcaaagtttggggtttgggttcgaatttgggctgggcccaaatctatgtcaagtcaagatccaggctaggggtctaggccgagtttttttggtgtaggattttatgtcctaattaaaaccttaattcaattatcaacaacgaaaataaaacttattttaacttggtcaatcacattgcttacatatctaatatcatgattatatgttaaatattaaattatactaattcccgagcatagagataatcacgtgacataaatcacagtagaccataattcttattatatgataaatatttatttaaagtcctaagattaattaatgcactcaatttatagtagcaagtcattctacgataagttatacttacactagcaagtgttatgctatttccaggacattggtatagtaaatattatttatcgagtttttcaaaaatgaataataaacaagatttagagctttaagaagaaataaataaaggttaagattaaagatttggttgtaccctaatccacgagttattatattatgcttgtaacaatggagtttacaaatgtgcaaagtcttcactatgatatagagttatttatttgggctttaaacaaaaaatttctaaaaaaaaaaaagagtggtgaatttggtttgttaattttatatttttgtctatctttttatttagctagtataaccatcgagtctgttttaggttttaattaagaataattaatattgctctaattttctttataaaaagaatctaagtaaaggggaaaattggaagttcaagttggaagttcaaagctgaaagttcctagattgctaaactcagtgttgtaacatcttggagtatctttaatgacgtgaaaagtgttgagttttgtaccctaaataaaactcatttcaatataatcagatttactgattaatataagatagaattttttttta

SEQ ID NO: 386551 - DNA, 1108 bp, Cannabis indica
aaaaaaaaaaaaaaatgaaaagtagcattagatatatactgaaacacaaatttatacatctttctcaaactatagtttatgtatagaaaagaaaaaaatatatgactatactaaatacatgcatgatttatcactttaaaacaaatttatacattatcaatcatatttatagtttattgattttattgcagatgatcattataatcatcgtttgatcattacccgaaaattaagaagacaaccgatcggcgggccgccacctcctggtgctggacacaaataatcaatacagcttgtaactttacatgaatctattataggtttttacttcgtctttaacacttggaaaatcaggtactgaagaattaaagcttctaataaataagtttttacttcattttccagtttgacactttaagaaagctgctattctttttgaaaaagaagtttgttttatataataacaataattataaaagagtatgttgtaaatatccttacaaactatttataaattataagctgcatgtactatatctatttaccattttttattttttgataacacatctagctattagttgtttgggtgttgaaagttttcttatttatgtattcatagttttctagctgtaaacgtagacgagttcttttttatagggcgttctctcttgtcaatgttagaatttattaaaacagtgaagaaatacaaataattaaagatttaatcgtatttttaaaagtacttaatatagaaaatactaaattatattttatagaacctttgccaaatcaaaaaagaagatgatgataaaaatgaccaaaaacactaatttgagactattattgcagattgcacagaaagttgtgatattccaataatacactatttcattaaagtattttttttgacggggaaggggagaatacagaaaccctaatatttattcgggacagtacctatttatagactcattatataataaattttgggtatttataatttgacccctcaataatttataaattaacttatggtatctacatattatttccatgacaatttaatacccttttgatatccataacataattattcacttaattt

SEQ ID NO: 386552 - DNA, 2204 bp, Cannabis indica
taggaaagtcaagattccatattaaaatcaagttctcagtcatccatattatcagcttcctaaaatagaagttgtaagaacgaataagagttcatgaattctcaaatttagaccgatatgataattgatcatagttatgatatgaattaggtctttatagtaaacgactagtttgatatgacaacttaattacatatcggtcattctcatctataatctttattatatacaacactttcatcgagatgtccgtctacatcagtgatttgaatcaagactgcttgcactgaataacggacattagtaaactatactaacaatcgttgattaaagattctataactataatatgttgctgactattttattcataacttatgatctttgttctccatacaatgcaagtcacaacctcatatatgaataagaaatttcttgatatttatacatgaattattaataaataattcaacattgaaacatatattaaatttttttagcttatatttgtaattaaatatctttacaggcttttcagaacgtaaaccctaacaacgttgtatgtcttttccaagacattggtaaaataaacttgatatcagatatataggtttatattagacttgaccaatattaacattacaacatatatcataatcttaccgttatatctattttaagtcaatatcactaagtttatcataaatcaattaaatcggaatcttgacatgattaagctaatttttgatttgagctctttgacctattccttaccatcttaccctatggactagcccatacatacatcttgggaacttagtaacataattgagtaggagtgttagtcatatatctatagcttatattatgttagaagtaaaatgataatttaattttagcttggttgaaacatataatgatagaacgctcatttcagtaattgaatcagtttactaaaatatcattatgtcaactaagtattttagtgataaaatataattaaagagtaaaacgataattttaaatcccgattacattgtctatggagaattattgattgatatgatataaatagtggataatttataacatatctatattatgtattgttatacctaatttttgagaagtcaaaaaagtcaaccccacgactttgacctagactcataagggccaaataagttaagacatcctacttaagggccccatgacacctctagaaaattcataaatgttagaacctacacacccaagtgtgcccatcctaggatttatgggcccgtacgatggtttttatcctagacacctcaatccgacaatgaaacaactaaggacttgagttatttcggtataaaatggcaagaactttgaacataaagtcaagatttcacaagaaggccactccataatgcattaagaagatggcataggtcgctactcttagagcaccaaagaagacttatccaaatgttgtctctcaaccccaaggagtacaacacaagtgaaagaaactaatttttacccaagaatcattctagacgacctatgccaactttgtgcacaaatgagtggcataggtcagccacacaaaatggcaaagagattttgtgcccaaagtaatttttcatcatcaacatatcaaaaccaagtgatgaggaaggcctaagtggtgtagaaaccacctagccaacatgtgccatctttgtgcacaagaagatggcataggtcagccacataaattggggaggaatttctttgcctaaagtatatttccaacatcaacataccaaatacaagtgagaaaagtcaccaagaggtatagagcaccaatgaccaacctatgacatctttgttgggctttgtgacctaaataaaactctatttgaatgtaatcttttctattcaaatattaataaagaaacaaatttaatttcattacttgtttaatgtgttatttggttcatgtgatcatttattactaatttgagtaataaattcatccaaacccttatcatattgatattcttgtttattgtgttgtcaacacagtggaaagtaaacaagattgtatgattaaatgcattcctagatttatcagtacacaggatttaactgatatgataatctacaacgtagtttacttgcaccttggagagtatgcatccgaagggaccgatattgaatttgaactagatatgataatc

SEQ ID NO: 386553 - DNA, 1690 bp, Cannabis indica
ctttacctttttcgtttaagttaattttagtaattagtaatagattactacttaaaaaaagttaaaagtaaaagaaagaaaaaaaaacgaaaaaaattacaaaattaaaaactaaacggttaaagttagcgactagcatttaaattaaaaataaaaaaaaaaaaaaaagaaaaaagagatgcgctgttgaatagtggcccaagaaaagaattgcatgcatttatttatatataggtagagcattaccgcttatcatatgatttaaattattatcgttatatttgttaatacttataatattatgtatataaataaaaaatcccctaataataagggtttatatcattttagagtattttcacgaattaccagttcgactttatagtttttaaaattttattttagactttgtattttttaaaaattacaatttggactttaaggtcaatttttatttgttatgacaaaagtactcttaattataaaaaaaaaattatattatttaagaccccatatgaaatattttagtatattgacacctaatttttaaaaactttacttcggacctcacttttattttaaaaaaaataaataaaaataagtaactaaaattatttcttagtcaaaatatttcctaatgtaaacagattaatataaataaatgagaatttaatactcaaaatttaaacaaaaaaatatttttctaattattaaagaaaataaattttgctacaaaataatgtttttaaaaaattaagggtcataatactaaaaatatatgatccgaaaaattgtataaatctttttataactaagagcttttcggtcatagttagaaatattttgaccttaagagtcttaattgtaatcttttagaaaatataaggttcaaaatagaatattttaaaatatgaggtctaaattggtaatttgtcaaaatatggggtataaagtagtatgaatcctaaatataatttttttttttttgacgtaaccttaatttaattaaaatagtatagagttgaaatatatgtcgattataagaaagaaatggagagagaatagtttaagtgaaaataaacagaaaagagtgttataaataaagtacacattttttttttatgaaaaactgatgtgaaactgatagaaaataggaagtaaaaaccacgttacaagattagaaaaataaaacattggaaccacatgaattccacatattctctatccgttcccaaagctttctttgccaagctatgagctaggacattttgatgtcgtgggatgtaatcaatggaggccttgggaaaagagacagagaagtaacaatagtctgaatccaatccgagagagtggatctatctttccatttatgcttgattttattcactaaaacttggcaattcaagaagataccagttaaaggcaaattgcacttcttggcagcaggtgagggctgaagaaagggcttgagcttcagtaatgataggagctacggtatcagggtgggaagatgacagagtagccaccacttcgcctttgctattttgcacctcaacaccaaaacctatttgcaagctgttttcacaaatggtagcatcagtgaaaaggttttaaaaacctagaggagggggcagcaagagacaaatgagtcaggaataggtctatgttggaatttattttaccaggatct

SEQ ID NO: 386554 - DNA, 1745 bp, Cannabis indica
ggcataaaacccaacagtgtagaccataaccgattcacttggagttgctggttcatctattgatgaacaagatatcatcttacaactccttaatggcctgggccctgattatgactcggttatctctaggattacttcaagaagtgaccaactgtgtcttgaggaagttcaagctctgcttctggcccatgaaagcaaacttgaacatcacaattccatgtctgatctcacactcaaaatgcaagccaatcttgcatacaacaacttaagatcaggttcctcacgcccttatcagcccccttgccgtagttctagttctgacccttacaatcgtgctcaaggccgaggcaatggtaaatcttttcctccctctcgcctcatttgtcaagtttgcttaaaatctgggcatacggaagttgtgtgccattacagatttgataataattgggtcactcccaagattccagcatctgcccctcgtgcctttcttgctgaacatgaatttgaatcagactctcttccaacatccaccactatactgcctgattttggagatgattccatctggtttgctaatacgagggctacaaatcatgtcacttcttctctcagcaacatggattctacaattccttattctggccaagatactttagctattgaagatgataagaaactcctaatttctcatattggttcagcttctttaccatcctctaataattgccccttacatttacaatctgtcattcaagtcccctctattactaaaaatcttgtgagtgtctctaaactaactgcatacaacaatgtttttcttgtatttcacaaacattggtgctttgtaaaggacatggatactggccaggttctacttcgagggaaggttagagatggactttacatgcttggagatgaatcttcttcaaaaccaaaaaaggccttactatgtgaacttttttctatttttaattccacaaaatccaatactgatgtaatgaactcttgtacttcagatgacaataataataagtctcccacttccacttatgtgtctagcaatgttggaaattattttaccaggatcttagatctactcacaagtatgttgattaacaccctaaatatgaactttctaaaacgatgaaataaacacatataaagtttaggaaaccttacattgggtgcagcggaatataatgactccttccgttcagatatctagcccttgattcctttctgtagcagagcattatcaatatctgaacctggatctctttctctgaatctttgatgctgaaactccttcttgctgaaagtctttcttcacgatcttcctcactatgattgaggtatcacttgctgtgtgtgggcactactcatacactaagaatttcgaaatttaagagggaagaaagagagagggagtggtcggccagatagggagagagaaggctcaggtttttctgaatcagaagtgtcagaagaaaagtgtaattttcctgaagccttcactatctatttatagcattccactagggttaggtttgaattatttggcattaaaataatgaaaatatcagtttaaattccctacaaaagtggccggccctatacaagtggatttgggcctcactttttgcaattttgcagttttatcttttctgcatctgattttctcaaaaacgccaattttctaattcaaccatttaaatgccaattctaactatttaataactataaat

SEQ ID NO: 386555 - DNA, 560 bp, Cannabis indica
aaactaacttctgtagtttcagcagagatcacaatttgctatgtgatccaatcccaaacctctatgcagcaagtaccatccatatagaaatccaaatcaaaatcgaccaacaaagtaaaatatagtagtggccaactaacaaagaggagtgttgtataaaatcgtggtttcaaagatttgatccgtaagtgttatctcactttgatttgtatgattttaaggctaagaaagaaacaaaaactaagctacttgagctagtttttttttttcttttttgcttctagaaatgatatttgatatgctttcaagtatcattgtgcgtgaagatcgaaagcaatcattataattggcaccactcaaagtcaatccaatatattaactttcttacaaagattacacatttgataagtcagtgactaaatattacataacaattgatcaaacaagagaagcaaatagcattacatatattacatacaacattatcatgatcaaatattttcctaccttttttttttccaaataaataacttaattggaaagaaagtaaacaatcacaa

SEQ ID NO: 386556 - DNA, 1529 bp, Cannabis indica
atatctcacagattaccattgctatcttgcatctaaccatttgtctgtttcttcttaggataacatgcctattacagctcattccttgtcacaggttatcaactacaccaagttatctccacagtttcgagcttttgttttagccatttccagccatgaagaacccgtttgtttcagccaagccaaaggcattcctgaatgggatcgagccatggacactgagattgatgcattggaaaggaatcatacttggattgtagtcactttgcctgctgacaaacatgctattggttgcaagtgggtgtacaaaattaaatataatgcagatggctcaatagagaggttcaaagctaggcttgtggcaaaagggttcagccaacttgaaggggttgattattctgacacttttgctcctgttactaagctcgtttctgtcaaattaatcttagccttggctgctattcatggctggtttttgcatcagcttgatgtcaacaatgcatttttgcatggtgatcttcatgtggatgtctatatgactctacctcccgggtatagtcctaagggggagaatccattaccacccaatgctgtttgcaagcttcaaaagtcattgtatggtctgaagcaggcttctagacaatggttcgaaaagttctccactgccttaactgaggaaggattttcccactctgctacataccactcaatgttcattagacattcttctagcagtataatcatcttaaattgtcacaggattccaaagacaccttggccgatccaacattatacaggaagattattgggaaactgcaatatttggttataactcggccagatattgcatactcagttaataaactgagtcaattcctcacaactcccaagacaagccatctcgttgctgctcaaagaattttgcagtacattaaatcctgtccaggccaaggcattttactctctgcaacttcagacatccagctgagagcttataccgatgcagattgggcagcctgcatcgacacaaggaggtccacaacaggcttttgcatattccttggagattccatcatctcttggaaaagcaaaaaaacaacatacagtgtcaagatcttcagctgaggctgaatatcgtgcaatggcaaacactactagcgagctaatttggttaatgtcattgctgaaagaattgaggatagaacacaatggacctgccttaatgtactgtgacaataaggctgctcaacacattgcagcaaaccctgtgtttcatgagagaacgaaacatatagaaattgattgccaccttattagagaaaaggttcaacagggactgatcaaaactgttcatgtcagcacctaggaacaattagcagacatcttaactaaagcactctttcctaaccaattcaaagcacttaaagacaagattggattggtagacatataccatccatcttgagggggagtatcaaggattgggttagttaggaattagttcatgtcagttagaattagttaagatt

SEQ ID NO: 386557 - DNA, 2603 bp, Cannabis indica
gtttgactaaaaaagtgcgaattgaatcggatgaacaactctacgcagcatcattcctgaatatttcccttcctagaatcacaattggcaataataataggaaaatttatttctcaaaaaatttcgaacttaaaccttagttagtttaatagcataggtaatgtaggttaattttttgttttgttttttttttcaaaaatacccctcttatttcaaaactcatctctctcttcctctgtcttctctttctctccttctcgtctctgctcaaactaacatcccctcccattctcgtagtaccaacgtccccgaccaaaggaaaagccactgagatcgagacccataaattgaagaaaccattgagactattttcgctgtcgttgtttagatgtttgatttgtagtttttgtgttttttatttattttttttgggtaaaaaaattgatttttggtgaaatatgcattttttgggctctttgtgatttttttatatatggtgcgatggggtacgatggtgggtgttaaccccaaaaatcgacagagttgattttcgagattagtcaacgattagttccagtggtcgagagacatcaactgtaagagttgatcgaagaatgactgagtcaatgcatatggcctaaagatcattaatctcggaaatccatgcttccaagtctcggaatatatccgtgcaattcggaggtcaaccccgtaacaactcatgagtatagttagtaaaatcaaattactaagttataattgttggaggatttttgtagtgatatgttcgaattggatcttgccataaacataagattcaaaggtctctttctcatctttccaacgcatcttgaatcgtctcaatttcgatatatattgagaggttatggccaaaatactaagactgctaaactgtgacaacttggtatgcgagcccatggctgttgtgcgagcccatggctattgtgcgagcccatggaatgttgtacgagcccatgggatgttttgcgagcccatgagccattgggtgagccgggggcatttgggtgagtcgtggagcctttatgcaagtggtggagcatccgttcgacccgcggtggagcactcgtgctattcgatatttagtccctcagtgatccaattacgatagcgtgggcaaatgaaggagagattatacatgtgtggatgggcaccatgtgcctgggtgtgcggagaagtgttagagcgaatgcatgggggctcgcatgcgagccgtgggtgagtgatgtagggtgtgcgagcctgtgtgagggggaaggggtgagcttggcatggtgcgaggggatagggggctcgcattcgagcacatggggggcttgcacgcgagccatgtgtgcgttgtgggcgagctatgtgagggggaaagggtgagcttggtgtggtgcgaggagatagggggctcgcacgcgagtcgtgtgtgcattgtgtgagtgtgttttaggggggtgtgaagataaggagagagatgaatgcatgaagacaagaataacattgggagaggaatcaaaggacaagacatgcaagggaagagcgtacaatcatgccttttgaagactgagagcaaggaggtacaagtagtgccgacaacggacctgcgaggcttgaagacccgaccaaaggtacgctgcaaccaccctagtacagcctgtactcgaggaccaccccacatgcaaccaaggaccacgcgcatgtccccggggaccaccccgcatgcaactagggaccacgagtgtgtacccaaaggccacacactgtaacctgcaactggagaccaccttgcaccatacaagggttcgaggtgccatactacctccatcacctgcaccctacaacgagaaagcaatattttgtccccatgggaccactttgtacacaatgccattggagcctataaataccccacatctcagatgtgagggggttggaaaattataattgtacaaccatattgagagtaatagaaatttttccattattgtctttacttcaagaaagcaatttgagttcatattttattttcctctatctctcatttccgagcttgaagcataaattggttttccggccacaagttggttgacgatttctcaccgtcaatagtttggcaccgtctatgggaacgacaagcttaagccaagtcatttctttacacaccatcgatacaaaattcctagacgttctcgatgcctacaggatggagattttccttgacaacaaccagttggtcgcttcagggctagacctcccttgacccgtcatcggataagaaggcgctaatagtcatagtcctcaagtaagagaaaaaaatgagaacgttgtccaccctcaagtaggcagagaggcgtgagctggtaggagcctcaagtaagacaaggagactgccaccgcgaaaagaccctaacggacaaaaaacgcaatagagctaccgcctccatcacgaccaaaggtaacagtgtgacacgaagaaaggaggtcctattgtcacctatgcaccctccaccaccaacaccatgagtcccagtaccttgcaacattgcccaagaaaggagaagcgagccaactct

SEQ ID NO: 386558 - DNA, 716 bp, Cannabis indica
caaataagagagagaagttaccactaccagataacaacgaagagaaagagaaatccttggtacgaattatgaaatttatagttagcaacatatatctcaactttttttttgttagcaaacatatatatatatatatctcaactttaaatttaaatgatagacagacagacagagtgttacttactagttgttggttgcaccggctccgttgaagacgtcgtgacgaggagaaggctttattgcaggttgcaccggagaaactcagaccgcctgagatgggctgatggtgtcggcgtgaatagggaaagcaagagaggatgagactgagagagacgagtgagtgagagtcttaaattttagggttttttttatcttttacttttaataaaaactgccaatttttttttaataaaaatctgttaatattataaaaaaaaatataaaattgaaaaataataagtgttattcgggttatttcgggttaagtcggtttaattaggcggattactttatttttaacctggccaatatacagaatggacggttttttttttgtcagattttttgattttttttttgtcggtttagtttgggcggattatggaaaaatggcaattttgagaaaataagatgaacaattggaaaaatggcaaaattgcaaagtggggcccaatatccatggcgggccacttaaggagcaatttaccattttattt

SEQ ID NO: 386559 - DNA, 1167 bp, Cannabis indica
agacttgggcatcctgcagcagctttgtcgtcttcacgctagcccactctaccaagcagcacgcagttggggtaaggcctcaagacattttcttcctcttttctttctttttgttatgttctgcccctattctgatactttggcctttctaccttggcttattttgaaaggtggccttactggcggagaggactgcctaagaggccagcacgctagtgacagaattggagccatgcccactgctgccttagactcttaggcatttttcttaccttggtccttgtcagcccattattttagctaattatgcaacccgatggactaaacttataagaaatccacaaagatttgtaagaaggaattcaggcgtatttttctttttcaagaattttggccaaatacgcatcttctcctcagattcgtacttaagtttagcctttgaggaaagaattaaaacgcgtttctcttgggaagacttagttgaaaatgtttcttgcttttggttgcatatgtacacttgagctagtaaccttgacaaacagacgtaagaagttacagttgtcagcaatcgggcgtaccataccccctaaatgagctgggaactttggtctcaaattctcagtcatttgcttggaacctaactcgtgtcctttgaggacaaggtttgagtgtgctctgacttagcttcgggaagcttactattcatccaggccatgtatttcctctccgtgactacttggaggggaattgttgaaagtttagcagtaatctcccggcttccatgagaaagttgtggggttgtagttgaaaacctagttgcatgactggccccaaatgatccctctatgacatggactttttaagggaaaacataggctctcgcggcacgacatacttttggtttcctagagagaaagttgggcctacatccctgcgcggacaattttcttgtgctgaggtctgtttcaataagcgagattcatgttgaattttgtagtggcaaacttttggctttcactaggaaaggctaaaggtgctaaacaaattcaggctatgactttgcttgtaaaagctggagggtgaaacatcatcaggcgtgtaacagacttcaagcagttcgttcattacgggaaggagggttgaagacgttgttgggttttgtgccct

SEQ ID NO: 386560 - DNA, 605 bp, Cannabis indica
tcattcacctcaaagatatagttaatgcagcccttgctgaatctgcctaaactggtgcctccataggtttgaattttactgatgtgtaattcagttgcaattaacctctaattgtcgaaaaaaatccattaatactaattatcaagtacgtatcatttttattttccccatctaaaatggcataagattacttcttggagcagatagatgccttgtatgcgaaaatcaattggctatgaagatggatattactaaatggcaagacaggttagtatgcaaccagaaaagattaatttgagtttgttttgcacatgctgcaattgtataagatgctataaatatattccaccataccctttcattacaaagaaaaaggtccatataggatatagccttgaaagtgcacaaaacatagcaaattataaagacgaacagtttcatatgcaattgatttagtggctaacttatcagaagaatgtgaagcatcaagaaaccttcaagaggatctcacaccactatcctgcaatatttgaaagttggcccttaatcgaatcttcatatacttctccatcatctgatagctcatcgaatgatctcatgtcaag

SEQ ID NO: 386561 - DNA, 528 bp, Cannabis indica
ctctctctctctctctcttgctccatggaaaccagctaaggtttgagctttttcaactcaataattgaaggaatttcagcaggttgttaagtgatccaatcaaaggtaatagctttagcccttctccctttaattttcttatagttttagttgaatatttggatgaatagcttgagttagggttatgtggttctatatagtgctagtagtaattttctaaagtgtaattacgatttaatatgttgaattgaagaggatttaagggctgttgtggtgtttgagcaagctttgggtttaagaactcaagcttcgctctttaatggtagatttttattctgagcttgtttagttgttttgttgcttggaatatgtttattatggtatatatagcaggtctggagagtttggtagagtttggggttgaattgagtgagtgtgaaattttgaaattttctgaaccggtcgatcggttcaatgggacctgtaggacggttggtccccaagaaaccccacagaaccagaattttg

SEQ ID NO: 386562 - DNA, 729 bp, Cannabis indica
gaacaaagtgaatgttcaactttatgtggttagtggtacgagcattatagattgggttggaagcaagagcacttactggtgttatcacaccagattacgggtatttaagctggagtaaattgcatttcgtgaagcagaggttcgagccatataatttcagctgaaacttgagcaagagcttaatattataactcagtgcttgatcgagacaactatttgatctttcaataccatgacacgagtgtttcaccaaagtagacacaataacctcctattgattttcgattatttaggcagcatgcctagtcatcatcttatcagtatccaacaagactcaaattttcactttgtttaatatgcatagtatgatgaattgtaccttattgaggtatctcgggcatttgagatactaacttagcttgttcactacaaactctatgtcaagtcttgtatgtgtgaggtattacattgcctttataatgctttgataggtggttggtttgtccatttttaaagtgacaatgattttccaatagtcataggtgtgggaaaaggcttctaacattcaatagaactaattagtatgttcatttagtttggatgagttattagattttatattgttatacgtaacatatatataaatatgaaaattaacattaaaattttactattttttcttggattggatggatccaatctaatccattacatactgaacctaaaata

SEQ ID NO: 386563 - DNA, 600 bp, Cannabis indica
atttgattatcttcatcatgacaaagcaaaatgaaaattttattataaattcacttcctgtgaaagaagaagacattttggatggtgatacgctgttgatatacattgattcgaaaaaatcaattaacataccaaactattacaacaaaaccaagtatagaacttatatttctcacaaacttaatatcactatcagagctcaaagtcttaaaattcgtttaaagtaagtaataattttattatagttctatctttattctatgtcattatttctagaacattaatcttaattataaaattattattttttttagagggatagatgcacctgaacacggcatgccattttcagaggagcccaaaaataaactaaaaaaattggtaataggaaaatgcttgaagattataacatatggaattgacaattttattaaatccggtcaaaaccgtatcgttggagatatatactgcaatggtatttttgtacaggtagaaacaatatccttatacatacatctttgataaatcatatttgataatctatttctactcatttaataattattatttttatgtgtaggaaatattactgaaagaagg

SEQ ID NO: 386564 - DNA, 2049 bp, Cannabis indica
ctttctttatccaattaataaactaacacaatatactattgagggatgttatgactcatctacatatagctcatagaaaacgaaatattatgataactgtttatatactgaatatatataatcattaatctgtaaaagaaagccaccacgagctgtttcgaacaagtgtatatatattggttcttcttatgccagcaaagctagcctgagaaaattagtatattgtattaactatagggtgaccacatgatcataatttattgatatgtaagggctaaattaaaccagacaaagatataactaaattaggtggaaacaattggtatagggagagctttcaaaggctgagctttgtgtaaagtgagaccaaacttgtcatccatgttcaaagtctgtggtttaacaccatcttccaacttccaatcaaaagaatggatcagagaccctaacatcaaatgaaccattctaatggccaaaggcaaacccgggcaaattcttcttccaccaccgaatggagtgagctcaaagtgtcgacctttcacatcaatatctgattccaaaaacctctctggaatgaactcattgggattttcccatatattggggtctctggaaatggcccatgcattgactaggacttgtgctcctttaggaaccacatagccacatagttccacatctgtttcagctctacggggaagcaacaatggagctggtgggtgcaaacgaaaggtctctttgataatagcttgtaagtaagggagtctcgatatatctgattctttcatttgatttcccttgccaataacttggttaagctcagcttgggctttggacatggcttctgggttcttcagtagctcagtcattgaccactctaacgtggatgaagttgtgtcagttccagctgcaaataaatcctgtacgtaaatagtacatatacattaaatacgagaaacaagaactactcaataacaacatttatattaaactcaccaataagagatgttcaatggtggttttgtttagaagctgattttcactgttttctttactggccatgtaattgagaagagtatccaacatattattattttcttcttctcctttaggactattactttcttctctgtgttttagtctttgagtgatcataccatcgaaaaaatccttcaattttcggaagtgaaaagtcatgcttctccttaagcccagaagatcaagcttccgaagaaccgggaaataatcagacaagttaggcttaccaccagccaccatgacattcccaatagtctccttgagatctacggccatgtccgaagccgcgagattctcccaatcggcggagaaaaaagtggtggacaacaagttgagagtagttttaaaaccagccacgccaatagccactgcctcatcacttgcttcacccattgtacggacatcagccaagagctcttgtaccttctgttgccttagattctggttggagtcgagagctttaaccgaaaacaagtggttgtggcatatttttctaaggtttctccagctaggagagactggacttaatgacacactgtgcttgtggtgattgtaggctcggaatgagtctgggacagttctgttagagaagaggttgtcatgagttggaggatttgtttggccatttctgctgaagaaaccacaactgtggtgatttggccgagcttcaaatattatgattgggccatgaatttgggaaagccttgcaagagattttggggattgtgaccaagttccaaaaggttaccaattatgggcaagggtcttggccctggtggaagttgttgttgagttttggtgtatgaagacaataggttgaagatttgaaatgatataaaaattgtgagcatgagataaagcaaatcactcaacatatcataagtgtagaactccatattcatcttttctttccagctaataatttaattactcttttctatcaaaatggtgtacattattatgttgttttttaatctacttatagtgtggtgtaacactttgtcaaatggc

SEQ ID NO: 386565 - DNA, 1423 bp, Cannabis indica
atcatcacgttggcccaagttctctctcacgttctaccacatgtcacgcacgccttcggcaaggagagccctacacgtttgggaaaatgttaaaaggtaccaatagtgtgtgtcaatagcgattggtgcaattaattataaaatataataatttttaagcagtattaataaccaatcgcaaggcgacacatctagaaagtactaaacattactggtattagtatccaatagcaatgctctaggtgtttgtgtttttatctacttgcatcaaccccttgtctcctactctcctataggtgcaagtggattgcagtcttcactcttcaaccaagtgtctgctgcacactcccgaatgggatttggcctgttacgcagcccaagtggtgtcctatgacataacaaattagctaacaaatacctttcaacacgtatgtagagagttttgaatttaactatttgttcaatggtctatgagttttgaataaggaaaaggggtttattttctcaagagatttatggagtatgatctagatgaggaacatcatgatcatgatcataatcatacactagtacttaaggaatgttgtaatcatcttcatttcttttaaacttttgattatgtatgtagagagtttggtttcagtgtatcccattcccatattaactccccaagctagttctcatcatttaggctatgtttagtcggaatgagagagagtagaaaggaggatgaagagtttagaaaggataaagagtaggaactatagagaggattattgttcgataaaaataaatattaaacttacaatattatttagtctaatacaaatatatattattttttaaattggtatattaaatattttatatatatcttttgtctttctcttaaattttttcatatttaaagggattgatatttttatgtttagagagagatcccccttcctctcttcctctctccctctccatccctcctcctctctcctctaccacatgtttaactttacaatttgattttgtcaatttattcttacatattatatactatacctttgtttcttgcacacatacatacacacataccttatttgttttgtatcacacttccaatatataagcatcacatcatcatcatcataaatgtttgcccatagtatccaagagctaggaaagttgcttatatgaagaagattatgtttgagaaatgatatgattggttataaaggtagtagctagtcctttgatgatttcaacaaggttgttcattcttggtaaacatgggagagttggctttgcattttgttatcaaaaatagaatttgtgaggataaaaaatgcatatatgctcatattttagagcactcaaaacaattttatttttttttttaaataaagtagctttaaaaaaaaaaaaaaaaaaa

SEQ ID NO: 386566 - DNA, 1041 bp, Cannabis indica
caaaaattcttcataattatataattttttgtaaatatatatttttcagtttacattttgctcatattttctaaccaatttgctaatgtgatgatgagttatacatataaatgaggattttgaggatgactcgaacaagaacataatgataaaacacaaaacagagtagatcaattagtgtagaactcaatctacatcaaataatatgaactaaaacaatcaaagataaatggacatagattttacgtggttcgaacacgaataacagaatgttatcctgcttactccacgaccagaaagaaccctttaaggctttgatctttattgattgagaatgttcaccaaagatagaaactgtcaagaacagttcatatatgttcaaatgaagcttcgcttaaattacaattagatactcatttctctctttctcactcaatttttgttttttgtcaatttatctctattcccccgcaatggcttgatctggatctctgttgttgaaggtcaaaatttgagggccccttttctaggtcttggacagtgttggtgacataactgtcatagcagaatgttagttaattctgttatgacatgtccaagctgttaagtggtttttatccaaaagtgaggaaaattcaaatgtgtagtcaaacatagaaaatcatacacctttggctttatatttgagttacaagcaccttgttgagaaagagttgttctggtcttgaaaaactcagcagtcaagtatgcttcgcaagttcagacataatcagaactttgctgaaggaacatacttggttagcatgtctgctggattttctttggttctaatcttcatcacttgaacttcaccttttgcaatcacatctctgatgaagtgtagcttaatgtctatgtgtatagatctttcatgaaacataggattccattaaatgtagtgcactttggttgtcacaatgtactacaatgtcttctgcattgaaacctaattctgatgtgaaaccccttagccaaagtacctctttgattgcttctgtggca

SEQ ID NO: 386567 - DNA, 1021 bp, Cannabis indica
cgtttggtcccccgagataccctttggcacgcctgctgccatggttgcctcttctggtatgttgactaatgatgactcgtctgtgatggtaaaagagagtcctgctatttctcattttaacaaggatagtttgaattttaaaattccttgtgccaatgaagagtcctcacgtgccaaagttaatgagtttattaaggaaaaaaacaatagtgggccgtgtatgaccattgggcctagacagtttttaaatacttatccagcttgtgggaccgccccttctttgttgaacaaattgagagagcaaggaaaaggtcaagttgtgagcccatttctttctattgggccgttagccaaggaaaaggaaaaggggctgtttatttgtaaaaataataatgggatttttggtgatggaccacccaagactctttctaatgagagctttatttgtgggcaagaggttaaacttcaccatgatgaaaaattagctttgtctaatttctttcaaactcagaatacccttttgcaagagcttaagaattttggaagcttggatctatatgagattaaagccattggtggagactttggagttccaaccatttctgagactattgcaagatctactccgctcaaaaagcgaaagtttgatggggcttccacttccctctgcccacggccttggaagcttcttcggccccttccttgggctattagtgatttttcttggaacacagagaaaagtaataatgctaccaatgttaaggaggacgagccctctggggatatctctctatccaatagcgaatccatcggcccggaaaattggtgtactaaaggaaagaatgtgatctcatcaaggccaatggtggggactttcgtggtggaggactctggttcttttgggtcggcccattctcatacccctgtggaggaggtttttactcctccacaggagccatgagaggaattgcttggaactgtagagggttagggcagacctctacagttcgcgagttgaagt

SEQ ID NO: 386568 - DNA, 1238 bp, Cannabis indica
gattatttattgacgtcgattttactgcttttgtttatcttgccggatttaatggttttttcttggtgatgtccgtctccagcgacttcccacacacgaagcaggttgttttcccgtgtgttttactgttcacagtataaatgttatgttgttgggcttgggcagtacaaaagtaaagaaattgggctggggcagtaaaaatgttgtttttgccgtgtcccagtatatttgtaaagttttggtccaaaaacagtatttttgtaaaattccctaataacaatacccgtataaatttatatatgttcttcaatgttggagaaatttcacggttgacaagaaaaagggaaaaatgaagcaaatgattcttttctattgaaataggttgtgcccgtttcaacaaaagaaaaaaatggtcacatctcttttacataaacaaggaaagaaaaaaaaaaaaaaaatggagaagataactaagtgaaattaggtaatagaagcaaactagcaagaaagctattaacacccattttcaaaaattaattattgtccctttaaaaataattaaaaataaaagactatagatctaattaacaaagagtaatgtactagaagcaatttctcttttctttttactctatctcttaaattatgattgacaattaaataagacaacatatgggaaaagaaaccagctgtactgatgttttcttttttcaaccatataaaagtcgaaaatatacttctagatgtcttttttaatgttaatgtatagataaagagtgtgaagtagagagttttcataacaacaatgggaatggaattctaattagtttgagaaattattttattatagtgacatatttattaaatattgtgttcttattacgaggttacacgtacaatgattatataattaaatattaaattttatatattttaatttaataattaccataaaagattatttattatttgtaaaataatactttgataagataagagtttatttggttgtgttatcaatttttagtttttaaaattgtattttccaaagtaaaaatagaaaacagttttttgttatttttaaaatttaatgatatttttcacaaattttttaaaactgtttttagattatttcttactaaacaaataatactataacaccatatcatgatatgaacccattcgagttcgcattcgggtttaattctgggtctaagattcgagtatgtgagtaaaaa

SEQ ID NO: 386569 - DNA, 779 bp, Cannabis indica
aatttgttactattaaaaactgatattggaaatataatggctacatacctaaatttcctaaactaaataattccgttagaacctagctatatgtggggctatatacattggttgattttgacgataataatccttaaggtcgctatttttggaagtctgttactaccttttttaactcgtctgttagttactgttaaatttaccacatgttgaagtattattggtccacctcataattttaattaaaaattattaaaaaatccaatatttttcttttattaaaaactaatttaaaacaaataaaaatgtaaattaaaataaataataataattagaaaaaaaaatacacaaaaccattgtcattgatttatgtgtttcttcaggttctcattggtcttcttccctaaatggacacaagaaaaccttctgcgcagaacgtgccaccatctctggtcatccctggctcaagctaagttcataatcgaaatccccacccttcaaaatcccaaactcttaaagtttcttccctctatgtgaatcctctctctcacacgattcttcgcccaactctaagggagcacatctttttgtcttcttcttcaacctccactacaacaaaagtagttttttttttttttatgtttttaaatagtcgtttaaagtattctcatcggtttctataatcgtcgcctatacaatcgtcgcaaaacggacaaaataggcaacggttaaaaaccgttgctaatgtagacttctcgacggtttaaaaccgtcgctta

SEQ ID NO: 386570 - DNA, 586 bp, Cannabis indica
gccatcctcatactagaattgtttaacatgtactaaatacttgtaatatcaaagtgagtaataaaaatactgatttttctcaactgtgcaaagcctgttgtcttggaaaaacccataagttgccttttcctcactccactactgtctatactgcacctctccaactcttacactctgacttatggggtcctgccccaatcaactctgtgtctggctataggtactatattagctttgtggatgccttccctaggcacacttggatctatatgttgagaactaaagatgaagctctcaacacctttattacattcaaaactcaagttgagcttcaacttggtttacccgtaaagcaaatgcaatctgattgggggggggggtgagtaccaagctttcacaaactatcttcaacaatcgggtattatacacaaagtttcatgtcctcacacacatgaacaaaacggagtggttgagcgcaaacataggcacatagttgagagtggattaactctattaacacaagctagcatgcctttaaaattttgggattgtaacaccctaactagcataggcgtattacgtgatt

SEQ ID NO: 386571 - DNA, 2450 bp, Cannabis indica
attggggacatggtatttctctgggtaccgcttatgaaaggcattaaccgctttggtaagaaaggaaagcatagcccgaggttcattggaccttttgaaatccttgagaggatagggcaagtagcatacaggttggctatgtccccagcgctggaagttgtacatgatgtgttccatgtttccatgcttcaaaagtatgtctcagattcgtcccatattctgagttatgaagcattggaactacagtcagatttgtcttatgagcaacaaccggtgcaagtacttgccagaagggaaaaaatcttgagaaacatgacaattgcactggtaaaggtattatggaagaacaataaggtggatgaggtaacttgggaactcgagacaaatatgcagtagaaatattcgaagttgttcctgtaaatttcgggacaaaatttctataaggggtgggtaattgtaataccctaagattaagagaatggattagcgaaccctaactagttaattgtgtattattatggaattatattattatacaatttattatatgtgaattaatatgatatatgacatgttaagaccccgttagtgagccacgggcattttagtaattttgacccgagaagggtaaaactatgaattgaatttaattacgtgcttatggactatattattatatagtatgcatgttttgctctttttcaagtgtgttctgacaagtcggcgtggtatagtcacaattgggcatttcgggatgaaccgagttcggggctgaaatacaattttgggacgatttattagcattttatttaggagtgataaatctaaaaattatttggttatgtgatgtgtgttggaaatgaccttgaccttaattgaatgtgtgtgtgtgtgtgttatatggccctaggggcatttttatcatttttgggcatttgaattatttgcgaaaattggaattttggcattttagataatcagtttctgctttgttcttgccctagccaaacccccccccctctctctcaaattttatttgctttgattgttctttgcatttgagttggtggtattgaagcttgggatttagagcttggttttgagaaggtttgaggtaattttcacctttaattttgaatttaattgctggagtttgaagttgtttaaatatgtttaattgttattttgctcttgattgattgaataaagaaatggatggaattaagatgcttatgctatttcctctagctagatggggttcaatttaatgttgtgattatttggaacttggattgagtttaatgtgtaaaggttaagtttgagaatctgatttttgattctcttcattgtggtttgaatgatggtgaagcatgttgtgattttcaagttcttgaatttacatggtgtaaagatttgctcatttgtgagcttatgtttgagtatgtttatatcttattttagagcatgttgttgttggattttgatgcatgttatatgtattttaatgccctgctttagtacttgctagtttgtggaggatgattttgaatcatatgtaaatttgtcttgcgttaggtgtgtttaagcatgaaattcgaagctgaaagtgggtatttctaggtctggaacccaggggctgcggcccgcctctgtgttgttgcctgggatttgaacccaggtgtcacggccccatgtggggagtgccgcgggccggccccttgtttctgggtagattagaacgcgatattcgaatactcataactttgtgatccgtactgtgttttgggagttctatatatcgttggaaagctcattccgagatctatatgaatatctttcaattgaatgccaattttatattatgtgaaagtggaattagggattaatcctagatttgtgaatctcggaatttgtgattaggattacaggcacttggtcaggggcacgcagggatttgaaatcttaacatttgcgagacatcaggtaagacagtattttagcacatagagttgtgcgcaatggcgcttatattggaaatgatatatgtgagtacttagaaactgggattagggttattaccctaatataagcggttaatggcctaaggttattaccctagtgattaataatgcgtaaatgctatgccatgttaattatatgtgtatattgagatttagggttatgcgttcaaggcataatcggattggactcgataactagaactgagatgaaccgttctaaggccttattgtatatagacgtgtgagcgtaacacgtaggtctatgtcgcatagacataaataggcatgtgagcgtaacatgcaggtctgtgtcatgcagagaaaggtgaaatgttgttaatgtttatatgatgtgttatttatgattattggtattttaaactgtcttattgggcttttctcacgggtgctctactgtgcaggaaaggg

SEQ ID NO: 386572 - DNA, 1526 bp, Cannabis indica
gggtcgtttaacactgataaaataagtggcatcctcaatgcccgtgtatagtatgtccacaagtaaggttcccctatcgacatgccgtgagttagatgcgatggtgagaaaattctggtggttaggcaatggttcaaaggatagatacatggcttttcgggcttgggatgctattttccaaccaaaggctcacggaggtttgggaataagaaaattcgaagacatgaaccgagctttgctatcaaaattggcttggtctgtagctcaacaagaggataagccgtgggtcaattgcttattaagcaaatgttgtacttcagagagtttttgggaggtgaagccaagaagcaataattctaacttatggaaaaatttattggaagttagaaacattgtcttgaaaggaagtatggcgctggtagctgatgggaagtcaatcgatgcttggagacagccttggattccatggctagagtatgaagaattcaaggggttaatggacagcttaaagccgagagggttcaccttcaggtatgtggctgatcttactttagactatcaatggaatagggaagtggtcttacaagtatttggcatggatttgggaaggaaaatactagaaattccaaggattccctcccctcatcaggacaatataatatggaagggtagcaataatggaaaattctcagttaagagtgcatattttgaggatcaaaatcataggtttggagctaagaaggacttgtggaaatggatatggcatctagagattcatcgagagtttctttggtgttatggagaactattaatgatgcattaccaaccaagggcagacttccttttatccatgacaaagagtgctgcctctgtgacaatggagaggaaacaagtcttcatctctttaaggagtgccacttcgcaagcttctttggttcatgggggagttttcgattagaagtgattgtattccagcacccacaattgcagaatttgtcgaacaaattttatttgtggcaccacaagcttacatgactaaattgctcattcatatgggctgtaccttctcgacaatatgggactgtaggaataaattggtttgcaaaggggaaaggattgatttggggagagtgttgaccaagattagtagtacagttcaagatttgctgcatcatatggtcagcagcagaagcaacaccagagtcggggatgccagtcaggtgcaggttcatcttcagacgcctgtggtactttttgttgatgcatcttggggtgaaggagtaatgggcgcagctatgatcaaagtggaaaatgcaagggaagattggtacctcaactcctgtcaatgctctgctggttcagctcttgaggcagagttaaaagcaattcgttttgctttagaatgggctcttgaaaacaattggacagaaatatctatcctatctgattctcaagtggtggttaatgctcttcagaaaaggaattgcattccttcctggccgcttactagtctttctttaagtgtt

SEQ ID NO: 386573 - DNA, 1284 bp, Cannabis indica
cgattcctagcctataaatactactttatgccttcattcaaatggtcaagaaaaatcatggtgaaaatactatagcaagaagctaggattcttaagcttgtaaaatcctcattgtaatacatcaaggtcattcaaccaaatacaagtgactcatggactagggttgattaatacctaaaccacataaaaaatctccatctttattctttattaatttagttaatctctcaactctcattttaattagtttctaaaaatttcggtaaaaattacgacgccaggacaagtggctacaccctaactccatctgacaccatggaagactatgagaaagatcaaggccaggattacttaaggcttgttaagatgtgcaagggacattacagacgaccccatgaacataccccccccccccatgaatagaccccaagcgaggtcccccatggcctccccctgcccaagtgtggtcacttaggcttcgcatacagatcccaagcaaggtcctcatggcctctgcacaaacaagaatggaataactttatttgatgaaagtcgcctacacctaaattctcaagtcatacgccccgaccattggaagctcccacacattatgttatgacaatactcagagcttgaaatgccaagcacccaaggaaatttaccatgccattggtaaccaagaaagaggtaaccttgatgaccttcaaaccctgtgttgaagggtcattgcaataaagaacaccttaagtgtctagcacaataaataccgctacacacttagggggcatgtaacgccctaatgctaaggcgctacagtactttttcaattacaatgctatctttgctaatcaaagaattttctcaaaaaatgtgtcaaattaaaacttttatattaaatattaaaatttatgatttccaaaactttatgattttttttaatttttattttgatttttattattttacaagtctgtggtggtgatagtagtatgattgaaaatgtacataaaaaatatttcaaatcagtgcatgtttttttttttggtgtttttgtatttggtagttttttttatttttgttgtttaaaattttcaagaaagtgttggagtcgatgttgactacaatatagttcaagtgctacaattttttgttattattgtaaagtccttttttggcaagttagttgacaaaatattttttccttttatggtaagattgttgtgcattcatatttgatttcttgccttataaattcggattgtagttgctcttttccttgtttgg

SEQ ID NO: 386574 - DNA, 1171 bp, Cannabis indica
ctgcttcagacttgacttcagatcaaagagccaattggtgtcatgcggggacggctcatcccatccttgcgtggcatagaggatgaacagagcagataaatacttgaggcccttggggcgaattgggtcgaacttatatgacaatagtccataatccttttgaagtatgggagcaagggtaacatcacaccctgattgatatgaatgcccgaccaagcgttgtaaccttcgcctgggttagtagctagctggtaaggggaggaaatgaagcatttgacatttcttaagtaaccacaattgagcaaattcttcatctttgccatggtcatcacggatggtggagagacccatcgatctcttagtgcaccttgcctcctctgggggatgtcatcagtgtattcttctacaacatagtcttcaccagcctctagaacctcgccagcctcaaacacaggtttttcttatttattgtagccaccaaatggcagcacccgagctactccctcttcttcatctccttcagcctcaggaggggtagcaggacagatctcgccttggtcctcaatctcttggacttcaacgtccctagatgtgtcctcctcttcagtagcaagtcgggcctattctgccctagataaggtggcaagacgggcaatgtgtgggtcgaacagtgaagattctcgtacaattttcttggtttgcgccatcattttatgtttggatgaaattttatttgtgtgcctaccaatagtcacaacaaaagtggcaataggtttacctgtagcgacagggtttgggcggccctcgggcagagtgtcaactatgtttggacggactatgtatgtctagttggactgaaggtagcgtctccaccccttcttgagttcccaaatgaagcgaccgtacccctgaccttagatttagtcgggattcaagttgtgatgcaccgtgggttctggggaaggcgtgtgctcactacttatttcccagtcttcaaatctagagttagagaggttatcactggacgaagatgggttggcacagagacgaggatgatcctcgtacaatagttgaagcagatcctggtcgatatggtgttttcctccccaaaactcaccaggatacatctacaaaaggtaggagacaagaagatgagaattggtcggggcaa

SEQ ID NO: 386575 - DNA, 2846 bp, Cannabis indica
gagaggccaagtgaagtgtcttaatacatgccatgtcatcttagtctttaggtagacatgtcatcttagtctttaggtagaaggtttatttaagactgatataacaacaattatcaattcaaaagttgttgatagaataccttaccaaattgaaaaacctttactactaaatttgaccttagtttactttagatggttgtgggagacataataataataggccctcttccactctttaatccacatgttctccagtccatcatatactaaatagttgtaggtttcgatcattgttttatataaacataaaatataaacatatgtaaacaaaataataataacaaaacaaaataaaaaatcaactaagcctcaaagggaagaagactcttaaccatttgacccatcagaaactgtacaaacaaaatatcaaaagcaataatatactaatataggcaccaaatccccaaattgttccaaagttttttaactgaaactccagtcctactttaaacattgccactagagtcagagagagcattctaaatattctatattagaaataataatctcatgaacagcacggattaaacaacaagactatgcctctcaatggattttaaactgaaactccaaccccactttaataaggcatttctcttccaatttgcaatattgtagttactaaaatactcgtacacaaaatgagcaacggcaaatagagtacaatttttttaagaaaaaaagaacttggccaaaaagattcagtgcattttccaatatgcctcacataacattgactgactaatccccccatgttgacgggccaccgactccaacttcaacttcgggtgagagacttaaaacaaaacctgtactttgggatttcgctttcttcgtcttacctgggaaggttactatgacacctccagacttgtcagtaaacttcttttcccttttgaagtcgggaacttctccgccaacatttgacacaagctccatgaatgaagcctcactgtcatcaataatatccaggtcactccgttttgtctttgatgtttttggtagtttcttcaccttagcatcatctttctctatgaatgtcacttttctcttttgcagcttgtcaacctgttcttcactttcctgtttcgactttctttccagatcaggattttggtgttttgatttcttagccttgacatgatctctcttctcatcattgtgagaaggaagttctgctgcattgtctcttgttccatcgtttccccccttcactttcttcttagtaacaaaatcacttggactatcctgatccacgacagaatatttagagttcttgcggttgacatgatctctcatttcttctgtttgagtatctggatctttgtcagcggcaacagaagaatccaagtcatttctggtgcgtttgttcgttggtttcgcattgaacacatgcaagtttgggaatgtatttttgatctgcaatagagttgtttttgtaagaatcaagttaacaaggcacaatacgttgaaacagagataaaataatgaaaataagatgatgacttgtaccttcttcactgatttttcatggtcagcgatagggttcccttgcaaattcagatttttcaggctaacaaaagaattaaggacctgcaattttagcatggataattgcagagtaagatatttttccacaaacgaaaccataagggagaaaatatataaatataaatatatatatatatggatatatatcaagaaagaatgatccagctccaaatgtcaacctttacatctgaccatgttgtgatagcattatatcccaaatctaagttctgtatatctttgttatatgccaactcagctggaagactctgaacagggcacacacgtaaagaaagagacttagggactccatgattaaagaaaaaaattcagccaaaaaggaaagacatggaatgaaaggtggtgtctcgtgaagaaaatgaaataatttatcactctaatttcagaaaatataccttgatatcattatgagacagtctcagttcttttagttcaacacaatacttgagtgaagcaccgatatttcgaatctggcaataagaaagagaaagctggaaacaagagaaagttcaagcatttcaacattcgttaaatatcaaggaatattgctgagatatacatttgagcaagaagttaaaaccacgcacctttgtcaaagactttacatttatcaaagagtcgccaatttcaccaatggggtttttcgatagaactgcaagacaatccccaaaagaagttcacaattatatttgcaatcaataactaattcagataatacttcacaaaacgttagaacagtctgctagagatggaaggaggaaaaacagagagggaaaaatagccataagagatagaaattgtttatattaaagttatcaagctgaaaacaggtagagaacgaagacaggaagagaaggatacatgcaaagaggcatagaagcactgtttccaacatatattaaaccaaaacttggtctgagatttaaaaaataaatcgtaaatggaccatcaatctgacccaacccacttatgcaatgtaaacaggcattgtcatatcattgatactctactgtatcaagatcatttgacaccacaaaaaacaattgatttgttttagcactttcagattcaaagttcttaatcagataaaggatgctactaaatattttcagggttcaaattttgtcattcactacagattgattttgcaatcattacagtaactatttactgttctactctcgtttcaagaataagtagagagagagagagagaga

SEQ ID NO: 386576 - DNA, 779 bp, Cannabis indica
caaattacaaaagttcacaaaactaagatggttaattgattaattagtgcataattaattaggccaaaaaatggttaaggtgatgaaactaattaattaatagccataaaaacaaacaaaaagcaagatatacttgttttttttctaaaaaaataaataataagtggcttatttatgattttttattttcaaaacaaaattaatttttaaaaagtgtactagcattaaattttgggtctaattaagaactatacctacaattggtactatatgcatatttgtggttattataaatgtaggtcaccctatttaggtacggagaaatcttaattcttacattatcatatatacatttttttttttttaatttgtcaaattaaatctaatacaggtaaccaaaaatcacccatttttgttacaaattaacaaccatacacactatatacacaaaaatctttttctttttctttttttttttgaaaaaaataaaataaaataaaacttcctttgtaataatcgaaattcagcaaaaagaaattgtcacttaaacataaaaatgtaattgccctccattaattatcacaaaccaatcaaaatgtaattttaatcatatagcactcttttttcttaaatatattttgagtaattaatggaagacactatattgtaattaattttagctcaagattcaaagtttgtgtaatgacctcacttaaaattacaagattttttcatttataattttataattaattttttatttatttataaaaataaaa

SEQ ID NO: 386577 - DNA, 538 bp, Cannabis indica
aaaatgaagaaaaagcatggaggcgagggaagagtagagtgagtgagtttgtaccttgggaataaagcatagtgaaatggcagaagtggaagccatgggtgctgtagctgctcagaggtgcatagtccaattaaagcactaagctgagcgtgagcgtgagcgtgagcgtgagcgtgagcgtgagcggaactcggtggtcgtgatgaataaaaggatagagcggcgaatctccgggaatgttcgaatttctctacacactctctctctattatattatcggttgccctttatctggcagccttcgattgctccggaatgctaaaatgggcttggaacaagctcaatattgatgctacttgggccacaccatagattacggaggaaattaaactagataccagtatacattgctcactcttgtttttaggaaaacttataaaaaatacttaaatttgagttaatttttacaaaaatacagtcatacaaaaaaaatttcaaaaaatattatatttttataaaacaacagtgaaacacaaaa

SEQ ID NO: 386578 - DNA, 646 bp, Cannabis indica
atttatttgttattatatgttttattaggataagataaaattagaataatttctcaaaagttaagatgcttaaaatcttgaaatcctaacttaaataatttcaacttacatgattagctattaaacaaaaccttacatgattagtttattaattccaaaatgaaaaagaaaaaaatataaaagtgaagttgacatatttaattagcaacttgacaagttggagagactctcaaagtaaagattatggaatagtcctcccatatttaagaaggaaaagatcaattaaaataaaaccaaaagagcttatttgcattcatgccttttggaaagagctattaaatcaagctctagtttgggtgaagaaagtgtaactgctgctttactaataattagaagatgtttcagcttatatttctactaatgtaattttaattacaaatggataaatgctagaatccacaccttgttattaatgtgagcatttcgatccgtagttcaaattaaagccatgaaataagtagtcggaaaattaaaagtcttcgcagaattagaagtctttgcataatttgcctctgatcttgataaagttactcagaatcaattagcaagaggtcaacgattacgtgaattactcaaaaaatctcaa

SEQ ID NO: 386579 - DNA, 1488 bp, Cannabis indica
attcaggttccaatttcgggtcctgagttttggtcagggtctaggtttgggtcctggtttgagtcccaaatctggatccatgtcacgtgtcctggtctagttctggttcaagtctcgagtcccaggtccgagtttgggttcgagaccgagactggggtgcggttctaggtctcgacccgaattctgtgtcacgaatctggttccatgtttgggcctgagttcgagttcaggttcgacactaggtctaggtctaggttgggatctgggtcccggtccaagttcgagtctaggtcaaggttagagtcgtggtcttggtccgattacggttccgggtctacatgcaggtctggttacggtttcaggtccaagtcaaagttcttgttctagtcccattctcgagtcttggtctacttctagtttgagttctaattttgggttacatggtacgcgttcgggcctggtctaattttgggttgctgggactgggtttgagttcgggtctgggttccggacctggtctgggtcgaggtctgggctggctcctagatcaagacaccgatctcgagtcctggtctggttccatttcgggtgtcagatcacgagcttggtcctagttccaagtccgggtctggggtcgggtccttggtcccagtccttgttcaaatgcctaggtccctatcccgattcttgttccaagtcccggttctagtctgggtttgggtccaggtctaggttcgggtttgggtcctagtcacgatttgggtttgggtctcggtctgggtttttatttgggtttgagttctggtctaggtcctggtcttggtcttggtcttggtcctagtcctagtcccattcgagctccagtttcaattctcaattcgagtttgggttctagttcgggttggagctcgagtcctggtccgagtttgggttcgggtccagctctcggtctaggttcagatcgggctccatgtgtgggttagggtccttggtctgggtcaaggttcgggtccgagtcccaggtttcaatctcgatctgagtctgggtttagttccgggtctaagtcttggcttccaatcccagtttgggttcgagttcgggtacgggtgcaggtctaggttcggttctgggtctgagtttgggtttggtcctggtatgggttcatgtctacgttcttgtcctagtttgagtccgaggaaggttttgggtccgggtctgggtccgacttcagaatcctgggtctgggtccgagttttgtgtacgggttttgggctgggtctaggtccagcatttcgatcccagtcttggtcttcgttcgagtccaagttcgtatccggatccctgtctaggtccaagtctttgtttgggatcgggtcccaaatttaggtccaggtttgggtctcagttccggtctgggtacacgtccgtgtccgagcccaagttctagtctcagtttgggtctgaggctaggtctgtgttcggttcta

SEQ ID NO: 386580 - DNA, 694 bp, Cannabis indica
ggttgggttgaccaacatcaaaaagaccatttacccagctgacatggctgtgcttctttaccatttctccattattaaattaaatatgaatagttaaatacttaaaaatttaagttttagtaaatagttaaatttaatttttaaccataataatatataagttatattttttaaaggtacttaattaattaaatgtaagtcaatagatatataatttaatatttattctatgtcactttttattagtatatttaaattactttttagataaaaaataaaaatttaataatttagactaataaaaaattatcacgtggttattgaattaacacttaacgattaagtatttacgaaaattttaagaatatacttaaatatttaaatatttatgccgtaaattattcattaaattattaatattaataaataagggtaaaaatcttttactgaagttatcgattgaattctcttttttttttaaaaaaaaaaaattgacaaattgaatttgttaaataataaattagaccctctattttaaaaattagtacaaaatagtatcttgagttgatttttttcttaaaataaacgtattaaaactcgatctagatattttatgacaagactacttatattttctacaactattcatgttagaaattatcttcaagttggttatataaaaaaataaaaaaaa

SEQ ID NO: 386581 - DNA, 750 bp, Cannabis indica
atttgtgtgtgatttggatgattctttcgcttctaggtctttaattgagggaaatgagttcaagagctcaaatttcactcaactatggttattttgtcattttaatgtattattaagttttgaaggctttaatatattttctttttattgttggtatgttctggaaagttttgttaggattggaagagatttggttgggttttgatgtgaaaaaccagggttttccacttcagcagcaagaaccggtcaacctgtgtacagagcactgtcgaactggtcaacctagaaaccctaatattttgtaattgatttcaagtttggagtgtttctctagaacctatattagggtgttttatcaatgtttaggttgtttacaaagttttgttgattagggtttgttcggttttgattttaggtcctatttcgagaatggttaagttgtttatcaagctttgttgtcatgacataggacttgggattgtcgagcattattccacgtaggtcagcccgcatacataattttagattgagggaagaaaagccaattgtactgcttagcatgtcaaataagattcgattaatatcgtttctgactcgattataatcaaggtaaagatatagtaattaccattgctaagaatgagttattactcacttttagaaattgcagataaatttcttacttatcggttacttgattaactatgtaacaatagtgttacaaattacattaacaatacgcaagtgcac

SEQ ID NO: 386582 - DNA, 1500 bp, Cannabis indica
tgtagaaggtattgtaaccaagtgacttcgctagtagtggctgccagggcgcgatattcagcttcggctgaactcttggagatagtaggttgcttcttcgtacgccatgatatgagacaatcgcctaggaagatacagaaccctgtggtagatcgtcttgtaattggacatgaggcccaatccgaatctgaaaaaccgcgaaggtgaagtgttgatgtttttgagtagagtagtccttgtccagggcttcccttaaggtacctaaggagatggtgcacagcttgtagatgtgttgttcgaggatttgccatgaattgactaagggagttcacggcaaaagtgatgtccggcctagacaaggtcaaatacaaaagtttaccaacaagttgtcgataatgagaagggttgtctaaggcttccccatcttcattgtctagcttcagtttagggtccattggggtcttgctaggcttgctgctcatgtaacccgaatcttcaagtaattgaagtgtatactttctttgagaaagaaagagaccatcttgagcacaagcaatttcaaaaccgagaaagtacttcagctttcctagtgctttgagtttgaatttgtggtgtaaagaacgttgtaaatcgtggagaaggttgatgttgggtccagtaattacaatgtcatccacgtagacgaggagagcaatgaaagtgtcctcatttcctcttgtgaagagtgtataatctgcctgcgattgttgaaatccttcttgtattagagcgtctgatagcttcttgtaccactgtctagaggactgtttaagcccgtatattgacttatgcaacttgcacaccagattattttctgcattaagagtagaaggaagagttagaccttgtggtaaacgcatgtagacctcttcattgaggtctccattaagaaaagcgttattaacgtctagctgaagaatatgccagttttttatagtagaaacagctaaaagtaacttaagggtaaccattttagcaacaggagagaaagtgtcaaagaaatctagcccttcttgttgcgtatacccttgtgcaacaagtcgagcttttaatcgttcaacgctgccgtcgctattatatttaatcttgtagacccatcgacatcctatggctcttttatttgctggcaatggaacaatggtccatgttttattgtctgtaagggccttaagttcacattgcatagcattcagccaaccaacaatttgaatggcttcaaaataagacttcggttccttgacagaagaaactgcaagaataaaagccttgtatgtgtcagacaaatttgagtaagatatgaatttattaataggatgaggagttgaagaagagtcctgaatgagtgagtaacactcgaagtctctcaaatgagctggaggtcttgtttgtctttgagattttcttgtaacaccatgggaagagtttggggctgctgcattattttctgctgcagaatcggtt

SEQ ID NO: 386583 - DNA, 2551 bp, Cannabis indica
aatcccaaggcaaaaccattggcttcgtacccacaatgggttatctccaccagggtcacatatcactcgttagagaagctcaacaccattctgatctcatagtggtctccatttatgtaaacccaggtcagttttctcccaccgaggatctttccacatacccttctaattttcgtggtgatattgagcagcttatggcaattcctggtggggttgatgttgtttttcaccctcataatctctaccactatggaccaacaaatcagagtgttgacagtgatggtgataaggggttagacagaaaagggactggcgtggtttcatgtgtagaagatagtggttttgggcatgagacttgggttagagttgaaaatttggaaaagggtatgtgtggtgagagtaggcctgtgttttttagaggggttgccactatagtcaccaagttgtttaatatagttgaacctgattttgctgtgtttgggaagaaggattatcagcaatggcgtcttattcagaggatggtgagttttgattttgattttcattttgatttcatctcataattctctctggtttagaattagaactaagttcaataattgtgcaaaaatttcaaatgtttgaaactagtacactacactacagctctgttaatggtactaactttgatttgtggctagaattagaactaaggtggcttaatgggaatggtattttgatgtttggtttatgttggtaccgtaatgaaaatgataattttatttttatatacatatggtgtaatggtgattatataggtgtagaacagcaatccttatctttatgaatggtgtaatggtgattacattgtaaaaacattacaatgttttcaaaaccaaaccaaataatggaattgtaatagtgattccattagtatttagattacgtcaaatcgaacatgacctaagctcaattgagcaaaaatgtcaaatgtttgaaagtagtacactaaactacagctctgttaatggtactaactctgtttttttgcttgataaaggcatatatgtgtttgcagtacatattattcccattgaatctttgaacatgttaataggttaaacatcattgagatcaatagtattgtttatctttacaggttcgagaccttgacttttctattaaagtgattggttctgaaatagttcgtgatgatgatggcctagcaatgagttcacgcaatgttcacctctcacctgaacaaagaaaacaggtctttcttgcccatttttttttctcaatcattcttttagtttggttatgttatttttccatgctaccctacaaaaaaaaaaaagatattgtctggttagctttatttagtagtgatacaatttgtttgattgtggtaattttattgtttttgtttctcaaggcattgtcaataaacaagtctttgtcaagagctagaattgctgcagaaaaaggtcatgttaattgtaaagagttaatagatatggtcatcaaagcaatccatgaagctggcggaaaagtcgattatgctgaggtaaccccaaaaataaaagtcagttttcaagtgctttgacttgttcaaattaccctgtagattaaatatttcgttttcaagaaccaaaaaggggttctttaatgatatgtaatccatactgaagccttaggggtttaaaatgtgatttttatggtagcagattgttgaccaagaaagtttgaaggatgtggaagaaattacaagtcctgttgtgttttgcgtcgctgcatggtttgggaaagtgagattgatagacaacatggagatcttcattcgaaatggtgatctatagtaacctaactttttgtgctttattttgggattttttgagacatgaattcacaagaaatttcgacccatttcttctttaaataatgctcatgtttacaatgttgttcccaaataagccctgcacaatttgtagtaggttgtcttatatgaatgtaaaggaaccatctttataaagatcaataaagctatgtatagagattcttttcatatgggcacatttcttcatgtatatattttcaatgagaaagatggaaattttgcattggtttttgacctttctcggcaatgtcgttttgttctttttttgactttattgagatttgatagtttgagaaaagcattttcctatggaaaaataaaacaagagaaaagattctcaataataataataaaaaaaaatgcatgggaagaagagcaagaaaatgaattacaaatactactaaacgaatttggaatcaatcacactaaattgcaattttttccattgtttcaatttcgagaaagatgttaaggtgaaataatagtaacttgttgaattttaaactatttttgctttaaattgtaacatgacacttttacctatgctttttatatagtttgttcattttgattcaatttttgggtaaagtaatatgttagtttgtaagtaaactgatacatatattgctaaatatagttgagtgtgtttaattgtgactttattttttaataaat

SEQ ID NO: 386584 - DNA, 1575 bp, Cannabis indica
tgtttggtttcataaagtttgactttagtggctaacttttttctctcataaaatatgatgtttggtgacttagtttttagccaacaacacgaagtcataaatacaataataataattttataattaacaaaagaacaaagtatataatataataagaatagaatttgtagaggttttataccaattataatggtaatagtctaagagaaatttgattttttatgcttacatgtatttaaaatttttcttccaaactcataataattaatatttgtgggatatgacacattttataatattcctaaaatacccccatttacatcaccccctctctcttcttctctcttaattttactactgttgaactcccctccacaaaattaacacaatttttttctcttcacttcactactctataatctactacactacaagccatactacatattttctctcatttttggacgaagcatcatacacggagcatcaaatacaagcaatggaattatttttttttaagaaatcttatttgttgttgttatatttagtttagaatattgtttcaatgcttgatttgtggattgttgctattattttgctgttttgtgtgttaaaatgcttgtctgtgaatactgcattttttctaatttttgcaatttttttcgtctggttcgatgggatccgatggtggtctgataccctatcaaagttggttgacagggatgaaggcccgatgggggtcgatgggggtccaaaaattggttttgtttaatttgtatgattgggtctgatggggtccgatggggtgtccgattgtggtccgaaaaatgtgtttggggattttttggtaggcccgattgggtgtatgattgggtgtctgattgtgtgtctgatgggtgtcaaaaaatgggttcgtgcaattttttgatcgggtccaatggggtccgattggtgtctgattgtgtccgatggtgtacatatttattgcatttttaagattttagataacttttatgtgagatttttatgctaaactgtaattgtatttttttaatgtatgtgacaagttcaactgttaatgtgtttgttatgtctaatggtgtttgggagcttgagggtagatattgggtttataaccggtccaaaaatttgacatttgacattgattcaaacgtaagctactcaggttttgttaatcttttgtatgaagaactggatgttgacaaagtgcaatatgacttgaaattgaaagtaaattacaagtacatgaaaggcttaatgtatcgccctgaagttattagaaatgataagcgtaataggaactttgaagcctaacctctccctcaattgaaaagtcaaacaagtctaagacaatgaaggacactctcaagaggcatgcaggaagaatatgaaagggagtttgtaatcactcaagatcacaaaatttgacccgcgtggcattcagctgacgtggtcccgagaaattaggcggcttgtcccctatgccagaccaccaaaaggttcacgggaaaaaaggaaactacctttttgtccaacatccactactattacatt

SEQ ID NO: 386585 - DNA, 895 bp, Cannabis indica
ttaatcccaactctctgctatcacgaattctaaaagttagatactattcgataggtgatttcatgacagcgaaacaagggcagcttttcatcactaacttggcaaggtatatgctgggtcgtgaattgcttgttaaaggtatgagaatgaaagtgggcaatggtaggcagattatttgttgttccgatccttggattccagagatacaattttcacacaataaagtttctgattacatcattagtgattgtgaatggaatttgccatcactacaaatggacatttctactgctgatatcaacaatattctcacaatccctttgtctatttctgcttcagatgtctattgggtgtggaatttcaatatatctggtgaatattcggtacaatcaggatattactttgcttgctctttggagaatcaagaacaatcttccacttcagattcatctatgtcttggtggagtgatttttggagattaaatcttccttcaaaagtgaagattttcgtttggagggtcatacagcagtcgatccctgttgctgctgcactatttcggcgaaaaataatcacctcgactgcttgtagtttatgctctaatgcttgggaatcaatgggacacaaaatgtttagttgcaaacatgcaaaagctatttagcgttgattacacatttgatttccaggctgcgagtaggatgaaagatggtgattatattatgtatttgtaaaaaatttacaacaaatctgatatggaaaagattctatgcactatgtggtccatttggtttgacagaaacaacattatacataataagttgccttaaaaacctgctgcaatatatgcaaaatccatatctttgcaatttccagcaggttactgttgggttttgtgcc

SEQ ID NO: 386586 - DNA, 589 bp, Cannabis indica
tcgtataaaaaaattaaaatattagaaacatgatagtgggtgcaccttatcttatcgaatttaaatttaaatataaattttattctattttaacatagataaaaatgaaaaactaattaaaagttattgtgttcatcaccattttcttccaaaagaataaatccattaccaaataatcaaaaccatcttcaaaccactgattaaaaaagtccagatatacgtagctacctcactgtatatttatcttccatagcccatcatgagttgatgaaggctgaagccatagcaaaacagagtaagtgaaagagaaagagaaaggcagagaaagagagagatctgaagattgaaagattaatcttattgatacgacagtacaagaatttatacacaagctgagaagaacagattacatccataacagaaagttgttacagcaaaaagaaagagagcagtagctcagctgaacaacaaaaaacagttactaactgaaagttagttggtcatcatcagcttatcttgacacgtattattacaagagatttgaaattactttagaaaaacaattaaattatatatatagggacacgat

SEQ ID NO: 386587 - DNA, 1440 bp, Cannabis indica
catataaggtccagtacctcccgaaggtaccttagcgttcccttggtttctgggagtatgtgggcccttcacctctcctccaggaggcatattctcgttgacacttctgatgcaaaaagacttagtcaatttatctaatagtcgtgcttcttagatccacgtgtcgttgtcatattggtccatgtattttgggcgaaattaagggcaacatttacccccaagccttgtttggtgcaaagtaaacgaggctttccaggtgcctccttctgtctcattgatttcctggcacgtgcctcgggcgcgtgggctgcatttatgacaatcctcattaaaatttattgcttttcgcacgcaatgattcgcttcccgtcaattaatgatcgggagcatttaattggtgtcagacaaatactcaagcgtttccacccgccctgatgagcatttatcccaactgttagatttgtagaatgcgaatcgattcgattcccaccgttcgatgacacctgatcatagctgtttcgtacccgttctgccctataaaagccagtctttctccttcatttggttacttcccttactttgccatttttccgcaagaacactttagagagaaaaaatttcggacaccatagatttcttgttgcttttcctccaccgttgtcaatccactttatactgtcgatcaacgccgacccccagctctcaactttcatgtaagttttctggacactttgtgccgttttacagtttgtttgcatgttaggatagaacttcttggttgagcgcttgatttctgggaagtaactctatcagaatctgttgtgtgatgcatagaatcttctctatttgtgtctttgttattttcctccgttcttctttagaatcgacccctctgttgaaagactgtttagggcatgaggtgatttttgttctcacattctgcgttttttgcttttcttctgctttcgatgcctttgggatttttgcacccgatgtttgctaaggaaaatcctttgagtttctattttcagcaaacatctagagggggcctctttccagcggttaggggacccccattccctcttttaacattagggtttggtttggggtctaactgcttgattatttcttttttcagaacaaaaaaaaatgtctacccctgcatcaggatccaagtcttctatgacgggggcggctgctttggccactctggaggaggtcatgaagggtctggttgcccaagagaactaaacttgccgttctaatggcagggaagtgggtgaactccactccaccctaatttgcgctcatcagtttgagaagattgtgactgtagctagcattaagttgtctgcatcaggggtctttcatcgcttacatcgggatgaagagacgcccaatcacaactacgggggttttggagcctggagccagaccgat

SEQ ID NO: 386588 - DNA, 666 bp, Cannabis indica
tcagtgccatgcaatttaatcgaaaacaagaaaaagtaaaatatcataatcttgaaaagaaaagaacaaaaagaaaacatatctttctaacaatttaatctgataacaaagaaaagaagaaaaaaaaaagaatgtagttatctttcctataaacagaaacatatttttcaaaaatttctaaactgataaccaaaaaaaaattaaagaatgtagactaacataaactttgatttgatcagaggaagttcttgcttgttttttttttttcgaaatggagttcttgcttgtttctcagtgaagatttggttctttagattttatatttataggcagtttcctcttttttcaaaatgtgaaaaaatattggtttcttatttgtttgttatttatattatttttttttatcttgtttaacaaatatattattattgccttcaaaaaaaacaaatatattattattgaacactaataacagtttaaaagaaataataaaataaaagatacttcctatttaaattaaatttgaaattttactcaaaaaaaattaaatttgaaattaaataaaatattttcaataaatttaattacttagtatttatccaactatccgaacatataattatgtttctcaaaaaaaaaagaaccctacaattatgtctttcaaaa

SEQ ID NO: 386589 - DNA, 1057 bp, Cannabis indica
atttgcctttttttttgggtgggggggcgggggggaggggggagagagccaaaggcaaggtgccccctagcatgaaacctttcaggtgaagtctctccctaagaccatggggtgtttccctcagcgcgagctccttatggtgggtaggcttgagttgtcttaattgacccatagggttcttgtctcatgaccagtcttttccaagctggccttgtggggtattatcagcggaggacaaggagtcctctctgccaacatacgcaattgagacatcgttctcttgtcagtggcttttgtgctagaagtgcgaggcttgggttttgcctttgagtataccactcatcactttttgcatgttagccaccatagttttctagcctttggttttttcagcagagtttgtttatctcctcttcatagtagtgggttcgaatgcttaagctcacccagtacatcttcttctcatttttgggcccacgtcttgaagtatcaaggtcttgtggcatagatggtgaaaggtggtgtactagaaatggccttctgggcggttaaaagttattatcgacaaggggtatgactgatgtggtgtccctatcccgttgtatgttgtatgttgacttgacttcctccaccttggttgtctccatcagggtggtagtgaccattttcctcgttgccttcttcgacgatggtgagtgaagtttcccttctggtgtcaactagttgcttgttgtccaagtatatctcgatgtctcagagacgacaagaatgtctaggcatttcaaaatgatagtgaatggttttcgaactaacgtagctagagctcattggtcccacagacgacgccaaattgttgatggtaagaactcgtcaactaaactttagttataaaatcaaatgtaaagagctgaggatgaaaatcttaagaaaaattaagaacacccaatcatcaatagagtacaatactattgaaaaaccgtgttcttgcaaatgtcagttgtatataagaaaatataaaaactgtaatcgtttgcagcagcagaaagtaattctgcta

SEQ ID NO: 386590 - DNA, 1863 bp, Cannabis indica
gaaagatattaataataattgttatactcgattttcgagaaattaaaatagtcaaccttacaactttgatcaagacttacaaaagttaaataaattaggatatcctatttgagggctccatggcacctctagaaaacttatgagaacactaaccaaccatttggtgtcagaacctacacccaagtgtgcttggcctaggacttgacttatttaggcataaaaatatttgaacttgtacataaagttaaaattgcacaaggagaccactcaacaatgcatggtcgattactgccataagaagatggcagtactctctcttttggagagtaccgccacaagaggatagcagtgctctctactctcaaaccatcaaagtggcattgtccaaatatggtccgcaacaccaagaagtatggcacacgtgaaaaaaaaatattttttactcaagaacaagcctagctgacctgtgccatccttgtgcacaaaaaggtggcacaagtcggccacaccaaatgggaaggagattctttgacaaaagtacctttttatcataaagacattaaaactaagtgaggaaggctaccaagtggtataaaaaccacttggatgataactgccatctctttggcccaaagagtgacagtggtcggccacactaaatggagagggatctctttggccaaagtatatttccaacttcaagggataaaaattaagtgagaaaagtgtaaaaaaaaccctgaccgaccactgccacctttttaggcctaaaaggtaccaaaaagatggcaaaggtctttcccaccaattggccaagaactaaagtagtcaaagtgtttttctagcatctatatgactaaaataagcaagaaacaccatccagtgcttctcacaagccctgaccgaccactgccattttttggtgctgattggtggcagtagtctccagttagggtttcagatgtcaagatgaggtttcaagactcgaaaccaacaaaatatgattctccatcaaaaaataagtcaaaacatacccagaaggctctagaaatatgaatggctgagaactgccactatggcgtggcaatggtcaaattttaaactaaaaagtacttatagcaatttaataaaacaggcataactctcaatttttatctaaatgatttggttcaacttgtattttaaagatattttcaagacggatttaagtgtgtcgtatgttcattacacaattctgaagttatcgatctaaaaattggctcacaagacatgttgacacgctttactcgagaattactaagttatgctaagtggggaccacaaggggtgttgggagagctataccacaacctatgtggcatcatggccgagaagtgttagaccttagacactcctcttcaattgtgtgacttcctagccaagaagtgcctccccttggtcattcctctctaattgtgtaactttctagtcaagaggtgacattccttatcactcctctccaattttgtactccaaagcacaatgccactaagcaagttcaagagacaaggaaattaaccaacttcaacgacaatcttaatgattgtgggttatttgcttatgactatgggatatttcctagatctttatttattcattattttgtaataagatacgagatttgaagataccccaacttgtgagggatcactaacaaacccagacaggctagggtttaaagaccgcttcctagacttctgacttacttcgctgcattatcactgttgggttttataccctaaataaaactccatttcaatgtaatccattttattcaatagcaataaagaaacagaagtatttttcattcatttgtatgttttg

SEQ ID NO: 386591 - DNA, 2709 bp, Cannabis indica
tctaggactctccatatgtaatgggattaatgctcattcttaggattcaagcatccatcctagaattgtcacgtagcaaagagcgccactctaggactctctatccataatggaatccatgcatccttcatcggatttaagcatctgtcttagaatttttaattgagaaatcagcagtgtttttcattactccaaatgacatttacaacctattcaacaccttttataaaacaaggtctgatgatttttttttccaattgattaccatggttacaactcactaaaccatgttgagtcacctatggaaacttttctaggccatatactttgtattctaattttacaagtatgtttaatcatttatacaatggttttcgagtcttcttttgtctgctgccacaacctagagttcctagctctccaaatttgatacaataatgctgcacaggcagtagtaaggacctgtcttcggaagagaggaggatcccttctctataactcgcaccagatcagttaaggaggttgctggagtcttccatcccagccaaatcttgacatggtttaagcactcagtagagaaagggcagtgaaaaaacaagtgatcacaagtttctgcattccccgaatagagcaaacaagaaggatcagttgcaatttgaaatctgagcaagcgatctctggttttcaatctattttgaatagcaagccagaaaataaaactgtgtttgggtgtatttaaacgattccaaacttccttactccaattgaccctaaagaccgtgggacacaaccatttgtagccattagctacattatatttcgtttgagtaaaggtggtaggatcaactaaattcagcaacataccttttagagctacaatcttcctccagtaccagctgcctgtttgaggaatttcatagctccactaatccttgtccttgatgtatacactgtgtatccatttcacccacaagttatcctctttggttgcaatttcccagatatacttgaacattgcagctttattccattcagcaacttttttaaacccaattccaccagctattttggattgacatacattttcccaagctatttgccctgctccagtcatcatatgttgtcctttccataaaaaagctttgcaaatgctttctatctctttaattaccgtctttggaagaagcataacctgactccaataggtatgaaattgctaggagaactgagtttacaaggacagctctgcctacaaaagaaatatgtcgagtactgcaagctctaattctctgtgtcatcttttcaaccaaactggaacattcctttggtgataatcttttaaggctgataggaatccctagataggtgaaagggacttcacctctctggaaacctgaagcatcaagaaccctttggatctcagaatgagccattccatggcagtaaataacagatttagaaggattaggttgcagggccgatgtctgagaaaacagtttgagaccctgtagcaagtagataatactcttgtaatcaccattggaaaatacaagaacatcatccgcaaacataagatgattcaaattcaactccttacatctatggtgaaagatgaaatcagttttctgcccaattttcctcatgattcttgttaaatattccatacctagtacaaagagcaaatgggacataggatcaccctgtctcagtcctctttttgcctcaaagtaaccatgtaaggatccatttatcatcagtgagaatctaggagttcgaatgcataacatcacaagttgaatgaactgagcaggaaacttcagtccatacagcatttcttcgaagaagttccattcaattgtgtcataagctttttgtaaatcaagcttgataacacaactaggctttgtcagcttccttccataatgtcgaatcagatcctggcatatcatcacattgtgtgcaataaatctcccttgaacaattcctccttgattgccagctaccagttgaggtaataaacaattgagtctcgagcatatcaatttggtggctgccttgtatatcacattgcagcatgcaataggcctgtaatctctcactgtattaggacatttttaacttaggcacaagtgttagaatagtgttatttatttctcaaagcagcttccctgttttaagtaagctgatgattgcttcagctacttcagtgcctatgatgctccaaattttttggaaaaaagagctcccagagccatctggacctggtgccttgttactaggaatagcaaatattacttcatgcattgtcacgtagttaagaatgcaactctaggactctccatccgtaatgggattcatgcatcattcgtaggatttaagcatccgtcctagaattgtcacgtagcaaagggtgccactataggactctccattcgcaatgggactcatgcatccttcgtacgatttaagcatccgtcctagaacttgtcacatagcaaggagtgccactttaggactctccatctgtaatgagattcatgcatccttcgtaagatttaagcatatgtcctagaattgtcacgtagcaaggagtgccactctagaactctccatctgtaatgggattcatgcatccttcttaggattcaagcatccttcttagaattatcacgtaccaaagagtgccactctaagactgtccatctataa

SEQ ID NO: 386592 - DNA, 1937 bp, Cannabis indica
aatcaacattttatagagtgaaaagtttcggccttatccttaaattaatacattcttgtttagtcactcagggggccgtttttcttattaagtctaattttgactttgtctacatatcttcccaaacaaaaatcatgtttgccttgtctgactagtgagaaagaagttagtatctgtatcaatctcacctacccctactctcattttctttttttatacagaatccaaagtgccaaactatgcctttttctctctttttttactatgtgtgtcagagaactgcttcttctaccctaccttacccgccaattcatttgtcaccaataatccaccaacttttttaccacttttgttgcattttttgccattcaagcaaatcctataaatattaaccttgactccccatcctcctacattgatttgtggcttaaatactgtctttggtcaggttttttagtattgtactattgggttagccctgcaggtgcaggcgggtaaaagagttgaactcttttcctctttgggttggatttagttatttatttatttttatcatgggaagtgttggaatgaagaaaaccgcaaccttgttatgtgttccgttaatggctaaatctgccgagggaatggtgagtggcatgaaccaggccaaggcacaaggagctgatgttgttgagatcaggttggactgcattgacaattttcatcctcaaaaagaccttgaaatcatcttgaaagataaactgttgacaaccctcatcgtttttcggtatatcatttctaactaaacatatttgaatttttatgtcaaagtcagaaatgagaaactgtttcttctgttgtttgaaatatagtgtaaatactaatatattgatcatctcaggccaaagtggaatggtggtttctatgaaggtgatgaacatagtagaattgaggcacttcaaatggcaaaagatttaggagctgattatgtagaatttgagctcaaggtgattcttttaggcttatttgtcacttaaatatgtgaggtgttttctcttttttatcatatatcaatcaattttcatccttaaataggtggcctctaagtttatggaagaacagagaaatagtcctagcagaggtactaaaaatattgtatcattttatgtaaatggagagaccccttcagaacaagaacttaaacatattatttcaagtatgcaagaaacaagagcaaatatcatcaaattagtcactaatgcagctgatattacagaattaccaagaatttttaatctcttctcaatttgccaggtcagagttcttgctaattttctctagttctcactttatgcaatctttcactagagtttccaatgaaaaacttaaaagggataaataagtagataaatgattgaatggtttttctgcgtcctgtaggtaccactgattgcatactcttctggggaaagaggtcttataagccaaatattgtccccaaaatatggtgggttcttggtgtatggctctatagatggagattccataccaggtttgcctaccttagcaagccttatagaagtctataaagttgactgcataaacaaggatactaaagtttttggacttatctcaaaacctgttggacatagcaaaggtcctatattgcacaatcctgtcatcaggcatgttaattttaatggagtttatgttccaatgttcgttgatgatcttcagaaattcttcagtgtctatcccagcccggactttcctggatttaggtaagcgtattagtgaacgatatcatgagctctttgctggatttacagtcttctaagttctacatgtatttttattatggtgatcctctagtgttggaattccatacaaggaggcagtaattgaattttgtggtgaagttaatcaacttgctcaggttggcactttctctaatt

SEQ ID NO: 386593 - DNA, 1154 bp, Cannabis indica
actaagacagggtgatccaatgtcacctttactgtttgttataggtatggagtacctatcaagaatattgcagaagattggatctaaactagatttcaaatttcatgacagatgtgcagagttgaaactgaatcatctgatgtttgctgatgatgttattctgttttgccatggagatttcaagaatatatattatgtcttacaaggcctaaagctattttcttgctcttttggacttcaaccgaatcctcacaagtctgcattttattattgtggtatggatgagcatgaggttcaatgtattattgacagttcaggttttagcaaaaaaagaggtacctttcaaatatttaggtatccctatttgtgctaaaaagatttcggggaaagaatgtgttgtactagcagataagatgactgccaggatcaaaacatggagttcaaggaatttatcactagcaggaagggttgttcttgttcactctgttctcatgtcaattcactcatattggagccaaattatggtgttacctaagaagactataagggacattgaagctatttgtcgtgcctacttgtggaaaggccaccatgtgtctgtgggggctgctcctatagcttgggattttgtttgtcaaccaaaaaaagttgttggaataggtctaaaaaaggttgttgaatggaatattgtagcgatgaccaaatatgtgtgggcatttgtgaataagaaagataatctgtgaattagatggatccattgtgtttatatgaaaggtatggattggtggagttatcaagctcctcctcaggctagttggcattggaagaaactagtggctgtcaaaaaccaagttaaggaggtcatgaattttcagcaagttgcagcagccccttataatatttctaatggctacaaagctctctgtccctcacaaaacagagtaaattggagccatgaggtatggaatagactaaatattcctagacacaactattgtttgtggtttgctatataggataggctaaaaactagagaaagattgcataggttgaatatttttggggaggattcttgtcttttttgcagtaatcagattaaatcttctaaacacttagtcttcctgtaaggttttatgccctaaataaaactcttt

SEQ ID NO: 386594 - DNA, 2252 bp, Cannabis indica
aaaaaactagacagtgtgactatagacgaaactagatttaaaaaaaaaaaaaaaatggtaccacatttaaagtttagtaacaaaaaattgtaatagagaaaaaaagcatatagagaacatttaccatttttatgatccccagaagttgagtttttcaatatcattttcaaggtacactccgaatttcgaaatgtaaatctgcttaaaatgctgaatctgagacggtgttcgcgaacatataacttcagtagcgccttgcagatcaagtatgtcgggattcagcgcttgcttaacgatcagcgcatcccgaccagcaggatcatgcatccaaagaagaaccgcaatctaaatagcaaaaacaaaattctaaagctaaattgcaacacataatttaaaatatatatttttcgttctttcattttattatctcaaaccaaacgcaacttaagttcatattccgagaagctaggaatcataacatttataaaatgtcgctttattttttatccaaacactcttaaaagacggaattagtacctctaatttgccactaagttccgatgctaagcgtttcgaaagatcttcggaatacattgatttgtactcttgttgaataagaacacgttgtgtttgatctctatgagcaagaacattaattactgctgctgaatcacaaccaaaccctaccaaaaaaaaaaatacagtgtctgggtgacaagaacatgtgtcaacaacatgggtttttccaaaaccaattattagatgttcctattacagatcaaagaaaatctatgacagttactttttagttatagatatataagcacatatatttgatgaaaccaaccaattttttatttattttttgaattaaaaataaaagaagaagaaaagtaaataatttatacccttaaaagcacgatagagaagaatagcatcatcacgaggagaggttagagatggaggaatggtaagagtagacattgttgttttgttctttctttctttgttttctcttctgtgattttcttccttttataacccaaaaagaataaatgcagtgttgcactcacactattttatgtagttttatttttgggttttactttgacttgttgacttggtattcttacatgactttttctttattggttttatatatgttttttgtaaactgacattacttagttggatctttgtgttgtcttactggaaaattgtgcactaggtcagtcctatcacttgtcactatggcaccaattatcttttagattggggtgacaaatgtgacctagtcttgtgattcgtgaaatataccgggtaaactgtacaatcatatatcgtttggaaaagtttaaatgattttgaaattgtgtagatataaaattatattgttgaagagaatattttaaatgaattgattggtactacttatatcaataaggtgatatcttgttttctggtagcttaacacgaaagaactccacagttaaacgtgtttaacttacgctattaggaagatttcatttctcaagaagcgtgagagtgagaacaaactacactagaaatactagtgttaattgattgtgaaatgggttttgacatggcatacaatacgaacaagacataaattttatgggtttgagtcggggtgaattcagtgagagttgaaaataggtcagtccaaattgacacgaaataaaaactagtttttttttctttattttttttgaaggatctactactccagttttagtaatagcaaaacaggtcaaagtgaagtcaatatgaacaccataggcgaacctaggggccttgagagagggctaaagcccactctgagattttaaaaaatattaatatacaattgttatttatatatatattgcagttaaatagaacaattgattaagattcttcaaatttacatgaaagactatgttttgaattttcttgctcattttttttctacttgtatctacattttatttattaaaccactaaaataggggatgctgctaaactatcattccacttaaatttagctagttatttattattttagattatattaaatgtataactaagcccaccctaaaattcaatcctaggtctgccactgacgaacacgatacgactttttacaggtcgagtcagagttgaaaattagacacaagtaaaaaacggatcgactttcataacacaaataatagaagtgggtcacataaaatatgacatgaacacgacacgat

SEQ ID NO: 386595 - DNA, 2888 bp, Cannabis indica
tgggccttgcataacctcttccagggtggcaagcttctttggccctttcttggaggatttggcgctagacacattaggattcaacatggagtttgtgtgatggagctcaagaatttctttgtcaaacccaaagaaaccgtgtttgtgaaggtcttaaagaacttcactcatctgaaagataagaaacccatcagttagcccccacataaaaccctaggttaaaagggggaatgggggtcccctaacagctgggaagaagccctctccggatcaatgttaaaaggaatctaacgattcacagtggcaaacatcgagttcaaagaatccaagcaatatagagaaatcaagagaaaatagtaggaatgtgcagagatggtttaaatcgctaaatatttacagagaaaacgtgggttggagggcctctggccctttgctccacccaaaggaaaaataaatatataataataaaggaagataaaataatcgtcagacattccaagaaagggtatcccacgaataaccgccatggctgttatccagggttaacatgcatacgatttcctttaaaaagagtgaatcactatctatcacctcatgctctactatatgaaaaaggtgaaagaaagaagagcttacacgatgaaggcagagtagaggtagcagctgtcgtacaacggtagtaactcgcctggcaacggtggaggaagagtaaaaggaagtcgggaaggtttggaattttgtcgagagagtttgtaagactgaaaatcaaaatacactgcgtaagtaagccagtgacaagaggtacaagtttttataggcccctcaaggaatgagccagcatcaatcgagtaccattgagcagtgggggttcacaatgattcaaattctagtgatccaacggttagggtaaatgcatgagacgaagagaaaagggcagtttagacgtttgagtacctttttgacaacgacattaatgaagggtctatcaacaggtgggaatcgaatcgttgcctgccaaaaataagacagaatgattatgaacattaaaatggaccacatgcatgcgaggtacgtgccatgtcacttcctaagaacagaagcaatacacaagtctcatttacaaagtactaaataagacttgggaggtaaatgttgccctggttttctcccaatgtacgtggcaatctcgcaatgtgacatgtgacagattaagctcgaggactcggagataattaaaggaaagtcattacataggcgaaatctccgtaggaaaacccaatagctactccaggagcaatgacttggtctagaggattcgtcttgaatttgccttaatgagctagatagcgtcaaactccttcgaatttagggtaccggagatgtagtgtcaacaagaatttaatgcagcatggaggaagcgtctaccaatgtatatgaaaggacgtgtcagacgtattaaacccatccttaggcaattatgcgctaataaaggatataagtgacgactccataatgtccaatcacatcaatcaaaaatgggttaagagctagtctcacctaaaccctacgcaccctactaagtagggagtgcatgccctacttcatagatttggaaagttgtgtacaaccaaggtagaagcttaagacaattgtgacctttcttctcttttacaactactataaataaccccaaccaaactaatgagggggagagagggtaaaaaacaaaaaagagcataacattccctgtaagaaatacccacatattaatatcaaggactcgtggactaaggctcattaatgccccaaccacgtaaaaatatttgcatttactctccttaaaccatctttactacattaatgatttagttgccaaaaatctcgatcaacactggaaaatgagtattgattattctctagacatagattttgatataggacgagagtacctatatggttatgtagcatttacgatttttatgcttaatggctcatatgtgtttaaatttatcacgagagtagaaagttgcatataggttaagatttgtatgtcctagcccaaatataagtttctttaataaatttgctatcacatgaaaattaaaactgagaattaaattatattaaatcatataaagtagatgtaattgaaattaatcaccctaagttttattcattcttaatttcaccttaattattaattttctttgtttttttagtagaaatttaacatattttcttattctattatcaccaaatagaattaagaatttaattatttggtaattaactatagtccttgtgggatcgactcacacttgtaagtctattacttgtaaacgatacgtatacttgtgtgttggaaaattcataacacccaacgcatttagaactgaagtagctagttggaccccactttaacttttaagttaataaaattaaaagtaaataaataaaatagaacgacacgattacttggcagtgacaatgctacaaaaattatcactcaaaaaacacgttctctcaacttcatcactgttagattttgtgcaataaataaaagtcatttcaatataatcatatttactaattaataaaatatcaaaaatcattttatgttgcatggttcacatgatttatttcatgattatgtgtttaatgtataaattctattaaatccaaaacatatagttattcgtgattataatgttatcaacagagtgaaatataatcatgattatatatttcaaagttttatgtctcatgatttgtcaatacactagatttagattgacatgataatcagcgataaagtatacttacaccttagataaggttcatgtcctttctaggatattggcaaagtatgctagtatcaaatgtataga

SEQ ID NO: 386596 - DNA, 3845 bp, Cannabis indica
gtttgtcaaattttcttgttttaatgttgtttgaatattatttttctgttacttttatgtaattttcttattatttttttgtatattttttataaatcaccgtaaaaatatataaaaaaaattaaacacaaaaatgtaaaaatttaaaagagaaaataaaataacgcatatgtaattatctcatatgacaaacctaatgaaactatacatccactttctcaccagtttattcttacccatccaatccacccacagtttacacaccatagctatctcacactgttcattcttattttaaacaaacaattgagatattcttggggtgtcagcatagtgccacaagccacttacaatgcattgtacattgtcaggcgtgtgacattgtataaatatgtcacaagtttgttttgaattttcaattattagtttatttacttatttatttaattaatagtttaaataatttaaaatgagaaattaaataaataataacaaaaaatgtttgttaaaaatttaaatttatttaaatattcaagtataaaatattttttaacttattagattttattatacttataactaagttataagctatcaagtttagatgaaatattcaatttttcactttattttgttaaactcgttgacaatgtcttctaactgtttggtgagatttttaacagtatcttctaaaccctatttttcatactcaagtcgttagttttcatcattgagtcccttgaccctcttttggcctgtatcctccaaagtctcaacgctacgagtgtgatcccatcacattcggagactccgactcctatcatgaaagctacactcacaatgatcccttggttgttgaggtgcagatagccaacatgatggtgacaagagtgatgatcgatgacaaagcatcctcgaacatcttaatcaagaaaaccttaatccagatgggtttgtcacttgaagacctgaagccatgcgagcacctaatgtatggttttagcagagccgcaatagctccatgtggtaagatcaaactaccactcacagtcgacactgctccaatgaagaccaccatcatggccacgttcatagtagtggatatgaagtctccatacaacattatgctcagaaggccagccctatacgacctttgagctatctcgtcaagataccacttgtccatcaagttttcaatgaagactggtatcgattgtctccttgggaatcaaggaactgcccacgagtgctataacacttcattatctctaaacaagacgacctcctctactgcttcgataccgaggtggacgaacaagaccccttctactatcttggcaccagggggacgaacaagacctctctcgtgaaagtcgaagagacgacaaagacctttggagtttaaattatggagaagacggagacagcacctaaaaccacttgacggtgcaccgaagatggggacaaaattcacccccattttagggaaattgactcgggagttggcccggacgaggaactcaaagaacttcccctcaacataatggacccgaccaaggttgtcaagattggaacaaaccttatgaaggttttgatcgagattgtcatggcttgcctcaagagaaatcaagacatatttgcctagtcgcatgaggacatgattgggatcgacccccaggtaatctgtcatgaccttaacatagacaaagcaaacttctgacctatgcaacagaaacacgagctccttgataaagagcgctccaacgctctcaaggaagaagttgaaagactatgggagaacaacttcattagggaatttttctacccagtttgggtatccaaccctgttttggtacctaaactgaatggtaagtggagaacttacgtctacttcactgacctaaacaaagtatgccctaaacattgttttcctttaccacgaattgattaactagtggatgtgaaagtactcggccatgaactcctcacattcatggatgcctattttgactacaactaaatcagcatgcacgcaacaaatgaagaacatattgatttatgcgtgctacatagtaatgcccttcgaacataagaatgcaggtgctacaaacaagagactagtcaaccgtatgtttcatgacataattgagaacaatatagaagtctacgtcgatgacgtgctggtcaagtcaaagaaatgcaaagaccacatgaaagacttagaggaatgcttcaacatcctgtgggaatatagaatgaagcccaatcctctaaaatgtgcctttggggtctaatcaagaaaattcttggattcattgtcaactcaagaggaattgaagtgaatctagagaagatcaaggcattgtaaaacatgaattcaccatcccagataaaatacgtgcaaagcctaaccagaagaatcgttgcacttagtaggttcatctcaaagtcaactgataagtgtattcccttctttaatttactaaaaggaagcaagaagaggtttgaatggactaattgttagaacttattttacaaggatctagatttactaacatatatgttgattataatctatgatctaacatccttaaatgaatttcctaaaataatgaaataaacacatataaagttgtagaaaaccttacattggtggcaacagaatataatggctcattccattcagatctctaacctttattcctttctgttgcagagtattaccaagatttgaacctgaatctctttaaatgatgaaattctttacaatcttccacaccatgattgagtattgacttgaattgagtgggcaagtactctatcactatagagttcgaaaattttaaagaagaaagggaaggaatttcaaaatctaataggagcctctcttactttgtctaataaagtgaatttgagttatcaagttatgaaaataagagcctatcattatctatttataagattccttctagggttaggatttaaattatatggaatttaaaaaagataaaataatggcataataatcctttaagtggccgcccctataagtggatcccaaaggtttcaattttgccatttatttaacaacttatcttttctttcacaaatgacatattttaattttaatcttttaaatgtcaaatctatctatttaataattataattaatataaataaattttttatttaactaatttattaattagaccttgcaaagtgtcttaattaacaaaatagaccctaaatactctcttttttcttaattaggccattgcttagtaaaaattcataaataagacatagtctaatttagaattctaatcggtcaattataactaattaattgagtcttcaagccaatattatctcaactagtgtcgggaccatgggcttatatagctcctaataagtagattcaaaatttaccaagtaaatttcctatcttattagttcctcctgactccactatagattcaaaattgtactcctgatgacatagaacactctatatgttctaaatatagatgcagtattaattattcattattttaatttaaataatcaaagatccttataaatgatttacatcaagtagggacaaatttatcagtctacacctcaatgtattttatccttaaaatacttagctttttataaatagttactgaaataagagctcttccatttatctctattaagccaagctcaaggaaaatcatcatttcacttctatgttattatagaagctatagattccgtatctatgattagcactcccacttaattgtactatcatgtccccaagatgtaagtattggaccgatccatttggtcagctttaa

SEQ ID NO: 386597 - DNA, 1377 bp, Cannabis indica
atttgtaagtcttggttaaagtcacaaagttaaattttttaatttctcaaaaatcgggtataatagtgaggattgactcccttgaagagacaaaatgttttaaatgcaaataacaaaaaatacattagtaagaaaaaataaaaaataataattataataaataaataaatattgttacaaagttcattgttatccgcgttttcggcaagggacacgtggattctaggtcagcatccaaagcccaccagtaggctcgaaaaagataacttgggccaagcccaagtccaacaagaccttccaggaaggtctttgtgttcctcgctcagacgagcttcttccaaggacagcacatatctggaagtaggctcagtaccgcgttcccgaaaggctaaccagcatgttcctagaagcctagcatagtttccccttttactaaattgcatagaataaggaagctaccatccacgaatctcggccagaagatcgtatcaagcttaaagggaaaactacccaaaataaagatcaaataataaattcacaattaaaggagacggtatcgatagcttaactgtatcctatatgcctagtcaacagattaactccttcatgggctggaccttacgagaacaacccaatttatgtattttcatctaaactctccattagaggcataaagggaaactaagtataattctcttaatactataaatacctaacgaattatttggattaagggttggtctctcttacaatatttgctcatgcaaactagagaacttatgctcattgtattcccaaaggcttttccaacaaatgatacataataatatcgactcgtggactaaggcttgttaacgcctaaaccacgtaaaatttatgtgtgttgttcttattctttttttttttgattatttatttcttcagctttgatttattacaattggtttttcgaaagtctcgataaaatttttggtgctttccttaagagttgaaggaagcagtgataccatctgaagattacgctttaacatggtactcacccgaaataagtctggttttcacttcactgatcctaatgccaaggcatggatacagaagatcagaatgaagcaatcagctatcacaatgatcaacttggcaaagacacaaatctagatgctcctgtattcgaagatgatgattcaaaagagaatagttctcatgatgttgaagatgatcctcaagaaacctcgaaagataatcctcaagacacaccgaaagattttcattaagccaagattgttaatgatgatgttggaggaaagtataatcctgtaatacccggtaaaaatatacatatattttaaattttatttgttatacaatttgtgtgagaat

SEQ ID NO: 386598 - DNA, 554 bp, Cannabis indica
ttgtttggaggtatacatgatagatttttggcgtgaaactctcaaattaagtttggcatataaagaaaattttgcttggaaacttgaggaggagaacaactttattagcttatatatgtgacccataatataataatgcataatgcactgccaataatgatgatgtcaaaaggttgattctctatatcttttggcttcatcatctctatatataccatgcaaattaatatatacttttttattttttttaaaagttaaatgagaatttctattataataagtatattattacatctagatcaatattactcattgagtagaatgtataataatagaccaattaagtcatttataataaatagattaaagatcctaatattatcttcaactaaataattcttgaatgaatttaaaagaatggaaagaatactatatttttttctgaatgaatatgtgacagatcatacgtataatgactattagataatattgtcccacgtagattaaatataaaaacactactacaaaaacaccctttagaggcggtttttaag

SEQ ID NO: 386599 - DNA, 511 bp, Cannabis indica
tctttgcattcgaaattcagcagccaatactgtcgtggctctgcacagaattgggacgaggttctttgaacttcagaatctatccaacaacctaagaaggactgagtctcctatgacaaattcagtccctttgatcacagcagcgagaagtttcagtgcagatcacaggagtttttccaatgtcgttttttctgatgcttcatggacaagggagaacgcatgaatagcagctgtatgtgttgatattcacaatggaagctggtctatccactcccagaaaattaaggctttttcggccttggaagcagaattttgggctatctatcttgctctgtccagtgctgttgatttgggatggcaagaagttcactcctctctgactcaagcattgctatcaaagccctttctagcccaggggatgcccagattggaagtttgctaatgtttttactcaattataaacttgtcaaaaaaatttctgaattgtcatttcttttatattaaccgtagt

SEQ ID NO: 386600 - DNA, 1277 bp, Cannabis indica
actttctccttaccaccatagtcggttttgttgttgatcttccctgcctcggatgttagatgattgctggcaccactatcagcataccatccatcatcatgcagagtttctggtgtggcaaccaaggcaaattgctgctgtttgtcttgagggtgatcactgtttggtggttggccggtatagctctcatcatatcgattataacacacagctgctgaatgaccatattttccacacacttgacatgtgggttttgagttgttgtgtctaccacctcttcctcttcctctgttgctgcctcctcgagccataccagtatgctgattaccacctcggccttgattatttccagatctgcctctcccgtgactggagttatagccaggattgtaaggtttgtgagccatgttggcagttggattatcaagttgtttagagttggtggaaaatgaagtgagcctctctagtttactgtcaaaactaagaagagtgctagagagttcctgccaagaaagagtggttctggcttcgagaggcacaacaatagttaagtattcagcacctaaaccagataacacattacctcgaagaagattgtcaggatatggttcccctgccaaagcaagagtgtcagcccaaagtcgtttttgcttcaggtaatctgtcatggactgggatcctttccttgctgtttgtaattttgttctgagatcttccatgttagctcttgaatgagcaccatataagtcttcaagagctgtccatatacttgcagcagatctgcagcctataacctcagatgcaatgccttctgtcattgagccaaaaagccaacccattaggagttggtcgtgagttatccagagttcatactcaggatttggatttgaggtttcagcttcaccattctctgaaaccagcagctctggagggcatggtttggcaccattgagaaatccttccagtcggtgtcctctgataatggtcattaccattgttttccataaaggaaagttacttctatccagcttcatcgtgaaaggctggcttagagtgttgctgaagggtgtcgacattgttgcagagtttgctgaagtcgacccagtgaagacgacaccagagttgatcgagggagtctgttctgctcctcttccaggagtctgaggttcattcgtagccatggcaaacgcctagcaatggctctgataccaagtgcaaatattagtaaaaacagagaaaacagaaatgtttgcaaaactcagctcaatgagcttgag

SEQ ID NO: 386601 - DNA, 1036 bp, Cannabis indica
aaaaaaaaaaaaaacttcagaaatattacccaaaaaatggaaggtcatttttgtcaaaataacagaccatttttctgggttactgccagcaaaaacgggagaccgtttacgagaaaatagtctgtcattttctattgtagttttccaaaacatctcatttcaaacccaaagcaaccccaactgtcaaaccaagctttagaacacctaattagggtccaacaaacataacccaagcagtagcaacaattatagttcagaattacaaaaaactacaattgttgagctaagtgagttcttaaactcaaacttgctcaactctataatcaaccctcataatccaaccaaagaagcttcaaacaaatctaacaaaccttaggaaacaatccccaaacacaaatgattcggacaaaacctaactcaggatttttcatgttcaaatcaaacaaaaagctttaaaactcaaggggaagaactctagggcttatctcttgttttaatccttcaatccttgttgaaaattacaaaaattgatgaagaacagtggttggttccttctggttcttagggccgaacaagggagaataagtttgaaataatgtgtttttgtgaaaaacttaaatttatttttcttttaataatctaataataatctaacttcagctcactactaagaaataggcttttggtgtcggttcatttttttaaaaaaaaaaaaagcactaagaccaccccaactctttggtcttggtttataactaacacctataataactttaagtgtcggttagtagaccaacactaaaagtataaccaagaccaaaaaaatattaaaaaatatacatatagattaagtatagttgtcggttcataaccgagactaaaagatgctttagtcttggttatgaactgacacttataaaacatgaattcaaaataaaaaaaaaaatccaaactaaaaaaacccatttcaaaatcctaccctaatcattaaaaaccctacccacatttcaaaactactcaacctctctctctctct

SEQ ID NO: 386602 - DNA, 1768 bp, Cannabis indica
attttcattcatctcaaccaacgtcacatttatttatattattgtttctttaattttattattatcattgtcgaattcttattaatacacataatattccgtatatataatttctatattatcatatggcatataaaccttatatttgaagccattattaattatattttaattaattttgtagggtgatcgttggaacaatatatagattcggagtagcacgtaattcattatggtcttcctacgcttggggatttttatattttttaattacatatcaaatatttaatttaatttaattagttgctaattaattatttatttacaaattaaactctctttaattgggtttgggacttctcacttttcaggcacaatcacaaacaatgtcttttccaaataccccgtacgcattgaataaggagaggtgagaaagctgtccatgagagaaatggagattttcatatgcatatggaaaaatgcaattaaagaggatgagtaccggattacaacatattagaatgagaattgctatgcaataagtatgtgattaacatttttttcggcgtcatactactattagtatatataagtatcgagtcgtctcatatagaaaatagcttgttgcggattaaacctcatcaaaaacaacataactaagagctcaaacaatcattagcataatgacaataactaaacaatcaataaacaaaacaatttgaatgaaagaatgaatctatatttcataacagtgtgataagaatgaggaggagaatatacaagtgaattcaataatacactaattacaaggttacaatctcagctcactatgagagaagtcacttcaaaagtaaacaatctctattttcaaccctccacgcacacacacaagctgaaagcataacctataacaatgatgactcctattttctctcttttctttctcctctaaaaagactctctttccacccagacctttctaatttaattcagttgaaattattgttctccaagtcatgagtgagttgagccattggtgtgtgtatttatacactgttatgacagttaagagacacacttaaccaacttgccgagctgttagaaaaccagttggttgacttcttgaaagtggttaaaccaccaacataatttttagagaatattgctaaccaatcataaaacactatctataaaatgtattggagacgtatctaataacaatgctccaagccatcacaccaccaccaaccactactactagctaggttttttgtttttttgtttttttttttgtaatttttaatatttttaaattttaaaatatatttatatactcgaaatgaaacttatatcaagaggattattctgattattttggtgtaatataggacttaatcgataattaagggtgttcatttaatttaatttgcggtgttttgcttatagcgcatttaatctgcgctaagtgcggatttcatattttggatccaatccaatccacacaatagttcaaattcaatccaatctaatctgcaaaagtgcggattgaatcagttattttggattgattatttttttaatattaaattatttaatatttatcaaaaaaatatttttctctcacataactaacaacagaataaaataaattattgctgttttatgtctctaataataaattaaaataaataaaataacaaataacaaattttaaaaaaaaattgtatgtataaaaaatattttatttaaattatatgtaaatatatat

SEQ ID NO: 386603 - DNA, 704 bp, Cannabis indica
attataatgaccgcttaattttattaaacgaactagtagataattagagcttatgatcagaaataaactttagaataataatatcatggggagtatgccacacagttcaatgtagctaccactgcatataatgaaaataatactacattggaaagacttttctactataaccccaaatttaaagtcatgttggagttgcttataggacactattgtggagtcttttgtaatattcttatttattattaattaattactttatttttctcagtatttatttgataagtcacattcagaccaagccttaaacattatagtttggaaaattatagataatgacccaaaattatagtattatgtaagtaaatgttttcatttcaaaatttgtagagaaatgaccattttatactatttattatttatattgtattttgccatataaaaaataatttttttatatatttttttttataattagaagcaaattacttaaaaattgtggtatatctatattagttttgttaaaatcttttttattttaaggcacgttgatttttttaatttttaataggttgttgtgggttgttggtatgtagattttgttgcactgtatatttctgttttattatatggtatattattagatatttattttttatttgctatgtataatagtgatatataactttgttagcataatacat

SEQ ID NO: 386604 - DNA, 1363 bp, Cannabis indica
ggtaatgacctacttctcttttgattgtattgatattagacattgttatcccaatttttggacacatgacgtggcatatccatgtgagcaagattattgccacgtggagtataacttgtgaacaagaacgccaaatacttaagcggacaaagaaacaacaaactggccaccttaaggggtctagccagactccccgtggctggccctatcgccagcataggccggctagcctccaacgaaaggaaaggctggacatcctacatcctaacaggcacttgtccgaccagcttacaccctggcaggcactaggtgcgtagcttgcaacctggacaataattcaagctacaaattaggcttaaaccacccacaaaaataggggataaatatcagctattaacctattcttggggattaattaacatattaatttttattattttattatgtaacagatatattatctttcctatttttaagggatattaacctattattctcttgtaagttctcctatataaataacatcaacctaaacctaatttccctaagtcctaagcaccctaagctctcaagctctatgtctcaaaccctagctctctctctccctctcttctacatgccctagccattgtagatgagactaagtctccttcatctctcttacttgacatttgcgtaatgattctcactattttaatctttagagagccacttcagaatccacaacagttgtaatctgagtggcattatctctggtattaatacaaccaaaaggggagtaggtcattacccattaactaagggggccaaacctttataaaaatattgtgtccttttactttctttttcttatcgtgtacacgtggtgatatatgtcataaatacgaccccgttgttggttggccaagtctaaggtcaataattaagtgctttcattgagagtgttatcgactgattttatgtaacaccatggttaacatagggagaactttggctataactcctacgtcatcagatcttcctcaaggccctatgactattgatcctaatgtttgtgttacaaccaaaattaaaatctccacgaatttgatggatgtggccaaccctgccaactcaacaggtacaacaaacttgaccaatacaattggtcagcttgacactacaaacctgactgatcccaatgaccagcctctactgcccagggtagatccaccattggcacctcatactaaaggtatggccaatgtggagcacccctcgggaaccataactaagtttggcccccggtataatgttggggaaataggccctggaattggtgagtcagccattggtgagcttcatgtggatttatgagaagatt

SEQ ID NO: 386605 - DNA, 767 bp, Cannabis indica
taaaaaaaaaaaaaaaaaaaaaactaaacactcaaacaattaaacaaatgtctagagtccttaacaattaatccaaaaaaaacagttaattataacctaactacaaattttctcaactgccattaaacaattcatctctagcactatcactaaccattaatttattattttttatatctaactgaaagtctctttgatacctgcaatttaataatattgagttctcttttcattctttcccaccaagttaatgtgggttcacaataatgtatgtgtttttgttagtgaataatttttttttcataatttgtggcaatactactaagattttaaattaagggcgattgattttctaatatgtacatattgtttgaattttttatttccattgtctaaattatttaaaatttttaaaaattataaataattcaaaaaaaattataaaaaaaattagattgaatttctattctaaacttcaaaacagattaaaaatgtaggaatgttcataaaatattcaatccaatccgcacgattcaatttgtaaagtttggatatcccttttgcagattaaattggattgaaaaatctaaaatctatatttgtggagattgaatattgattgacttgtagaaataactgatttacatatttatatactaggtgattgttacgtgccaagccacgtagtgttagttttatttaatattttagtttttattttaattaataattaaaatagtataattatttgaacgatttattttata

SEQ ID NO: 386606 - DNA, 3590 bp, Cannabis indica
aagaagcagcaatgggttcgaaagggatattgtgtagcaacaaaaggaagcgaaagcgagtcctggtagcagcaaagtggatgctgagggcttccaaccggtgtcaaatggatggaaaaccagacccgaagcagcacctactgctactatagttcgcaacaagttcattgcactgggggataataatgatgttgacatagtttggaaatgtgggaattgaggaagttgataaaacagggcaatctatagaagaggttaagaatggagggagggggggggggagggccctctctcaataatggatagaattttaagttggaatgtctgggggatcaatagccaacaaaaacaaaatctagtcaagcaattgattagttctcaaaaggttgggctagttggtctcctcgagacaagagttaaggctcggaacttgggagccttatacttaagaatgttttcggggtggtgcttcacctctaataatgcgtggcacaagggtggaaggataatagtaagttggaatcctaatagttttgatgttaacatcattaagtgtactagtcaactcattcatctcttcgttgaaaccgtagacaaaaagttttttttgacctttgttcatggtttcaatgatgagattgagagaagaaatttatgggcagacttgagggacatagctagtaaagaagcttgggtggtgcttggagattttaatgatatccttaataaggaagaaagattaggcaccaaggtaaagcataagaattcttcggaatttcaagattgtgttgatgattgcaaccttgaagatgtaaagtttgtgggcagcttctttacctggtgtaacaagcagttaggagatgaaagaatatattcaaaaattgatagagttcttgcaaatcctagctggcttgatgatcatctgaatgctgaagttgtttttcataatgagggcttgttagatcattcccctgctgctctaactgtttcggcttctcttcttaggggcaataagccgttcagatattttaagatgtggtcttcgcatctagaatacaataagttgattcgagataggtggatggagaaggatagtggtatgaaaatgtttcagatagtgaccaagttaaaagggctgaaaccgaagcttaagcagctgaattatcagcactttgctgatatacctgctgctcatgctaaggccaaaatggagctagaagcatgccaaaaggaattacaccagagtctaatgaatgcagagttgcaggttcctcaagctgctgccaggactgagttcgctatcattcaagctgtctatctttcttttctccaacaaaaagcaaagattttatggctcaaagaaggggactccaattcagccttttaccacaatagtattcgtgccaggagaaatcaaaatcagattttttctatcatggactctaatggggtaagagttgataatcctcatcaaatttccactttgtttttagagtactacaatcagattttgggaagcaagatggttaataggaaatcggtaatggaaggtatcatgaagcaaggtccgattttgtctagccagcaagttgagatgctagtgatgcattacacaagagaggaagtcaagaaagcaatcttcgatattcctggaaataaagctccacgtgctgatggatattgtagctttttcttccaggataactgggagttggtgggagaagatgtatttgaagccatcacctccttcttgcattctgggaagatccttagagaggtaaacaatactgttttgaccctagtgcctaaaataaagtgtccaaatactgttggtgattataggccaatagcttgttgcaatgtgttgtataaagcagctactaagttgatttgttcaaggctgaaactggtattaccggatttgatttcacagaatcacagtggttttgtgcaggggaggttcattgggcataatattatggtctgtcaggacttaattaggcattatggaaggaaaacctctaaggcgaattgtatgatcaagctagatttacaaaaagcatacgatacagtggaatgggattttattgaagagaagcttgtggctttcaaattcccagctagctttgttaaacttattatggtgtgtgtcaggactccaaaattctccttgatgttcaatggtttcctacatggatactttgaatcaaaaagggggctccgacaaggtgatctgatgtcccccgttttgtttgtattgggaatggaatacttatccagaattatgaggaaagtcaggcttaaacaggactttaagtttcatgagagatgtggagaattgaagctcaaccacctcagctttgcagatgatgttttgctgttctgtaatggagattacaagagtatatacctcatgcttcaaggccttgaactgttctcgcaaacatcaggtttgaaactgaatccttctaaaacggttgtctattgtaataacatgagtgatgtggatgttcaaaggatcttagatgcttctggattctctaaacaagaagtcccttttaaatacttgggcattcccatttgcccaaaaaagctttctgctaagcaatgtgatcttttagttgaaaaaatggttggccgaattagaacttggagttctagaaacctttcctttgcaggtagaattgtgcttatcaactccgtcttaatggcaatccactcttattggagtcaaataatggttcttcccaagaccattattaaggagattgaggctatttgtagaggcttcctttggagtgggactcatcacttgacgggagtggctgctgttgcttggagtaaggtttgtcacacaaaatcagcaggtggtttgggtttgaaatctgttggagattggaacattgcagcgatgtttaaatacaatctatgggtgaaatgggttcattgtgtttatattaagggggctgattggtggcaatacaatgctagtgcaaacgatagttggtattggaggaaattagttgcaataaagggtagagtcttggagctttttgatgccaaggaaagacaagattgctgcagcatgtacacaatagcaactggttacaataaactagtgcctgcaggtgagaagaaacagtggtcttctgtggtttggagccgactcaattgccccaaacatagttttatcttttggctaaccattctgcagaaattgaagactaaagatcgagtgaagagctataaacctcaaattgataccagctgtattttatgcagcagtagtgcagaagagagtgttgagcacctcttttttgcttgatcctttactcgagagtgctttgagttggttaaacattggctgggctggcggacaggtgcgaatacagtggatagagttgtgaattggcttggaaaagctaaggttagcaagttcaaaagagcagtatttattgctgctcttgctgccttgatttaccaagtgtggttctgccgaaatgggaaattgtgggaaggcaaagagtgcaattgtaatgtgatttttcagcaagtacaaagtgtaataaagagtagaatatcttgtatat

SEQ ID NO: 386607 - DNA, 1082 bp, Cannabis indica
gagagagagagaggaagtggtgatgtgagagtgtggcttgaccaaatgagccttaaataggttttgataagcccttctcttcatacatgcaacaagcaattatacagcctgtaagatatctatgcagaggattaatagttccctatttgggaacatgagcaaccaaagaaaaaaaaaaaaagtttataactaaagttgttacataaaagctgcccggttaagacttcaacagtcagaagtggagttggaaagtccctatctatacagacgcccaaatagggactcgggggcaaattttatcacaatttttactcacgtgacgtggcgtgtctacataggcaagattgatgccacgtggagtacaaatactcaagctggacaaatagacaacaaactggccaactagggaggtctagccggaccacccctggccgaccgtagtgcaacataggctggccagcctctagcaaagggtaggtcggccaacttctcttctagcaaacacttttggtgtctctgcatctttcaactcggacatgaactcttagttacaaattggcttcaacaacccacaaaaataggggtttaacgttagttatttacctattctttatgaataattagtaagttatttacttatttatttaatatgtaagaaataggtgatatctcctcattttaagggatatcaacctactatcttctataagctccctcctatataaagagcactaggctaaccctataagctcttgagttcaagcactcaaagccctagctctctctcctacacgccacttgcagtgtagtagagactaagtctccctcatctcattaccttgagaagtgtcttacattctcaccattgtactacatagagagccactctagaactcataacacttgtgatctgagtggtattatctctcatatcaatacaactaaaaggggagtaggtcgttacccgctaactaagggggtcaaacctctataaaattactgtgtccatttatttacttgctctaattgtttactgttggaatttattttaccaggatcttagatcaactcacaagtatgtt

SEQ ID NO: 386608 - DNA, 570 bp, Cannabis indica
tcaataattatgtggtgcttcaacaatacactctaaattcgtgtttttgatatcgaaatagttgtaattttaattattattttatataataatatacattgtagtaatttaagacaacaatttacaatcaaatggtaggatttaaacggtttatttcacacatttataaataaaaaagacatgcataacaaattatttgaatcttatttttaacatattatattattcaaaaaaatttaaaaatttataaaaattcttaaatagttacgatgcatagtgttatatattaaaaaattaaaattagaactctctaaatatcgaaaataattttttaaaaaatacatccatacaatcattttaaaagggccacaataggattttttttataatattatagttattaagtagtactaattaattagtaagatttttgaatggatctaattttcttctgtatatattacatgaataaataatctgttaataaaatcattgcaaaaaaacagtaggaagattcttgaattaatctaatttttttcttctgtattacatgaataaataatctgttaa

SEQ ID NO: 386609 - DNA, 1910 bp, Cannabis indica
tatatatatattatacatattcaaactagacaacaaaattttgcttacaatttattttttttaaaaaatatattaataggctctttcttaaaatcaaatcaaatcttggcagtggcatattggtatccaataccaaaaaaggataaaattggattaacgtgttggttttgatcatagttttactttttaaaaaataaatatataattggtattagtcataaagtattatcttagctatagctatagcttactttttatgtgggttctttattccaatattgatgggtaagtggtggtggtgagaataattaattaattatagtactttaaggtacgtagtaggtttttcttgccttctcttggaatgcatattggaggaaattaagaacggttactaaagctaattttggcttttgttctactttattaagcactaactactaaaggtaaaacagaaaaattggcatgtttatggcggttttgataaagttttcatacagactcgcaaagtaatttctttaaaatacgtttaattagattaattttaatattatttttttaaagcatgaacaaagtcattaaaaatataataacagcgtacaaactagctataaatactatatatcttgcatgttcatcaagcaaatactatatacatgccttgccatgtttatcaaaataataatatacatctcacaaaaataaaatatggataatcatctagttaaacaagttgttcatctatatccaaaaagaacgcataactaatccatgtgtaacataaattagggacactcttaaaaatttagataataaatttgcaaaaatttctaacaataatcattagagtaggaaactctgatagtaaaaatatttattattgctaaatcctgataacaagttccaatctaatgtcataatcaatgtcacgcaatatgttttaaaaacttgatggtttgttaaattagatagagtaaatagttgtgatttattttaggtgatagttttgtaatgtatttagtgactagtgtagtacgatgataacttgatagttggttgtgtatttcgtagagaatggtttgacttagaagagcattatataagaaaatagtaagctttattgatagtttggatgttggttacagaatttagaatttttaatggggtatttatagttgcttaccccttacactttgtagttgaaataatttcttctagatccttcttttactagaagaaattgtatctatacacatctaaatgtttctagacttcacttagctagtatattctacattaatctattctataaattactaaagttcttagggaatttttttttaaatgtatagaaatttctagactaaacttttgtaaaaatgtgtagcacattctaatactgttccttggtacacattttggtaattccgaccaggtctcgtagtagctcaaacttactcattggtagcgccttagtgaaaatatctgccatttgttcttcggtcttgcaatgcttaagctcaatttctttgtttgcttcaacttctctgatgaaatgatattcttatatgcttggtcctgctatggaatacaagattcttcgctattactatagctgacttgctatcgcaatatatctttgtagcctcttttggtgaacctcacatgtcttcaagtattattttaagccatatagtttggtttatagtcattgttgctgtaatatatctcgcttccgctgatgattgcgcaaatgttgcttgtttcttagaggcccatgaaaatattctagatccaagtgtgaaggcatatcttgacgtactttcaatgtcatccatggatcctacccagaaactatttatgtaaccaatcagttttgactcattcgtgacttcgtaccagattccgta

SEQ ID NO: 386610 - DNA, 952 bp, Cannabis indica
ttttttctcataggcttaccaagtgatgcacctagtgatattgtgattctcccttccatgcactctccaacaatttatcacttgttttattatttttatgataatttgattaattgcattgattacatttattacgtttatgttgttgaaagcttatgccaacacgagaggaaaattaggtgaaaatttattgaaaattatgtgtattattgacttttatctaatcaaattttgtgattagtttagtatgttttttgagtttcatattttgaagatttttcaacctatggtattcaatatcaatcaaatgtgttggtgattaaactttatgtatgtgtaattaactcttttttttttttttttgaaccaattctatttaatttatgttcctctataattggaattaattttttttaattagaaccgattttctaaactactgtgtgttgtttatttttacctattttattatagaaacagttctattttaatttatgtctcagttggttttttatttaagtcatttaaaaaaaagttcttgaattattcattttaaaaaataattttttttatttaattaattcaaggaaccggtttttaatttagtcattttggaaacttattttcaatttagttaattcaaggaactagcttttaatttatttgtttttatttaattgatttttgtgtataaatttttatcttggttgttttacggaacctatgttatagaactgattctatttaatttatatatgagacatctatttttggtgacaattctagcaatggagacttttttcggcactggcgacttttcgaagacttttttggttcctgtaactttttcggcaccgacaacttctccatcaaattttcagtgatatttattattaaaaattttatcaaatttatttatagtgtttttttttcccatattttaaactttaat

SEQ ID NO: 386611 - DNA, 712 bp, Cannabis indica
tctcgtctatctctctctttgacgaaaagggcaacgagccacaaggctccatctctgaatcaattttgactctcaaagatggcttccttgctcgtcacttcacattaattcatccttctgcgatcgctatcaaccttagttcttctgggttcatggcttactctcttgataaacaaaactctcttataccaaggtataggttttattgcatatgaccatttctcacattttggccttgggaaacctttgatactattttccttccatatttttggtaatggtggaaccctaacgggttcgaattggatttctcggctcttaaatcgggggttttaagagcaaaaatgtgttgtaaggtattggtattgttgtattgaaatggtccttaaaatccaaataattagcacaattttctctattttttaaatctgcatatgtatttttttgtttgatttagggaaaatattggtggtcgtggtggtaatgatagtgtggttgtgataatggtagtagttgtggtgtgacgatggtgatgattgcaccatgaaggtgcagcgttaatggaggtggtgtgacggtggtggtgttaacggaggtggtgtgacggtggtggtgtggtggttgttgtggggtgagtgttgaatgtctttgaaggttgaagaaggaagaagaaaaaaaattactattttttatttattttaaattttaattt

SEQ ID NO: 386612 - DNA, 3673 bp, Cannabis indica
agtgtatgggagctcgcatgcgatcccatagggggctcgcatgcgagctgtgtgtgcatatgttgggtgttaggggctcgcatgtgagccattgtgtgtgttacgtgaatgtgtttcaggatttgtaagtataaagtgagaggtgaatgcacatcgacaagaatgacattggaggaggaattaaaatgacaaggtgtgtaagggaaaagcgtacaaccacacctcccgaagactttgaaagtgcgaaggtacgagtagcgatgacaacagacctacaaggtctgaaaaccctatcaagggtacgctacagccaccctcctgcaatctgtaactggggaccacatgcctgcaactatggaccaccctattgcaactcgggatcacatgcctgcaactggggatcaccctcctacaacctgtaaccagggatcacatgcctaaccagggatcacatgcttgcaaccgaggaccacctaacaccaggcaagggtacgaggtgcaaggccacatcctgcacctactgcatgcagcatgagagtgacgttttcccccttgggaccactttgtacctcaagccattagagcttataaatacccctttttttaaatgtgagagggagttgaaaaatcatacttgtaataccatattgagagtaatagaaatttctctattattctctccatttcaagatagcaatttgagtttacatttcatctttttcttcatttcatctccgatcttgaagcataagttgatttttcggccacaagttggttgacaagtcctcaccgtcaatagtttggcatcgtctatgggaacaataagcttgagccaagtcgttccttctcacagaatcgatataaaatgcctagatgctctcgttgcttaacgacaactagttggtcaatttggggcaagacctccctccacaagtcattggagaacaaggcgctaatggtccagccctcaggttagaggagaaaacgagagtattgtccagcctcaggtaggaggagagggtgcgagcaggtgggaatctcaagcaaagaaaggagaccgtcgccgtagaaaaaccctagtggacaagctgcacgacaaagttactgcccccatcatgagcgaaggtaaatgtatgatacaaaggaaggaggtcccatcatcactgaggcaccctctgctactaacaccgcgagatctcggtacctcgcgacatcgccctggaaaggagaagtgagctaactctgtgagtccaaaatcccaaattttccactatgaagacaaagtaaataatctccacctggaagaaccaaagactagaaactacagtggccgatgtgcaaaaagtattgagtaccattcttgaaggcaaaactccgactttgcactttttatacaaaggtcattgacaagagtgcgagatcttaactacccacgacaacggggagaactccatgtcatccactgatggcaccccaagggatgagagaggaaaggacctgtcgcaaaatgagagcccaagaggttgctcagagaaacatgaatctacccgttggggtaagactgcaatgggggcaacatcaggtagtcttacgaagggattttagccaaagaatctcatgctagaggacaccgcgcttgcaccccctattcaagagcaaagcaagcagaaggcgtcaccccttaaccatggtggagagccgcacgatgatgggatgagaggagtactacccacgggctccatgcaaaccatatggaaaacccaagctccattctctaactctcaagaaatgatgaaaaatagaatgaaagagctagaagcagagatgaaagatctacatcgaaggatggctacaacatcaacgggagatttagaggatgataaattcgatgaggaatccctttttcaagggaaattcaaatggaacaacttccacccaatttcaaagaacctcgcatgacgccatatgatggtacaagtgatctgaaataccatctaggagcttttaatgagctaatgaagataaaaaaaggtatcatgtaaggcaaggtgccaatgctttatggttacacttaaaggggtcgcatataaatggttcaagaggcttggaccagaagcaattacatcttggaaataatttttggaggaattccttcaacaacattaagcgacaagcgattacatcgtgcatgtaacgagtatcaccaatataaagcaacgggagaaagaagactcaaggaggtacatctaatgctttaatgccgaagctgacaaggtaggaaggatgaccaacgatgaacataagttagctatagctgctggaatacgtcctgggagtagactatagaggaatatgttgaaaagggaattggatggcattaaagacttctacgagagggtagaaaaatacatttggaccgagcaaggaaatgaagtcttagagacgaacacaagcaagtgtacttcaaaaagcttgccaaacccttacaaggtctattagatagtacccccaatgctcgtaagctaatacatccaagtgaagtctctgctatacaacccataaaaatgaatatctgaggtattcctctaagtaaagccctactatgcgagaagaagatcctagcaataaccattttgcttttaatgtgctgcagtaaattaaagaagacactcatgtaagcctccaagtcaaagtgaatgatgctacacacttggggagcacaaaaaaaaaagaagagagagaaagagagagggaaatttatcaaatcgacaaggactagccacccttagtcaataagagaaatgcacctacctctccccataagagatcttaaaagacactcatggcctaatgctaaaacaagggggacgcctctcaagagtaagcaaataattgcaagtcaaaagggtagcgcagtaaagtaccataaggttcctctcattcgagtaaaaggatgaagaaataataagaggttaagactacttaaagagccatactcccttaaatggatgcccacttagcacagtggaaaaatggcttggccatagagcgatccccagagtcactcgactaatgctatttatgaaaatggcttagccaaagagtgacccccaaagttgtttggccaatgccagttacaaaatggatggccaaagaagacccccaaagtcagccagcatcaattacgaaaattgtttaatgagtgatcctcagagtctttcagccaatgtcaagtaaaattgttgctcgatcgcatgggggatgaggtcactcagtaaaaaataagtgggaagagagaaaagagggccaactaaggtaagaaaaatccattacaccaacatattgccataaaataaggttcaagcaagggaagcccccagtgcaaatggggcacttcctcgaagaaaactaagagggtctcacacttcggcaaggtaacttccctaactcactcagtcgacaagcacctaaaggaattcttgtagacttgaggcaagtgttggttggttaactaatctcgaaacaattaacaaaatcgcattcaatgagcttacatactcggtatgtatttcataatgtcgccatcaatactcgcatttcccaagatgcacccatgcgatttgatgattggtcctgtggtgatctaacagcgaaagtgttaggttttatgccc

SEQ ID NO: 386613 - DNA, 1765 bp, Cannabis indica
taggaaagcctgatgtcacacgtgctataacattcaactgtcattgcatatcttaaggtacaacttttaagataaggcatttgatgctctagccagcgaagagacactctgttagtcacatcaaatcaaggataaaaatcggacacacatcacccatccgatcagattcatgaccgaataagtccacgtgcgaccaacagctcctgcgcagacttgggggcaaatgttatcccaatttcttcacaggatgacatggcatccatctacgtggcacgtaaaatagattctatgacctggacagaagatttcacttgcaacgtaccctgcatggagatctaatgctcaaagtaagtaggagctgaacacccgaccagctttatcatgaaggtaactcgcataagttgaccggagaatatgaggtggacattttcaaaggatgtattatacatgtcctcgtgcttgcaatacacaaaaatatccttaatttcatgaaagaaagacaacttgcctaatttcccattttgctcattgtaataagggaaagtaaataatttcttcattttatttcttattagttttaagaaaccaattaatgtaattaatccctataaatagtggaatcatctcactattcaaggacatgaaattcattcagagaaaacacatgagagaaatctctatacaagagtggtaatactcatagatcactgtaagagcttttgagagatatcaaggccttcttgcttctctactgtcaagtcaacacaaactaaaagagaataggctattaccattatcaaggggccaaacctctatgattttggtattttttttaacttaatcataatatatatttattgtaattattcttaatcgctttaatttaagtcactgttattgactaaaagcgaggtcaatacctataaatactacgttataccctcatgcaaagggttggaaattcattgtgtaaatactatagcaaaaagttagggttcttaagcttgtaagaactctattgtaatacatcaagactacttagctaaatacaactgaatcatggactagggtttattaatattcgaaccacataaaaatcttcatctatactttttattgctttatttaatctctcaactcttattttaatctatttctgaaaatttcggtaaacaggagtactgtaaaagtgtgttgtaaaatagagattgtagaattttggtaatatattttaaatgatagagtagagaaattattaagattgcttatagatcactcccaatagatgttctaaattttgtttttccctaaaataaagaagagaatatacacatttatcaaaatgacgtcatacaataaatgctccattttacataaattttagagtaatgataatgttattctacatgtggagtaacactattcattgctttaaatttattttattagtatttttagttttaattattttttatgtgtatatattaatattatatattgaaaataaataaaatatattaaagattaaatataaaaagaataaagaagttaatggatgctgtaatgttaaaatttattagataaagtaaaatttatattttaaaggatagagaaaataaactcttgggcaagctcgaagtgctctaaggccaattctaatggacctctaaaaacctaaatattaggggtgttcgcggtgtaggtagtgcaggttgtaacttctttttttttcaaaccaaactgcatatatgatttttgtaatttc

SEQ ID NO: 386614 - DNA, 3265 bp, Cannabis indica
aattgttcaaaatattcgaagtttgctcttaacatagcaggatactaactgctcacagaaagcttagcagaatactaactactcgcagaaaacatagcagaatattatggctcgcatatgaaataacaaggtaataattgattcatgtataaacatacacttaatggagtgaacatgtaaccctaaaatatatcccaagctaaatcgagaaaagtattttgttgtgaataaaaatgcaatcgataaacattaataactcgagaaaagcctgattaaatggcataacagtaaatatatataaattaggaatgttggacttccaacaaagtaaagtttaaatagtattacttaatgccacaaggggcaaatcattgtctcggcctaaaggtcatttatgtgagttaaagcaataaaaactaaatccacatggctggagatttagtgggtacttcttcctcttctttttcaacatccttggcatcctcgacttcatcttttttagtctactcacaaaaggcaagcatctcatcggctccatcctctagaaagcttaaatccatgtttgaatttgccatccaagcttgataaatagatcatttggtgatcaagtttatcctagcattggcattagcctctacctttttaagctttttgttggcctcatcaagtgcttcctgggtcatttggttagctttgatgaaatccttggcttgtttcttggcagcctcaagctcagtcttgagagttttctcttgttcttcagcctatttttttaaccaagaaatctcaaactgggaatcattccatttcttcacaacagctttgcgctattcgtttgacctgtgaagttcggtgcttagctggttgatgctttggaggcccctttgttgagccacatgagacaaaaaagatattggtaaaagaacaaagtcagaaaaaaaatatatgaaaagagaggtataaattcaaagtaaaagaagagaaagcatactaaccgagagggtgacattagcactccttgctgatagactttaaaaatcaccattattgatcagatcccaatcatcttgttgaaaagatttgtaatgacaccagcaggtagtagcatactacgagaaaactagcaaacccttaatgcctgcaaaatttggtaggggcaagaaggctccaagaacaccatctcgggtttagatcctaagaatttaacttcatgaacagaccctaaagcatgttcatcagtgttcgcagcagcaggtgcctaagaagtcgctaggggcacctttagctcaattacaagctaggtcaaggcacattttttgtttgttgtcgacttcttcatcctcttcaacgattctgggtgtgacctagaagcagtctccaatgcagtagaccgtcttttgcctttcttattgggacctgaagggcttgataggaggtatacaaagtccagatctgcgagacaataagtgaaacataacacttatacaatataaatagaaaagatgtggtgagattatctcccacttaagagtattaccataatcatcagacaaggaagaagagctataataattactaaactccctagagccagtaatcatgaaaaggtcaaaagggttaagttgagacatgtcccaatttagatgtccaaccctatcaaaattagtgctatattgattggcaatcctaaagtaagaactattacaaattaatttgacatgatgctcggggtaccaatagtcaaacctatgggaaatgagatctacacagttccaaatataaaagttttttttttgctatctctaaatttaacaagtgatgtttgctcaaccctaagaatggttggggaccataaaaaaaaattattacctcgggaggcatcatcttcggcatccctaggggtcacatttcttagatattggctgtgagccacataatccctatcctcctcgtcagcaggaactggaacttgctgccagtctgaaaaatttgggaccttaaatcacttgtagattgttctttgccaagaagggtgcaagccttcaagtatttcttgtgcaataagaagtcagctgctcccaacccaaagggaaggccaagaagaatcttgtgccttctctcgatctcaagagttgggacgggtctcctgatgatcgttgttaacataaaaaaacaaaaattagtaaagtatggccaatatgtattgaattaaaacttaaatgtaagtttttgagaaaaactatacttatgtataatttgaaattttgttgtgttgatggggaaaagacaagtggtccaaaagaagtcatccttaaactcatttttattggaaaacctcacaataatcctgtaatcattggtgtgggtcccgagataataaaagcctcatgcaccacgcttcattgctggcaggctttacagagtagaaataaagaatctctagtgggatcggacactcccaattcagaatatggtagagagactttaaacaagccaatatcctgtatgagtttagtgctaattggaatgggggcaatgcctagataattgtagaagtctttaaggtaatctttaagagggagaattgtcccagctcttatatgttcaaggctccaagcgcctattctaaaaggctcgttggtgctacaaccctcgtcttggactagatttttagggggatagcagctgaattctccctcagcaacagacctaatgcgacatctatgttcattcttgatgccacatgaccttaaaacatccccaacatagggtctgatcgacctgactttggattctatcagctcagcttaaaaggtgactgtgggatccaaaagggtctttgatttgcgagctttctgagccattatttcaaaatttaagtcacctggtgaaaaagtaacagtgaccgaaggtaaaaatatgggccttacaagggaatatcaactcagttggaaggtttaggccaagccgcttctcacaaataatgcgtctaccctcaataacctcttgtaagaatcgcctataacgattagaggtttcttcctggccagatttaatgagataattccaaattttctcatcatttatctcaagtatggttttaggtctttgaggtttgggtttaaattctatggcataaatttgaggacaaactaattctaagggttctgggattgtgaattttgggataaattgggacatgattctaaatgattatgtcccaattcctagaaaaatagagcacaaataaaacccaaaaatctac

SEQ ID NO: 386615 - DNA, 1958 bp, Cannabis indica
tggggattagtgccatgatctcttgtgtgaataattgatcttcttgatcaccaccgccttttcgacaagttatgggaccttttcccttcgatagatcacgtcttgatggtgattaagctagtggaccctatataaaacactatataatatatcaaatttgatcctaattctaccgaattttcaacaacataatgactgtaattgaacgcccccaaaaattttaaagatgcctaataacaaacaaaacagataaaataattgagtcttcatccatccgaccgcagcacatgtattagcagaacctacttaactatggttgaatatttaagatattcaaactccactaatcattgatgattaattataacaaaccattacctcaggtgttataatgaggtagttaggccaaggaaggaacatgtttgctacttcttcaacgtatatttgcaaccttcaattgagattaagatttcagcatcctcgtgtatcatttttgaaatgagaaccggggcatgtgaatcatcgtaggacttagtgtgaattataatttcaccttcatgttcatccagataagctcgggcaaccatgttatcgatattgtttgagcagagaaatactggctgaatagctgccctctgttcagtgaaattgtacatgagaggtggctcatttagggaagcaaactcctaagcataattttatggaccctcatcctcctgagcatattgttgtggaacatacgcttgataagccacctgtccttcttcctcatcctcatcctcattctgctcttgtttcgataatatttttcttctgcttaaggaatttgatttcggcttttaatttctcaatctccttctatttctgagccacagcattagaaacttccctttttttcttaccaaatagtttacatgccttgacaaggaacctgtaaataaataaataaagttagctataatttattttgtataactaatgaaacaacattttaagtactagcataccaagtagccctaacacatccaagatgatctggtgtcccgagcgcctgcgttagaatgtcattttggccatggacctaaacttgtccctgactaacttgctcctctagttgagcctattgcacatattcatgcaattagtttatgatttatgtatatattaactcattattagtacttaatcaacgagtaatatatacttactatcgtttcaaaaatttccttgtcataatcagtgacaagtttcattctcttggtccgagatttgatccaaacacggtggcatggggaatcttgatcctcaaggtcttttttaaattattttataaaaattaaatgagttctattatattttgatgcacattgtaagaaattattaattgctcaccacatcttcccttacgttcaccattctactccaaccactttgatgtctagattggatttttgacgaacgctccctttgcaccttactcaattcctacaattccaaaaaaaaaaatactttagctaccagtacttgtatttaaaagtttatttagtacaaatataatcagtgcctgaaattcaagagctagtcgactttgaacaaatttcaaccaatttttttggtcaatctcgggatgcattttagggacgtatgccaaacgtttcaaattattttcttttaatgcggacataataaatttcttttttcattctgttattaaagtctttcattaacttcccagcaaatgatcatgcaattatgtttgaaatcatcttgaactacaaaacccgtctagttttaggaagaaaaaaacatgattaaagttaacatttgaattaatcaaacacagatcaaaattctcacaaataaccgcttacttgaatatctttccaaatcttatttttaagttgagggttgacctgtgtaaagcccgcttagttaatttggaaattagcagttgttta

SEQ ID NO: 386616 - DNA, 3125 bp, Cannabis indica
aggctgaatcttggtgctcttgcttctgctcttagtctggcttcgtctttggctcttgcttttctccatcttgtgagatttcaagagatatttcgctacatttagacacaaagtcagcaatagcttggccttttatggccatcctttgttggtatgtgatctcaaatttgccaagctcgatggcccatttgagtactcggcgagatgcataatacctatcgcaatggtttgtcattgtaaaccctttttggatgagcatggaagtatggtcttagctttctttatgctaaaagcaagcaataggtcagcttctccataagtgggtatcgactttcaacatcgataagtcttttagggatgtagcacactaggtgctggataccatcttcctctcttattaggacttcacttacaacatgttctatgacaaccatgtaaatgcctagttccttattatctagaggttttgaaaggacatgaggttgagccaattttttcttcagctcttggaatgctttttcacactcctctgtccactcaaattttttgtttactctaagtatgttgaagaaaggaacgcacttgtccgtggatttggacacaaatctgcttagtacagcaatatgtcccatcaggctttggacttctttaatctttgagggaaacatcatgtccaaaagggcttggatctttttgagttttttttctattccccttgcattgactaagaatcgaaggaatttgcccgagcctactccgaatgaacacttgagggggttgagcttcatgttatactctcagaggatcttgaagcattcatttagatcctcgacatgcccccagcctttttagacttgacaaacatgtcttccacatacacttccatgttacaaccaatgagatctttgaacattttattcataagtctctgataggtggcatgtgcatttttcaacccaaagggcatgacttcatatcagtacatgcctaggtttgtcatgaaacttgcatgttcttggtctggtgggtgcatcttgatttggttgtaacttgaataagcatccatgaaacttaggatctcatgactagctataacatccactagctggtcgaccctaggaagtgggaagtagtcctttggacatgtcctatttaggtcagtgaaatctatgcacaccctccacttattgttcaatttgggtaccgacacgaggttggataccaaagttggatagaatgattcagtatgaagtcattggcgctcagcattttgacttcatctttcaaagcttgtgcacgctctttatcaaataacctcctttctattgtacaggtcagatgtttagatctatgtttagtgaataggtcctcacagatgtgtctattccgactatgtcttcatgtgaccatgcaaagaggtctaggtttgtccttagaaattttatcaaggctaattttatttccaacgttaaacctttcccaatcatcaattttcaggttggaagagtgggatcaatctccagttcttccaagtcctccataagtctaaagctatctggaggatttccaaagcgaggatctatgtctacttccactctttgggctggacttcatttcccttttccagactcctagtcagagcccttggcgggcatcttctcttttttggctttagataaagtgaagttgtaacagtgtctggcagattgttggtctccccttaaaaatcctaccccatgccttgttgggaactttaggcataggtggtagatggatattactgcctttaggttcctatcattgcattgaaggctgatggcacgttgattactacaaatttggccatcaacattttatgggattttctctgaccttcaaaggcagtcaaatgtatcttagtggtgcaatgccttggatgaagaagttgtatattagttgagggcatggtgctaggtcttttagttagatccctatcttttcgtaagttgatttgaaaaggacgttggaggacgcttcattatccaccatgcacctagcaactgtcatgttccctatctatgtcgatatgaccaaagggtcattgtgaaggaacctgacctatgcaacatcttcctctataaaggagatggcaggatctccaagcttaagctgtgtggagtctctttcttcaacaactaggatgtcactttttggctagtgatggaaagtctaattatagctctccctagccttgtttgtctcgcctgctatgtggggtctgcctattatgacccctaaatgacctgccactcgtggtggcatagcgtctttgttttgggcagcttctaccttagcttgatcgttttgcacataacgacacaagtggtgattgtttttccttataaggaatttaatcttccttttcaattgttgacactcgttggtgtcatggccaaaatcattataaaatctgcagagcttggacatgttcgtcttactgatatccttcttaataggaggagtccttttgaatgggatagtagcctaagtggccatgtaaatggtagaagactgaagcatctgtacttctcctcctgttctttttggtttcgtggcataggagaagttttgtacttcccttttctacaactatataggccaaaactattgttgttgtacttgcctcaagtattctagctgctaggggctggctggaactacttgtactggcttgcatgtttggcaggtcttagggctgtatagcaccctgagattgcctactattgactttccctcatgtctattattttctaacaacttcctctacttttacgaacctgtgtactcgttcgaggaactcctcatattattagttgagatcctcctgatatctttctagaagtcactcaacggaaggatgccccctagtatggtcgtatatcgaccttcttcttttaggctttttaccttggtggcctcgaccataaacctttgaatgcaatccttcaaaggtttgcctaatctttactttaccgacaaggtcttccaactgtgatgatattgttagggattatttcaccaagatctagatttactaccatgtgtgttatttaacatcctaaatatgaatttctaaaacaatgcaa

SEQ ID NO: 386617 - DNA, 2671 bp, Cannabis indica
aaaaaaaaaaaacgataaaaatatcacacatagtggtgcctaattttgtatcaacttaaattaaatgattcatcaaacaaaataaacaataaactactaacttactagtttctgcccttgctcagaaaaaaagaaaaaattaaataaaaatcaatgtttcattcatattaacagagaaataatgtagatttattttttctaagaacgtatttcaaggtacgtcataatctggaccttccatatttcaataagttaaagttttaaaataacgtaattcaatgtttgtacatagtacgtgacatcaaaatttcagtaagacatcacatgtttactgcatatttggatattatgagatttgattttaaattcaaacattattttcggacatatttatcttcacagttttgtgttataatatttaaatttctactttttatgttatgaagctagatagtacatcctactgatatgaattgatggaaaaataatattccaacaaaacttaataaaatttatttatgagaagttgtactaattttttacatgtatccattcttaattgacctgatttttgtaaaaattggaattattaaataagttaatctcctcaccaacaacgaatatttattctaattttattaaattattgacttactaaataacctgatgtcttatcactgtagaatttcctttgcaccccccattgtataattactgaggtgaatggcgggaagttcctatattttcaataacgcacgtaaggatttttacagtgttatgtcaaatcaatttcactaaatgatgacctgcagatattatggattttatttttattttacatattatttaataagttgttatatgaaaacccgaaacctactggtattactttggggtttttttttgtgttataataattaaaataatattttttaagttatgatgtactgatatgacccgattcttataaaatttgaaattataaaataggttagaattaaaatgattcgattatatgaaaaaagattaaccaaattacgtggaaacatttatttaacaacctatgtgaaagtttttttaagaggttataaatgccaaaaaaataaattttttatgtaccacaaaaaggttcatcttctcaccacaacgaatattttgtcaatttttattaaatagttgacttattaaataagccaatatcctataataatttctaattttcccattttacccctgtacttgtcattgtaattactagatgggttgaattgacattaagtttaacaattttgaattggcattaagtttatcaaagaagctgatatcctatcataatttttacttttctaaatttacccctgtacttatttcaataaggtactcaaagatttttgcatggttatgacttatcaattgattttcttcatgatctcctccttctttatttctaatttaaatgcttttatttttattttaactatacaaatcattattttattataataacgtacttcgagttttttttttaaaatatatatgtcacatcatatttattttactaataggatattatcagatattactaatgagatttatttatattgtacacattgtttaactattaaatggttataattcagaaaaacgaatcattacttgtacatgaacatcaatacgtgtacatcaaccaactaacactatataagtaaaggtttggattatgaaactaggcatttattgaaaccctgtattagctattaccatctactaaaaatggacccttactcaaaattcaaccctttcgaagcaagtcctgaaaagtcccctcctcatccccattctccaacaagagccttaggtacaccttcacggagtcctagactccgttcaacatcaatttctggatgtgtaaactatgctaggctggagggtgttctacatgaacatgcaaaacttatcagggaagcacatgtaaaagcaaccgaggcaagacaggaatcattgcgacttgcggagcacctgtaccattgtgcccatgccatgcaagatgcaaacacttctagagaaaaattcgagaatatcgttgatgaaattctcgactacactgaggtcgccatacctcattacccaatccatccaaaagaagaaccaagaaaccctactccaaaaggatgtccttcgcgacataaatccccgtttagagacagtagccctctatcttaacagaagttcccttatgttatacaacttgattgaacatccgttaagtttcatttagtgatattttatatataatactaattttaaaactcatctcatatggtcgttgaacaactttttgttatgccatttaatgagattccctataagaagtttgctctatcgttttactattatatcaatgtaaaagtgtctattatctaaagtctatttttattttgaacttatttgtgatataaaaattgtttactttaattttatttccacaattaattaaggaggaaagtcacattactacttcaaaataaaccaaatttcagattttaccacaaatactgctaatacataaaagcttaaagaaagatataacatggaaactaacacggtatatcatttactgtttttgggagaaggatccattcctcctttgtctcccccttctatatcatct

SEQ ID NO: 386618 - DNA, 992 bp, Cannabis indica
gaaaaaagtttggcatttttttcacatgctaccaaaaaccataatgtttttgacaagtataaaagatatctaaattctaatttttctggtagttgggcttcgaaaaagagagttagagggtatcaaaattaagaaatttgaaatttaagtgttatcgatgttttttccattttcctttttttggtatgtaagatgagatttattgcacaacaaaacagagcctacaaagaggcaaattacaaaactcttatctgccaagacttggcaaatcaaactctatcaacaacacaaatttttttttttttttaattttgagaaattctatcaataagaatcattttaaatttaatgctatttataactgtaaaaatcatatgtacattgtgattccataaaacttcatttatggcagcccaaatatggtacatagtagcatttatcactgttacatacacctgtcttctaaatctgttgtacttgcttctcttatccatttaagtattccatcaagtcttagttgatgagaacgaagactagtccaatgaagaatctctgttaaaatgcttttactgtagtggcagttaaggaagaggtgagaatgggattctattcttgcattacaaatcaaataggagtcatccaatgtgactcctaacctgaacaacttctccttcatttgaagtcgacctgcagaagctatccaacaaataaactgatgttttggtatgctaagtctagactagactgtagaattttagacttttattttggcttacattaattattattggttttattaaaactttggttgattgaatagttgttagtctatatcgttggtgatcaatagttaatgggcttagtatccgtatgtgtaaagtctaggtgaagcagatgtatgagcttttttagttaactgaagcctttgatgagcaagtccagtccaactagggttatgtgttaggttttgtgccctaaataaaacccattac

SEQ ID NO: 386619 - DNA, 1213 bp, Cannabis indica
ttaattgtttattaatttattttaagtttaaattaattctacatattaattgtaatttatttatggtgtccatcaccattttataatataatgtaatctaattttgcaacttaataatttcaatattattttggcagggaaatactttatttcataaagcaaaacgatagtctaataaaatagataaaatctcaataggaacatcactctttttcaacataatttagaaaagaacaaaaaaattgagcaaaactataagtcacattgttatatcatctagaagcaatcttttacaatcattaactaccaaacaaaaaacataagttaaagaagatgattgcaatttgcgaatgccaaatagcttgaaatgctactaaacaatctggctcaaaaaccacattcaaccagttcaaaacctccatgatgtcgatcacgtctataagatcaggatccaacatcccatcctgacagcaaaacgagccacaagtacatggccatgatgatctcttgttgaaactttagtgaaattttacaaaatttttgtaagtgaagtgtgtgaatatattgagtctcgcatgtaatagaaatactttattagaagtgtatataatgtacaaatttagcacatagattggagccctgaggggtacctagttttatgtgtgtgggacgtgaggactcacactgaaccaccatacatgtgtgcgctgtcgtcgctcgtccatgccgagttgagttagtgggtgtggtgtcactttatttttttttaaaataatatttattaaattattattttttatttgattaattaaaaacaatttttaaacgtgtttaattaattagtaaacggaaacgtttactcgtcttgatttttagcattgttttcacgatctcatgttctaacgtttttatgatcggaaacgtcttttttttcgttactaccttctgtgcattccttatataatgcatcagaaccaacgggaaaaatatatttttttctcactgaaaaaataatatacaattatattacaaatgtattccgaatagtagtacgattatattgggtgtggtattttagcggttctctatcgtacaataaagctctgatactgtgtttcgattgggatattttatcctgggactgacgagtctgatagtctacttgcaagggcggctaatagcctgtgcaacctgggcagttgcacagggcccc

SEQ ID NO: 386620 - DNA, 1328 bp, Cannabis indica
gggttgtgttggttcttttggtttgtggccactaatcctaatatagagaccaaaattatcaatgaaatgaaagaaaagttgggaactaactataataatttagattatgattattataaaagtgaagaggtgatgagtaagttggtgtatttacaagcaacaatatatgaaacctttagactttatccatcggtgcctttcaaccatagaacttcaactaaagaagatgtttttccgagtggtcaacgagtgaaggcgaatcaaatggtgttgacttgtgcttacgcaacggggagaatggaagaggtttggggaaaagattgtttagagtttaagccagagagatggatttcggagaaaggtgagtttgtgtttgtgccatctcataagtttccagcctttcatgttggaccaaggacttgtttaggtaaagacatggctttggttcagatgaaagtcatggccctaactcttcttaaaaattatcgttttcatgttgtggaaggacatcatgtgtgccctaggatttcagccaccattagcatgaaatatggactcaaaattagggtttccaaaagatcttgatatatcttaaacaaatcaatcaattaaagagaatttattttattgttgtgtgtaattttggcttttgataagaatataatgttatgtttagcttagcttaggtggtcactcatttatttttattcacaacaacaagtattaactaatcatatatttagtcacaaaaaaattataatttttataattagtacttaaagttatacgaattttttagtcatcacataataatgaatatttaaaattaatcacaacgtttttattttttgttacaaattttattatgactaaaactaaaattttttatagtaacattatgattttctgaattcatttaccatataattaaaagaatttattcatttgttttttttagcagaaaagaatttattcatgtaggattttaccaatttgccctacaccaacaagaatattaatatcagtatcaaaggtcaaagttgacctttcctagtctaatttaaccttagactaatacggcaccgtttaaatccccacgacaccaatcttgatgtcgtattgaactttaggtttaaagactctgatcgaagagtctagaaaccctagacacacaaacacaacactcagcctcccaaactcgaaaccctagcagagcaagttctgctcaagaacttgctcgaatccaagctagaaaacccagattcacatccacacacaagcatagattagtttaaaagagtgaaaatgaaaaataaggagagaaaaca

SEQ ID NO: 386621 - DNA, 3105 bp, Cannabis indica
attaactattattttaggagtgtgtgtatttaaaaacttaacaccgaaatcatgcttattaacaaatatactattatatttagtagtatcttattgttaattattattacttggatttacacctatcttggaaaaaagttatcaaatcaaatctatgtcaacctttttctttctttctttttggagtaatccttttgatgactataattaattaatttaagaaattaggatatcatatataatatttaaaagtgggatacggtatcttatatatttatattattattaagttgagctgaatgaaattattagtagaaacaaagcaagtaataggattctcatattatacattaatctctcacttttagagccactaaatatcttttgtcacattaattgattgaacatttataaagttttagtttcgaaagtggtgttttccttttcttatatatctctttttatgatgtaagagatgaatgaaataaacaataattagatggaatcggctacactatatgtagtgtagtcagtgttaataaattaataatgtactaaaaaagtgtcaaatgcattaaaaaatatgttaaattaacaaagttatagctaaagatatgtattttgtgaaaaaattataactaatatggagaatcaaatcaacttaaaacatattaacaaataattagttatgacaagactaataaaatcacgaactgagaattagagataaaagaggatagaatagagtaattagaataaaaaacaagtaaagcacagaaataataaaacaagattaataattataccggttcaagtcctatagatcgatgggatctatgactttactttagttatagaatatcgccgaatagtctttattgattgagtaagaacaagagtacaatacagtcaagaggattctctgtttggcttttctcaaagtgtttatctctctaacattcttacctaataaaattcttcatctacagaaacttcttcatacaaatctcgaaacccaatctctctcttttctctatacatctctctctaccactcaatctcactctcgaaattatctcctgtattctatatcttctaaaaataaggatggtggtatttataaatctgggataagaatcccaaagtcggtggctgcaaaaactaagttgttaagtcagttataacttaacagaattaacaaactccttgtaacaagatctcctcatcaactctaaagagagctctccgaacacttcttgaacggaagtcccagaaagatgaagtgtgttcttggaaggatgttccagatagatataaagtcacctggagaagattatccggaaccccttttaagaggaaacatctagccttccagaggatgacaagcttccctgaagactactttcgaagtggccaagctacacttctgaaactcctttccgaatgacttcccacaaggccttttcatttggaggaactataccacgaatttcacctagttccattaaattaaaagtgatggtgatgaagaaaatatgcaaccatcatggttggtattctaggtatctcagtatgctaatttttgagattgatcaagtccaagcaatgcttgaacttattgactgttaagatcttagtcttaacatcagcatgattatcttctgatctaaccttctctaattcaaccagtccttctctgttcttctctctaatctggtagaaatatcttatatctctatgtttgctcttttcatgatacactaggttcttgcagagatgaatggatgattggctatctcagtacacaatcactcatccttttagttgtttcaatttgtacaaaatccctgaatccataaagcttccttgaacgcttttgtgtagccataaattatgcttccgtggtggaaaaagcaaccacggactgtaattggaccttccaacaaatgcagtttcggtttgtcatgaacatatatgttgtggttaatcttctagtatctctattcgaggcatatccgcatccacaaatcctttaagttttagttctcctttagctttctcgtagatcaaatcataatcccatgtgcccttcaagtatcttaataaccatttaaggaccttctaatttttaatgtctgaattggacatgaactggcttaggatgcttagagcatgaactatgttcggtctgatgctctccattacatacattaggcatcctggaaccactgcatagggtacatccttcattttttccaactcttcagcactggtcggacactgtttctttgacaggatgaactgtcttcctaacagtacagatgtactctttgcatcttccctgttgaacttctgaataactttcttgatgtaactagactacttcaagctcatcgtccctttcttcttgttccttgaaacttcagtaccaaggatcatttgaactggtttaagctccttcatctcaaattctcgcttgagcttggctttgatactttttatcattgattggtctttgctcatgatgagcatgttgtccacatagagtaataagaccatgactgtagattgctccagattcttctagtataaacagtgatcataggcagatcgtttgaacctgatttgttgtatataagtatcaaatcttttattccattatcttggagactatttcaaatcatataagaacctattgagcttgcacactgattcaactgctttcccttcaccttgaaacccaggtggttgctttatgtagattttttcatccaagaatccgtttagaaaagtagttttgacatcaagttgttcaacttcaaattccatttgagctgccaaatgtaacatcaaccttatcatcttgtactttaccacaagtgagaagatttcattgtagtcaactccttccacctgagtaaatcccttagccactaacttggctttgaaccatactagttcattcccattgattccctctttcaccttgagaatttcactctacaatctttttgttctccagtttcagtacaaccatccaagtcttgttcttccggagtaaattcatctcctcatctgtaacgccctaatgctaaggcacgctac

SEQ ID NO: 386622 - DNA, 1823 bp, Cannabis indica
ttgatgcatccctatctgttttaacatctgaaataagtttttaatcgaattttttgtcttggtcatgtacgttatagttatttaagacattctgtaaaatttaagaaatttggaaaagtataacatactaaaaattatgttcaagcagtgtgttgcacgcgtgattattttattgtaaaatagactgtttgaacattgttttctatattgtaaattattctgaatttttcaaaaatttatatgatatcttaaatagctataacgtaaaaaaagtagaaaaaaaaattagtcaaattttttttctaaatgccgaaacaagttaagagtgtatcagatcaatgcatcatttttaagagatccattgtagaatcacccacaaatatatatatatccatatatatatatatatatataaaatacattacacactactgctcccaaaagattgatcagcttttaggttacggtggatcgtgcggttagtactaaagacgtaaagatcttgcaattctaaatgggtccacaacgccgtatttggtctccctccgtactcatctactcataaaatatcttttaattttattcatccatgttataaacctaatctggttcttgggactataaattttataaaatatttttatccttcattataacaaacaagacactgtataagcatataataaagtaggttaattctaaaagtacaatgttcggtaatcctacttatttatttattttacaaaaattaaaatttaggaatactttcataaataccaaaaactgtttttaaaaattttgttgtacacttatacaccaacaagaatgcaaaaacaagatagaattaaggttggaaacataaaccagtaaaccagaaatgaaaaatgaacaattagtgaggttcaatcacaagttttgaataaaacttggatctgatccccaaatagaaaatagctctgttagttgtgatcattttgatattaaatggcaagaatcaatgttacaaacacttggaccaaacaattacaatcataatctcacttaagataatccaatcaaacacatagaaatgtcttttacaatcctcattctcaactcattactaagagaattcatctcgattacaagctggtttttctttgtgtttttctttactaacttgatccccttctcaagtgaatcataaaccttctatttatagagctcagtgagttaggacaagactaattcacttaactaccaactatcaaggtagttagaagtattgtctaagagttttaaacgtcacaatttctacctggtttagtacactttaaatccaatgaaagtgtgtcatagatgagactttagttagagttgatgttgagtaagtctagacaaagtctaaacttgtctcttgtcaaactctttgttaaagctcagcagggttctcttgagtgttaatcttcctcaaagagacttgtttggattgaatcacatctctaataaagtgtattttgatttcaatatatttagtcctctcatgaaacatgagatttcaagagatgaagaacactttggttatcacaatgaattgtgatatcttctgagttgatgttgaattcacttgttaatcatttaagccatattgcttctttaatggcctctgaagcagccatgtattcagtatctgtagaagacaatgctactactgtaacgccctaaataattaggcacgctacccaaaatatttatgaaaccctaattccctaatcgggattactaatcaaaatagcgcagaatttaaacttttatattaagcaaaataaaaataaaacttgtaa

SEQ ID NO: 386623 - DNA, 1137 bp, Cannabis indica
atagatgataacgaatttattttttagctcaaagtatgtgtaaaaacaaaaaataacaagtcgatgctcaaaaagggtaaattagaattaagactacaaggttggcttgaaatacacaaacattccaaaaaagttacttaaattatttttcaaagcacacatcaccaagaattttgcgtcaaaggtaattaatgaaagttctatccaattagacttatcaatcctttaaccctagtcaatcatgtataacaaagtccaattatttacatttaccagtcatattcaactttccaacaagcaccaatgttaagcacaaaaataatcaaatcaagtacacagtattaacaagtttaatcaattaagtaatatcgaattgtatttcttcaatcactaaggcttaccatgacactaaaataaacttaaaaagacacacaattaagacaaaaactaaaaaaaaataagttcacccccaaacttgattgtcgcattgttcctaatgtgacaccaaaggctagagaagagaaattcaattacctaaaaactatgccacatcaacaagcggttgacgcccataataaacataatgcaagacaacttgaaagtttttattgtaaatgtcctcaagcttggcatgatatgaatttgatccaaaagcagcaccaacaacacaagactttaaatgatgagcttggagacaaactgttggtagcttgtagaggatgtaatatggtccaggtggcattaatgaaaataaggatccattgacatttcataatatgatagcgttgacgaactcaaatcaacatgctataagtgattcaccctccaatgacacatctttcccgctttgctcatgactatatatccacaacattaactgaaattggtgttcaataacttcttcactgagaatgggtgttgcttcagtcaccaaatcaaaatcatcacttgtcgagcaagcatcaaatgtacccaaattttcagttaaaaccacttcaaaggggtcttgatcttcaattacaggttcaatatcttttatgtattcctctaatggtgcttttacataattcaaaccactacaagaaatgtcatttttgccaacacatttttgtgctagcaaaagtttggtattgcgct

SEQ ID NO: 386624 - DNA, 1242 bp, Cannabis indica
agtggaatttcctagaagctatgatgatgtctttgggtttcgacacaagtggatttttaaagatttatgaactgtgttcgatcggtgtccttctccatcctcatcaacggttcaatcaaaggcttcttattccggagcgaggtcttcgccaaggtgaccctctatcccctttttctttttctattatgctctgaaggcctatcttgtatgatttttgaagctgaaagagctggaaaaattcatgggttgcggtttggtagcttggatcaaaggttgtcacatctcctttttgccgacgatagccttatattccttgatgcaaccatggaagaaggaactagcttaaaagaagtcttgacatcttatgagaagctctcgggccaatgtatcaatttggacaaaaccgaaatgtgtgtgggaggaaaggttaatgattcaatggccattgctttagcatcaaatatgggagtctccttagtaaaaaatcataccaagtacttaggtatgcctacatttgtaggaagaaacaagaaacaagtttttggcaaaataagggataaagttgaagctaagctccaacgggtggaagatgggtctattttctcaagccggaaaagaaattctcattaaaggcggttattcaagcgctacccttgctatgtaatgagttgctttagaatcactaaaggcatcctccacgaaatagaaagtttgatagcacggttttggtggggatcaaccaaaaataaacacaagcttcattggggtaattggagaaagctttgccggttgaaagagcaaggaggaatgggttttcgtgaccttgaagacttcaatcaagcccttttggccaaacaaggatggaaaattttaaccaattcagaatgcttgctgtccaaaattttaaaagctctttactttccttcggtgagtttccttgaagccaagttgggtcattatgggtcctcaatttggagtggtattctttggggaagagatctcctccttaaaggtgtaagatggtgtattggagatggttgcactataagaatcaatgaagacatgtggatcccaagaagcccgcctttcaaactccgcaccaaaattcaaattcctaaagatgtcactattagttctttgctcgaaccaaatggagaatggaaaattaatgaagtgtttagttggttccaccaagacgacatcccttgggtcataggaatcaaaccaacaatacatcaaccg

SEQ ID NO: 386625 - DNA, 1947 bp, Cannabis indica
cctcttcctctgcctcggaagggctacccggacgaacatcgccctgttcctcaatctcttggacttcgacgtcccccacatgctctccctcctcttggacgggcggatcttgttggagctaggaaaggtggcgagctgggccacgtggagatcagatgcgctaaccttacacattttctgctttgttcgatccatcatcctgtggctggacggaaggattgagttggaaagtccgtcacttgaagaggacagactaaaacaaagacgagagtgatcctcgtatagaagttgaagcaagtcctggtcaattcggtgtttgcttccccaaaactcaccagggttcatctacaaaagacaacacacgagatgagtgtttggtcgagatatcgaacaataaacaggcaaatataccgaccaagagtactcaacaaattatagaatagaaatattcaacaataagtcaaaacccagaagtttgaaatttttgaggtttagggcaaaatttcacgaagctttgaataagcaaggtgaaagacagagaatgtacgaccaaagaccagcatcgtgaattgtgaagtctcacagattattgcaaaggaaaatcacaaagtttctaaacctaggttttccacctatcttctaccgcgaagtcgagaacgtattcagaaactaaatgtgcaaagtaaaagaagaaggaatcgaaaaattactcactgatcgacgtttgagttcaatccaaacaaagctgctcggattgttcttgtgaaaatctcacggcaaacttgaagccagaaacttctttttgctctgagtttgttcaatggagaagttggtaaaaatggatttgtgaataatgcttagtcctattaataggcactagaatgaaaaagggtaatcgtttcaaatgccttagacgcctcggttccacccaaaagaaaatattgggaatcaaatgtaatcaagtttaatcgtcaaactttgtgagagaaaactgggtttcgaagcattaattgcgttagaacatttattagccaaaaattgaagagacgcctggttagcctcataccgaatcccgaacagacgcacctgaaaggtgtcacccatccaaacacaaggacagtgtggatgaagtctacacgcaactttagaagtcccgtacagacttagggggcaaatgttatcccaatttttgtactctaacgtggcatcacacaatggtgacacttggaatcaactccatgtatctactcgcaagaaatatgctgaacagggcacaacatatattcgctcggacaaagccttcctaactgggcagtgagcaatctgcgcagcatgccaccacttagcaaattcagctttcgcatcgtgagtcatcgaagaaatccctataactttgggatcagatcacaaagatatggcaagctgtctgcatcccttaatcagggtattttgtattaaatacgcaatctttccgcttatatcaattgtaattagaaggaaaattcttccctcccaagcttaaagccccataaatagtgattcatactcactgggcaaagggtagaaaaatctatctaagaattcatattcagagatactattgtaagagctctaagaaaaggaactattctccttattcttaagtcaatacaagctaagaggattagactattaccgaactgctcggggctgaacctctataaaattctcgtgtctttatttgatttattatattatatattcgttatactacttatcacttacaaattaaactcactgtcgttggctaaaaccaaggcaaaaaaaaaaattaattaaaattataaaaagttatgaggtaaataaataagaaaaattataggtttggagtattgttagttggatctaattattaatatttataattaattataaagtcaaaattattaattatggtgtagtttttaa

SEQ ID NO: 386626 - DNA, 1245 bp, Cannabis indica
cacacctccaattatccaatatagtcactggctaccatttatctcctcacccacatttcaggacaatgatgctgatgttgctgctgatttttcaactgatatatctccctgtgatgcaggtcccgtggcttctcctccttctccaatatcggcctgtgattcaacaaaatctcagcatagacactccactacatccaactcatacaccaccatccctcttgctgtccatatccccacccagccgttatcaccagcatcctcctcaagtcactctcaaccgtcccttataccagccaacactcctcatgacacaccagaaataatacatctgccatgtcccaatactgcaccacccgtaccctctcatcctatggtcactcgatcaaaagccggcatttttaaacctcgcacttttcttacatcacttctcgaaaatcctcatctcccagccctttccctatccactccagccacacctgaactcgccttaacaattccggtctggaaaaatgccatggatgatgagtattttgcactcaaaaagaacaaaacatggtacctcgttccccgcttacctcacatgcatgttgtttataataaatggatttttcgccacaaattcaactctgatggtacgcatcaaagatgtaaagcacgccttgtggccaaaggcttccaacaacaacccggagtggacttctttgatacttttagtcccgttgtcaagccatcaacaattcgtgtcattctatcgttggctgtcactcatgaatgggatgtccaacaaatcgacatcaacaatgcttttctcaatggcactttggaagaggaggtatacatgtctcaaccgattggctatgttgatcctgagtttcctacagcagtatgcaaactcaatcgagctatttacggactcaaacaagctccgagggcctggtttgacactcttcgtatggctctcctacggcttggattacaaaattcagtttcggacacatcactgttctttctatcagaaggagatgcacgcctctacgtgcttgtttacgttgatgatattctactcacaggcaacaattccaaccgagtacttcagatcatctcccaactgaaccagcaattttcactcaaaaaacttggctccgtgacttactttcttggttttgaaacaagtagggggcaagatggacttcacttgtctcaaaccaagtactctttggatcttctcaaaagaacacacatgtt

SEQ ID NO: 386627 - DNA, 1092 bp, Cannabis indica
atgttctctactttctgtctctatagattttaatgcgaataacagagcttgtgtctcccaaatccttcatttgaaattgtttggataaccacttctttacatctgataacctttctaatttgtttcccataagtagaatggcatcaacataaagaactaggaataccactacagtaccattaatgtattcgtatacacaggctttgtcttagttctattcaaagtcatactctttaatagttttattcaatgtgatatttcatgatgtagaggcttgcttcaattcataaatagatttaaaaaaatttcatgccttttgacattcccctggtttcacatacccttctaatttcctcgataattacttgactgtatagtttgtgacttttcatagagtcatgttttagaaatgtagcattaatttattttctatttgactatagaaatatgcaccttgagtttccttttaataacccacaaacatacacttttgttctaggagcaagtttcccaatcctgggattaagaatatgacctgcacaaccccgaatacaaaaatctttcaaactgggttttctcccatttcataattccattggattatttctaaatctctctgagggtactacattaaaaatgtaggtatccgcttgaattgtgtatccctggaagcttagttgcagtgttgagtaacacatcattgatttgtaaaccattctactgagttgttccaagttctgtaagttaggataagagccttcttccaacaagtagcctttgaattcaaaattcaaatacactctacaactatctgatcgaagtgtctttgatgatttacctgattgattttcatttaaggctttgaagtccttgaattttccaaaagtttagaaacctcgactatgaggtaatatagcaataccttgaaaaaattttcttaatatatttttttctaaaaaatatctcattgatcgaatcctacccataaaaaatttaaaaaaaaattcttctaaacacaaagaaaaacttctaagttacactgaagatgtaaacgcaacataaaataatgtaaaaactaacaatgaaacatat

SEQ ID NO: 386628 - DNA, 694 bp, Cannabis indica
attattaattggtatacatttatgaaagacaatataatatatagattatagtaacgtcaaaatcaaacttgattggatccaatgaaatcgtagcaattcattttggcctttcaaaaaaggtagggatcgatatatataaagatagaacaaattaaagtcgtcttcttctcttcttcttcttcttcttcttcttcgtaataattagaatttttatccttgaagaacctaaagaagtcaatgcattgatatgccattaattaatattcttgatcatggctgcatgcacaaaatgggtcaaataaataaagtgaatcaggtggaatacacacaacatttactgtggccacttataccctaataactaaccaattaagtgccaaacaagaagtagtggttaaacctaattttggccaacacacatctacatatttgctaatatgtgactcagtggtataccttaatattacagagagaacaatatgaaaaattctattattgatatgttatgataagagaacaggtatttatacatctaactcacacaaagttagttacaaccaagaatagaaaataacagacctaacaaccaagactaacgacctaataactaacataaccgactgtgtaacaaacaactaataccctctaatactccccctcaagatgaggtgtagagattgacaacactcatctt

SEQ ID NO: 386629 - DNA, 1918 bp, Cannabis indica
gtaaagaacaagttgagctggcggatacagttactttcaccagcccagactgttaaacctagtgttgccatctcgaagacctttaaaagagtacaaaaccctgtttcctagctgagttgcgaagctagagatccagacctggaagtgtagagagagatagaatgttcctcggcaacaaaaagagaagagaaaagttaaaagagaaaaagtaaaaataataatacatctgtaagaaagaagaagagtttaaagggaataccagtcgagttatgacttggattctattgttgtacctggatcgatctttgatagtgcagagagcttccttatcttcctgggagagctcacggatatgtaaccctaatatttatggtgaacctcaagaaaatccagagtcgttctttcctttgctttctatttgtgattattgtgtgaatcttcaagatcgatctagatcttgaagatcagtgctttgtgtgtgaatatctaagttatgtttctcttagaactctagaatgtttatgtgctaggatttttcgaattgtgaagattgatttgttgaatattctagagtgattcatttagggttaactttttgagtaaaatcaaaactgtatcgttttgggtgaggataaaagtgtttattcaataaacataaggaaaggtcagttttgaccatggagactcactttagtgattgtttattagtgtaggtgcttaaaggtaaaggtatcagagcttggtttagctacaaaatacaacagacacagaagttacagtgaggaagtaaaatacaaagtatcatgaacaagaaatcaacaagaaagattaaccaagaaacctagcaggacaagaggaagttgatcctcaagtgacagtatttgatactaggaaatttatggatgttattttgaatgatcctattgaaactactaaaactcaatctctgttaatttttcttttaatcatgagtaatgttcaaattgacattgataaatttgatggaataggagactacaagacctatatagaagaaagattagatccatacttgctcaacagaacttgtgaagggtactcgaagaccccattcagtggtctggtgatactaacaagctccaacgggaagagatcctcgagacagagacagccattgggattataatttttaagctattagactccataatctgattggttgataaagaaaaaactccaactaaaatatgaaagaaattagaggaagaaatttaacagaaatcctttacaaataagatattcttgaaagaaagaatattcagattcaagatgagtccatcctaatgtcttgactagaacttcgataaatttctgagaattcatattgaattaaccaattcaggggaaaatgaggccttaagtgatgagaaccaaaccatcatgatactgaatgctttagtagacttctatacagaggtaaagacatccatcaagtatggaagaacatcaatcactctggatgaagtgatttttgccttaatgtcaaaagatatggaaatgagaaatgaaaaacctggaagttcaggggctgaattgcactttggtcaaggcaagtacaaaggcaaaaatcctaaccctaattgaggaaatagccaaagcagggggcctacaaaaggatacaacaaaaagagtagaggcagattataagaacctaaagaccctgattgtaacaccctaactagcataggcgtgttagtgtgattttaaacgtagtatgcagctcgttgctaataaatgaggttattgaaaatcgtgaataattaaaattagcttatttagttaaaaacttaaaatattacatatataaaattctgggatcccgtttacaaaatactttttaaaagtttgctatacacataacaaaagtttgtcgcccagc

SEQ ID NO: 386630 - DNA, 774 bp, Cannabis indica
aaaataaaaaaaaaaaaagttgtattattttgtgatcatatcatattatggtacctactcataatatgagtggtgtccatcattttttataattttttataaatagttttatgattagttagttatatttttttaaaaattatataaaattgaatacttaattatatcaataacagtacaacattaaaaaaaaaaagtactagacactaatgatatttttttaacattttttatatatataataagtctttgtatagttgtttaataaaatcaaccttgcctgcccaatacatatttattatttatttttgacaaactataattattatcatctaaagaaaaactataataatggttatatgttcgtccaaatcaaaaactaacgacgtgaatttcaaaaagataaattgatcgagtatcatgcactcaataaattttgcccaacatatctaaaaaattatgggaccaccaaatttaattttctagcaagttgaaaataataaattcaatattgtacaatcgagaaaggccggctcctcctattctagcattgagctctttcaataaaatattactaactattttaacttttattaatgtataatgtcaaaaaattggatcaagtttatttgggatctcaacaatagaggagttcgtgttgatgatattttcttatatgcctcgattgttgtggatactatttggagagtgcgcaatgagaagatccataataactgttctcctgatctaaaaaaatgtattgataatatttgt

SEQ ID NO: 386631 - DNA, 1337 bp, Cannabis indica
aataattaataaagactttttcctagaattactacaagcacttgtacagaaaggtgggttaactaaagaaagatggaagcagaggcattcttaagagaaagtgctttgccttacctatgatgcaaagtaagattgtatgggctggcttttgaaagatgggtttcaaagaatggaacggagattatgggaataagtggagttgggcgggctactctccagggcctcatcgatagatagaagagagtaaggaaagaaaaccattttcaagagacaaactccagtgaaccactttccccctctcttatgttcttcattccccttgaaagaagtaaaaaaaagaatagaacgcaaacacgttttcagagttgtacaaaagtattcctaaagaatccctaatttgtaacgacaagattggaatctgtagtgacagatttaggtcgaattaggaaactttccaagtaggtgaaagatcacaatttggaatttattttcttgcataaaaagattatttgatctgctacaaacatggcaaaattgaatcaaacaaatagataaaggaaaagtcaagttttccaaaattggcaactttccataaagagatttccttctcttgtaagacaagtttcctaaacaaaaaagaccagctataaataaaactttcttttaaggaaaagagaaatcaaagccaaaaaattaacataataaaatacatataattacacaacaaaaattaaataatattttgacaactaaattactaaaaaaggacctaacaaatatatttcatttgttgagagcatgatcaacgacttgacaccattggcacatacccaaaaaaagacattgtggcttgaccgaagaaggcaatcgaggagtggaaagaaaagatggtgtagtatagttatatttgtgacccatagagtgatgttttttgaattgtatagcatgtatagtggctggcaattgagcaggaggggatgtggtagtagcaacaacttctttggtgatcaatttttcgagaagttccttaaaggaaataggggtgtcttgagcatccatgacatcaatgacaaatttgtgcacctcatattgagaccttggagcatcttgtctattgtgtcatcatggtccgtaggttttcccattgtagcgagacgatctgtgcattttttttatgtcttgcatatactcatgaatagattaaatagtagaagtaattttagagagttgggtttttatatgtataaagtgaccacgagatgtactagaatatgcggaggaaagaattgttggattttatgccctaaataaaactctttacaatctgattagttatc

SEQ ID NO: 386632 - DNA, 382 bp, Cannabis indica
accattattttattattgtttttaataacttgaactattaccttacattattatgtccttatgtaagcttttataattatatgtttactaggttattattacgtgctatgcacgtaaaatttataaattaaaggaaattacttattagttttttattttttttaaaaaataatatttaaaattttaatagtttgagaaaaaaaatataaaatttaagaatattaaaattaaacatacttccaatattaaaaatatcaataaaaaaaataatagtgttacaaaaacatattaatatttatatatacttaaattaatctaaagttagtataagttcaattaacttaaaaacaaataatattaatatttatatatttaaattttt

SEQ ID NO: 386633 - DNA, 594 bp, Cannabis indica
ccaagctctccaatgaattttatatttgtagaaaataataaaaactggaggtcttattgaagacattcttatgattgaataaataccatgttgttatgagaggggaagaccaataggcggaaagatgaaaagaaaaataaatgttaggagtttcatttttaaataataaattagcaattatttaaaaaaaataataataaattaacaataaatgatgataaatataacacataaaaaaataatattttttaattaaaaaaggagagaaattaaaatgcttagaaatagtgaaaatgttcatagagactcccacgtcaccgtgtttgtgctttcctttatttagatatatagatagatatatagatacattgcttaattaactttattataataaatttcggcgaccatgactgctcggggatgggttcatgggtctccgccacgatcattagaatcttcttaatgtaaatttagttggttgctggaatccagtctccatcgccatccaaacctttccgcagtagccagcacaaagaagacgaaccagcagagacgaacactaaggtacgatctgctgtctttgttatattattt

SEQ ID NO: 386634 - DNA, 696 bp, Cannabis indica
aaaaaatcaaatttcccttacatgatggatgtcttaaataattatgttacatgctattatataaaaaaaattacaaataaaactatctagatgtagaaaaatcacgaatggcgtataataatttatccttatttagagtgagaagaaaaacgtaaatcgtttagtaaaataccaaaggctgcccgcttgtggaaaagagttttggaaaatgaaaagggactttgtttgtaaactttgttatagaaaatagtactgcactttgcacggtgttgtaatataataaatttatatatttagttttatatatatttaattatttatatttctatacatatacatatatgtgtgcacttttaatgggtattacctatgaatgggtaaaattagaacattttgagtttttatacttaatttttctatctaattagaaaaatttctcatttttatatcatatgggctaagattgttccatcggtaaaaaaaatattaagaaaaagtgttttagcaagaaaaataagaaaagaaaaagttgagtttgagttaaatatttttgtatgaacatatttttactatagtgtaaaaagagatattttttgatatttttttttttaattaagtatagaaattaaaatttgtgatttaattattcgttattagatcaaaattcgatggtttgatattttttaaaattaatat

SEQ ID NO: 386635 - DNA, 930 bp, Cannabis indica
aaagatcccggccttgattattcaaacagagagaagaaaaagactgacattgtgaaaccagagaaaatggcctacactgttccgaattcattgggatttccaaacaagataagagaggttttggtgatgaaattcagaggttctgagatgaggttgatatgttgtgttagattagagattatttgttcatatataaaaaattgttaagtttttgctgaaaaaaaataacattgatcgcgattgaaagtgatgtttagaagactataaaatataaagatttggctaataaatttggtttaaaagtgttccaatgatgatttttttttttaactagattgttgatattagtttaaagttgttaaaatagtttgaatttttaagtgcttaattttgtaaaatatttagttaccatggcacaaccaaccaccatacaaaagatctcctaattttaaaactaattatcttaaaagtataaaattaatattataattaagtaaaaacagagtaaacaatcaatatatattatttatttgatattttaaaaaaataattaatcaagcattttctaaaaatatgaattaaaactcaaataattaatttaatttaacatcaggatagaacaaaatacggagagaaaaataatggaaatatattttttcaatgtggtaggctgctgtttgtagacgttatagttttattttttaaatttcttagggtaattttatttcatatggttcgcgataagaatactgcaatttatggttttggcaaaacatgtcatttggttagatgatgaactatcctaattcgagaagtattcacagccaattgtaatttacggttaattatgtgtaactctatttaccgcgtcaaaaaaatacggaaagaaaaatacacttatatagcaaaaatattatttaaaaactaaaa

SEQ ID NO: 386636 - DNA, 1011 bp, Cannabis indica
ttagaaataagctatttacacttgggcatattgttgtgagatgtatggagaaaagttgaccgattccacttaaactacatgtaagtttatatatggttattgtgtgcttggctgaagctttggaagtggtcttcacatgtggcaagtatagagagtttcactatcaaattaagtagaatatatttagagttcatattaagtgtgaaatagagattcaaaatttgaacactaaaaaaaaacgtttacgtggaggccttagagagataggctcacattaatgaacaagaaagaccaagtttggtattaagtcggataaggtgggaagttctttttcaacgttgaagttttgaccgagtattactcaaatagttagagttttatcttttattactatttaaataagttaaatataatacaataggagccacgatatgggtgagtttggttaaatctcagggctataaataggagctattactcattatttttcacacaacactcacaaaagcctaagaagattctctctagtttcatagtcgaaccaaccatgttatccactctctattgttatattattcttaaaacaacaaagccttagtcccctagctacactacaccattattcttcaagatttcattattgttgttttccttcttccatatcgtcaaaaattccttactgccatcacaacaaccattatatttatatttccattctcttctagacatcttcatgtttaattactcaaggccaagctcgagtaaattacatagctacagctagattgtctttaaagctaaggtataccattttataattttgggtttctagattcaatttaaggtttcacatatatatatatatatatatatatgtatatctatacccctataatgtgttctaattgataagtgtgaaatttaggtttggcataaaacaattatttctcaaagatttctctcattgcaatcaaggttaacactccacatccgaggtaaggaaattaagta

SEQ ID NO: 386637 - DNA, 831 bp, Cannabis indica
ttataataatgattctatagaaaatttagtgattctgaattcgggttaatgaattctttcactcgcctccacatccgccgctcctcgcgactgcgatcgaccaccaatggcttttacggctttaatccttgaaaccctacaatatttcaacgatgatggttccagactcaaaatctcaccaacagtggtatgtgcgacttcgatccttgaaactaaaaggatttcaccaacatataagtattatgtatattggtgagtccctttgcctttgccactggcaaaatgattagaggtatatgccattttttttttttatgaatgtttgccattttcttttctatacttcagtgattagattttcatttgagtttcaggactttttcatttatttgaaaatgctttactatatgaggattgtgatggtgttcatgattgttgaggtgataatgtatgtattttcttcataattttcaattttctgtaaattatttctattgtagtaatagtctttcattgccttttatcctttgaataataaaaactttgaatatggattgttcaggttcacacttcatttatctgcttcttccattcatactgatattgattttgatatgatttttctttaggatggacttgtttcacagcgacccatgtcaactttcttcagatttggaaatttagaatctgggttttttaatttgttgcaaaattatccaatataggttatgatgccactaaatttgtaaattattggatgaatttttaattttctcttaattattgctattatgtatttgtgtttgttggggaataacttccatggttgtt

SEQ ID NO: 386638 - DNA, 803 bp, Cannabis indica
actaagcgggctttacagccctggccttggccgaccagggttctaggtcctagaggcaggctagaccttaagacccagcttagaggccgaccaggaaccctacttccagacataggctaaccagcctagggacacagtcccatgcccagccagaccccatgaaagccacccatggccggccaggcttcaaataaagtctccttggccggccaacatgtgcatggatcaaaacacatgatttttcaagaactcaaacatattcttcatgttcttcgtgttcttcgtgttcttcgtgacttaaagagccaagaatcacaatgaaggtcagattcacgacaagtgaaagagagggaatagaaagcttactcgcaactagattctgatgaagacgaagatgggaagcttggatcgtttaaataatgcaaaaatcccaaggagattgaagcttagaggttcagccacctagagagaaggaggagctttttcaagagccaaattctagtgagagaaagtgaaagtgaaaaataaaagtcaaaaaaggggtttccccctaaaactagttatgtacatgtgggcccccttttcctcacttacttcaccaactcattataaaggcccataaatgaattatttctctattgtaacaagatcaaacaatcaagacaaaatgtttcaacacacgcgccacttttatttagcaaaggtaactatagtctcgacaatgtcaatcttgctggtaaagtccctatccatacagacgtccgcacagggatttgggggcaaatgtgttggaaattatttta

SEQ ID NO: 386639 - DNA, 1029 bp, Cannabis indica
gtaacattgtaatgaagaatttctttgggaaaaatatgccgggttatattttggaactaagagaaaaatctgtagatgataatgcagatttgatagaagtatacaattcaacaatttttacctggataataattacgtcgaacaatttattggcatccaattagcaaagtaaaaacaactaaagaagtttgtgaccatcttcaaagattgcatcgctccacgtttacttccattgattcagtgttcaataaattatcagtatataaaattcgtcttaagtctcagtcaagtaaatgtatcctctcaacacctattccatctattttggcctttctttctactacactattttctctccaataaaacaaacctctcacaaaggttgggattaattataagtgttgtttttacaaacaaaaggctattagaaagcttagtgtactaagcttatgaatcatatgggtgaccaaccgcaatttggcaactaaatacagtcttatccatatcatcctccacaatttagcattatagcaattgttccaccatctagatcttattattttgttcctctcttagagaaatttcataagctccttgctactcaaccaaatatcatatctgttgggccctctcttctaccttttcggtccgctatttcaccttgactctgatattagtatgtctagcaaaaccaccttatgccgccgctattaccaagggaactcgccacttgaccatcacttttagtaggaagactttcgatataggtcctaacaccgatctccatcttgtaccgccgtaatcatcaacaggacacgccacctggctacctcaatacactactacaaaaatggatttcctcgacgtttttaaacagtcgtttaaagtattcccatcagtttttataaccgtcgcatatacgaccgtcgtaaaacgggcagaataggcgacggttcaaaaccgtcgctaatgtaagtttcccgacggtttaaaaccgtcgcctgggtatagggcacggtttaaaaccat

SEQ ID NO: 386640 - DNA, 1385 bp, Cannabis indica
gagagacaagaacgaattaataatgtgaaaaattatgatgaaagagtttgctccaacttaatttctgatgtaaattggacgtgagctcgcaatcttgtcgaattaaattcatccaacaaaatattagactttatttattcttattattatttcaagaaaaaaatcctattgttgggccattgctatcatcaactaaaaacaaagtaataaatagaaaataattttaaacgtgacaaaggaacgttgcatctttgaggggacaaatacatgaaaacaatacaataagaaaagacaaaagaaaaaggtgatagaattttcaaagtattttatagtcaataattttataaatatcttgcactctacctagtaaaatagctaaacatcactacaacaataattaataatgtgtgataaacttcaaaatcattgaaatatttggaattataaagtctttaaagataaatatgatacgtaaccttcaacacgtcataacgaatatgctttatagtttatagtcctaatctttttcttttaataataatatttgtaatttataatcttgcaatgatttgatttctgtttcaaaaggctagattatgttatcctgaatcatattctcgtatttttaatctagactcctattagttttagatattgacttaaaaaatacataaggatatatatgagcagagctagaaataaaagtaagtgaggtgattatttatttatttttatagtaaaatattataaagtgttatactgttattgatacaatttaatattaaattttacttattttatttataataatgataaaagaaaattactaagtatttgtagagcactacgtaactatttgtagagtgcaacctcaaagttaagggtgttcacgaattggtttggtccgaattttcataatttttgaaccaaaccagtataatggtttttcgaatatcaaaaaccaaacctgaccaataaatttctcaaaccaaaccaaacaaaaccattaagaacggtttggtttgattcgaaaccacagtttaagtggaatttataattattcatattttttaagtaattatactatttttactaagtttttaattttatttttcaaaatatatatttaacatgataagtaatagatctataacatataaataacgatgtaaaaatattctcaaaaatcaaacatgacataaaaattcaaaattcatacaataaaaaacttgacacacaaaaaagttcaaaattaagacatataatcatatataaaataatatatatatataaattcattatttattataaacggtccggtccgatttaaccaattaattatttattacgaaccgcaaccgaaccattacgccgtaaacggtccg

SEQ ID NO: 386641 - DNA, 925 bp, Cannabis indica
aaaaaatagagaatggtacatatttactaaaattttgagaaactgattatatttaaaattaaaaaaataaataaataataaacatacaagttttttacgtgattcaagcgttaataatccttaattcacgagtcaatgcaactgtttagatattacaaatgtttacattaagagtttctctattcctcttatttctcttgagagaaagctcttcaagaattttagcttggtgtctataaattaatgaaaattgtttttttttttgtttaaagaaaatgagagtatttataggcacatatggggtaaagggcatcccttttacctacctaaggtttcatattcaacatgctgctaaggccggtacgactaaaggacaatctgaccattggatggtaagaaccttcttcatcgtgtgccgtacaactccagtgagggtttttgtacaaaccacggcaggtgtcataaaaaggtctctcctttgcaaaatactctctaactagatcgttaggcaaaaagcatgttcgaaggtgcgtatgcacactatcatggcctgacacgggggacaaaatctgattttgtgttagaaaaaggtaaaaccatgtatagagtaatccatgtatggcgttgacgtggccatcaccatcgcgctccaggttcatcacttaaggaaattccacacgggagccatctgtgccaactaccttccatatctgggagacgttccttaccttacgtgtaattttgactagctaattaatctttgttgctgctatattttgccctccaatcatgccacttgtcttatgcatgaaaacttggatatcatttacccccaagctttcgagactctttgaattgcgagagcttgctatctttcccggtactgaccgttgacagtggggcaactcatcatgtttgctccaac

SEQ ID NO: 386642 - DNA, 827 bp, Cannabis indica
taatatatgttacaatttagacaaaaattaataatttattaacactaaattatatgtcacacatttatttaatctaacttatatatataaaaatatagattagttaaaaaaaattgtaagtttttttttcttactcttaaaacactaaaatagttaattgtaattaatcaaattttaaaaatatattattttttaaataataataatttattatagcacatacatgtaactataaattaactatcaatcaaatagtaaaaaaatgacatttagcttgaggtaataaaattgcatgaaatagaaataaaatatataaattttattccattcttttgtttagttgcattttaaaatcgaattgactttttcactatttttgtggaatgtgtatttcattttgatatgattttaatacaaaatgagaaaaaattaaataaatctatttatacattttaaatttaattccattctatatatattcctattctcttgcttatttttattctttcaaatcaaacaacatcttatagtaatcatacatatatctatttgtgtttctagaaaaggttgagcttgagatagtgagtagtattcttaataaatatatatacaaaaatatcaatgactatctaagcaggaatttattttgaggcttttcacttgtttaattttttcttgagaaaaagaaaaagaaaaagggttaattttacaaatgcacaaaaacaataaaaaaataataaaaatacggtttcacggaattttaaatatttttacgatttttttaattttatctacataaaatacagtctttttatgttgaaattttg

SEQ ID NO: 386643 - DNA, 3412 bp, Cannabis indica
gatggtatgtcaaccatgttttatcaaaattattagcatattatgggttcttccgttactgaagtggtcttaggtgttctaaatgatggccatggaatggattcaattaataaagcaatcattacccggatcccaaagaccaactcacctactggtatggtagatttttgtccaatcagcttgtgtaatgttatctacaagctcgtatccaaaatgatagtgtttcgtttcaaggaagtactccctcttgtaatctctaagacacaaagcgctttcctctccaatagactaataactgataacatcttagtttcctttaaactcgtacaccacatccaacacaagacaagaggtacaaaaaattatttggctctcaaataggacatgagtaaagcatttgatagagtaaagtgggcttcctttaggtagttatggagaaaatggggtttgaaatgaaatggattgaattgattcaaaattgtttgtcatcttcaagtttatcattctcactcaatgtggaagttacgggtcatgtgaaaccaacttgaggccttcaacaaggggatcctctttcaccatatctatttttaatttgctcagaaggactttgaagactgttgcagaatgaagaagctattggtaatcttcaaggactacgtcttattagaagggtacctcctatttcacacattttttttttgtttgatgatagcctgcttttttgtgagacgacgaatacatctgccttggcgataaagagagcattgagcatatatcatcaagcttctggtcaaattttgaacaatcaaaagtcagttatgtctttctctccaaatactccagttgcagcgtaaaactttttccatcagactctaacatgcctatcagcgagtggctttcttactcaggccgtgacaaaaaagagctatttagtcatatcaaagagcttgtttggaagttgataaacgtttggaatgaaaaattattttccattggtggaaatgaagttctgcttaaagtagcggttcagtccatcctaacttacgctgtgagttatttcagcttaatgaaaatatttttaccacaattggaaagcatgatggctaatttttggtggtgattgaataaagatggcttgaaaatacattggagaagatagaaattattttgtaaataaaaatttgaaggtggtatgggattctgttcatttgttcattacaatcaagcgttactagcgaaacaagcttggagaatatttaaaatccctacttctccaagcatttattactctagggattattattactttctttcccatctaattaatcctattcagagcattaattgcttgaaacctatgttctcgtcatctttctatcttcttcatcacctttttttttcttctccccatttaatcatgatctcccaaatctcaactccagaaaacactcttgaagattgtaatatggaggcggacgactgggttcccgaagctcatcagctcttcttcatcattgtggcttcaatggacgtgactagggaagtgactagggcaaatttgaggagagtactccgtggattatggtttttcctatatatatcgaaactcatgtttcgttttcttcatcctcttgctttggtttttccttttgtttctcttgtctctgaagtgttctgttctgaccctatggatgaccttttgaaacactgtttctagtgctttagctctccctcctgatgagtccactattttcacttatgatgttcgttcgtctagttcttctcctacccctattagccttattcttaagcttcacactatcacgccttacaatcgtccttctcttatgaaaaccctctctggtatctggtcatcacaatgtcgatttcttgttgttctgtctgaacatgcagatggtatgttcttggtcacatttggctgtgagggggataagggtagagttttagaaggtcaaccctggcatttttctcagagcatcactatttttgctgctcgtgatagttcttttcctcttacccctaataatttgaactatgttcctttttgggttcaagtgtatggaattccttttatgtgtaaatctcatgatctagctagattcatagccatggaagtgggtgaccttattgagattgataaggacaccattaaggaggggactggtccttatatgcatctctgcatcttgctggatgttaatttgcctataagaaggggaatgaatatcaaattcattcgtatggggagagagttcatcaaatggctagattttaaatatgagagacttccggacttttgttttttctgtggaaaattagatcacactaagaagtattatgttgcttttttacaaaagtgtgatgagcttatatctgaatcgttatgcccttataatatccttctcagagacaaggagaaaatttctgaaaaatctcagccttttcaatacccccaccctccagctattactatggtgaattatcagcctttgaaccacaatttacccccaacacttctctggtcatcctatcactttcccatcttttctgaaccttaatgctaatttcactgggccatttgctcctctaccatccactgttgtcatcatgatgcctacaccactaaatcccaatctttcgaatgttgccccaccctccactagacccacatttgacatttcattgaggccctctgctttcacttcgtattcgactaactctctcatagtgtcatagtgtggctgatagccaagttattcctatgaccactatgtcctctggcctttcttcccttgaggttgttatccatgcttgtcaaatggatactatgtcccctgcccttgctgatagctctaatatgggcattaacctttttcggggtcaacctgatcctgatgttcgtgggaagggtttggcttctacttctggtgttaagaggccttccttccagcctcaccatgctgtggttggaagctctgtgaggtctcaacttaaacgtgctcgctctggtgaaagggaagatgagtcttctgttgacactactaatctggaacaggtgggtgatgctttgcacacccgcctagaaaaatgagtttgttaagctagaatgcacgtagattggggagtacgcatgcattcaggaggctctcccttttggtgaaagaacactgccctgatgtgatttttttgatggaaacttggctgcctgtgaaggctatagatagagttacagttgctttgggtttttgataatggtgtggagatccctaggaagcaattttggggggggggggggtatcgttttcttttgtggaaagcaactgtttatgtaaatattttatcttttttctaagtgtcatatagattgtaatataagttttaaggataatga

SEQ ID NO: 386644 - DNA, 515 bp, Cannabis indica
attctacaataaaaagcgagatttaaaaaaaagctggaaaagagagagaaaaaaattctaagaaggcaccgtaaggtagagtattgctataagccactaataaatgatgcccagtactatttagaggtgacgctttactattagttatcgatattctataaaagttataatattatagaataattacaattttaatttgtcccttgaactttttacactcaagtcgtgtctcttataatatacgacttgtaaataatacctctcgaaatataactcttacaacaatgtgtagtccttccatcacattttatttaatttcatttataataaaatgtgtgaattggttgtggtagttgataaatggatgtcaatttaatatttatcactatttttacgttaataaatcaacaatagaatagaagatttttttttatataataatttatatttatatgtttttagttttttgattaggggaattatcttaaatactgttttttttaaacttttttttt

SEQ ID NO: 386645 - DNA, 766 bp, Cannabis indica
tcgcaactcttcttctgcactcaacacaaacacaggggaggcacgccagatgagtccaaaggccaacagagcgcagatagtgacccctgaggaacttcccatctcaggcaagcaggaaatagctgttggtgataccagtcaaaccaattcccatttggagaaggaggaatcatcgtatgcatccaccacacctgcctttgggggtaataagacagcaaatgaacaaggaagcccttgtactaagcccacgtccccatctattccctatagctcatttatattgggttctcaaaccgatataatggaatggccttctaaggagtgttgggcccaacccaaagcccgtgaactttttaagggtggcctcacagttgacaagttttttcgtgagcccactttatttaatcctctattgggcattgatgacttcagagtgtatgaacatctccaaggcccacgaaaaaggaaagccatggatggcatcctcttcaacacctcccctgaagctaaaatccccacatcaaccacttcggatactaattccactttccatcaccaagcctcaatctcaatcccataccctcactctgaggacctaaagctcccatctctcaatgaaggtttcacgaatggacaagggacctccagtggtacggtcaggaggcgtggtaggccgagaaagagtgggagccctgctacaatggataactattctccaaggagaaggggaagaccaccaaaagctcaccatagcctctcggccaca

SEQ ID NO: 386646 - DNA, 2782 bp, Cannabis indica
gcaatcaaaagatatacaaaataattctataagtgaattattcaaactattttttaagtttgctctaaagaaatatgttcacttatagcagattaaaattgctcgcgtataacatgggagattaaaattgctctcataaagtaatgcagatgagaactgctcgcaaaataaaactacacgaagattataactgctcgcgcatatacatagtagattgataactacttaaatatatcaaagaaaaataggtacaatggaaattcttcccaaagtatcctaagttggatcaaaatataaatgtttagattgtgaaataaaatgcaataaacaaaattatttagttcaagcataagatacgaggtattaaaaataaagataaatatataaaaaagcaaagttggccatccaacaatacaaaggtctttacataaataatgccattagggggaaccattgtctcggccaaagggccatttttctcaatataaaaaatatataaataatgaaataaaaaccaagtctacatggtgggagacctggatggatcttcctcagagtccactacttcatctttcttgatcttctcgcagtaagctagaacatccacagcaccttcacccacgaaggtcaattcaatgttgggattggccagcaatgctctgtaactgggtcattttgcaacattttttcatctctccttaacatcaaccttgacgcccttaagctttacattcactttattgagctcttcctggagtttttgacatgccttgcgttggtccttgtcttccttttgagcactctcgagctcagccttgtggttcctctttagttcctcagcatcttttgtcaggtagatgttctccttctgggcatttgtccactgcttcgtaagaccctctcgttgttcaatggatttgcgaagattagattccaattgttggattttctgaagaccccagtgttgtgccacatgagatagaaaagatgtttgcaaaaagaataaattattttataagaaaaatacgggagaacataaaataaaataaagaatgaagaaaggaactaactgaaacactaaagtttaggctcctttcaaataactcctcgaagttgccattgttcaccaaattccagttgccagataagaaagattttaaatggggccaacttgaagtggcatattgcgagcaaaactgcgagccagtacttcctgcttcacgaggcaaggggcaggaaggttccaacgaccatttaaggttctttactcaaacccttgacttgctcatcaatatccacaatagcaggagtttgatagtgaacctgatcgtcagctggctagatgattatttgttgtaaggcacattttttgttggcagtggtcttccttgacctcttcatgggctctgatttgctcccgatgatgtttttgaggcagcaatcctcttcttaccctttttgccagagggattgagaaggttttccaaatcaatatttgtgagacaaagaagaagattaatcaacacattcaacaatggataataaaaaggtagggaataaactcccacttaaagaaaaagttaccgtaatcattagatgatgaagaggaagaactatggtaattactaaactccctagacccggtgatcatgtatatattgtaagggtttattggagacaaatcccaatatgaatccagatgactcaccctatccaagttagtaccatactgctcgacgattctgaagtacgaactagtgcaactaagttggacatgaaattgggggtaccaaccattacacctttgagttatgcaatctatacaaaaattatcccaagtatataagttgtatcggctatccttaaaggttactagcgaggtacgtgcgatcctaagtgtagttggagaccatccacattgattacctcaagatgcttcttctttagcttcccgagagtacttttttgagataatgagtgcgagccacataatctttatcttcctcatcggctagaactggggccctctgccacttagaatatttctaaccttgtagtcgcaggtaaattggtctgaaccatggaggttgatggtcctcaaattggcctcgttcagtaggaaatctactaagcgcagtccaaaaggaagatttaacaaaattttatgtagctcagccatctcgagagtagcgattagccttctagtaaccgctgtcaacaataataaatggaataagtagacgacttcaattttttaaattcaaaaactcaaaactaaactgttgaggaagagaagacacttccgtataatgaaaaacgcagttctgttgatgggagagagaccagtagtccagaagaaatcgtccttgaactcggtctttttggtaatctcacaatgatcatgcgatcacttgtgtgggtactgatataataaaaacctcctgaacaccacttccttgcgggaatagcttttgcggagtaaaaatacacaatttcgaggggagtaggagactcccaacctaaaatgtggtataggaccttcaggcagaccaagattctgtaagagctcgaaattcactggaaaggagaaattatgaggtagttacagaactccttaaaatattcccttaagggaagtactgccccaaccttgatgtgctcgaggctccaagcgccaattcttgacgaggcattagtgctggctttgccacattcctctcaaatcaccctttctagtggaaagcagctaaattcccctagagcaatagatctaatgcgacat

SEQ ID NO: 386647 - DNA, 745 bp, Cannabis indica
tttttttcttaaaaaaaaaacaaggaagctaactgaattaaacaataattaattaatataattaaatcaaatttttaagaaggaaagacattggaaaaagtggcgttttggaattggtgtttttaaaaacagagacaagtggaaagagctttgagagctcgtttaaaaacgagaccacgttttggaatcaaacgagggggggcagaggctgaggaatggaactttctaaacgacgtcgcttcgggtgagattctgtgatgagaatccatcgtttttgaatcaatgcgtttttggtttttgtttttgagctgagaatggttagccgacagaggaagaagaaggatatatatatgtgggtgtttgaaccgcgtttgatgaggaatacaaacgagtaagttacgtgtgagacttaagattaagacaaagagaaagaagaagatgatcaatataatgaaaatggatctgttaacaattattgtgtgtaccaataataaataaggtgttctgttctgtgtctttatatacatacataaagagtataagactacgtatgactcgttctttagtatcatatttcatgtttagtaatggttactaatactttctaaaattattacattaaagactaattagtaattttttttcagaattttgacatgtgttaaattatgttcctcaacttttttggtcattaaaaatttcccctgaactattgagatccttaaatttaaggacttttgtctaa

SEQ ID NO: 386648 - DNA, 1264 bp, Cannabis indica
actattggtgtcatccaggttggactgacatccaacatgtctatttctttagaaatagagatgctaagttcttttaagaactcaacggtatcaagtttgcctttgttttcaaggcgttgctggctagtcgagtaagtgcatcgactattgcatcatttttggggacttatcttttagtatagcctttgagctgacttaataagtcttgaatgtagctcaagtaggccatcttcttttttccttcagttgtgcattcacctaggacatgacctaggactagttgagagccatgatgtatgtttaggtattcagcacgggcttcgtccgatagcttgagcctagcatttagagcttcatattcagccttattattagaggctttgaagctggcctttattttcctatgcagctattgcctcttaggtgtcttgaggaccatgcctacactaggtaggaggtcaatgcacctgttaggttgaattgtcttgatgttgctctcgcttcttctttggctctttcttttctcccaattcttgagagatttgaggacatgtgcctcattcagccacaaagttggaaagagcttggccatttatggccatgttagattgatgagtggccttatattggccgagcttgatgacctagttgagtggtcggctaggagcttcaaatttttgtgacacctgtcgacatggctggttggcacacattgctttaggagttgtgggatgagagtgaagcatgtattcttctcctccttctccctttgattttatggcgtaagggaatcgtagcatttccctcttttgccattatttggtccaaagccactgatgttgtgcttgcctccattatcctcattgttaggggattggcagatattgtctgtgccggctggcatgttggacttgacttggggcagtatgatgcctcgtgtctgttcaacattaacctaccttcttgtttgggcttgtgagacagcttcttcaaactttatgaagccatctgcttgactcgaggaactctttcatgttgctcgtttatatccttctaatatctttcaagaattcactcaagggaaagatgcctccaagtgtggccatatatcggccttcttttgtcaagtctttgaccttggtggatctaattatattagtgtctataattgatttcttctgtgtaatactaattgatagggcctcattggtaagcgctacaagatctcgtacattggaacccatggttatggacccgaattcat

SEQ ID NO: 386649 - DNA, 884 bp, Cannabis indica
tctttcagaaattgtaatattgttctcattctaagggttgcaattaaggaaatttaaagtatttcattattacttttttttctaagaaaaatatttcattatttcttggtaaaacattttgatacgtcacggtatgtttagaagtattttttagataataattatatagtagtaattacattatagaataccgggtgtaataattacataataataacatatcagacaaatatatcaaatcaaattattattatttttaattacatacaaatttaattatacagttattttctaaatgtgcccttatagtttattccatttacaccattatagttttgacaatattcgatatatgtttgatgatcaggtttgtttttttgttaaaaaattatgtgagattttaatgcctacttgatcacgtagagagcttaggataagttttgatctaattatattatatattaattatagaaaactgttaacaaattaattataaggatatagtagtgctaacacttcggtcaacaaaaaagtctacattacatctttggtgatagtcactttgatgccacgtgaatcctcaacaaaaaattccacattacatgttttataaattggaatacgatcacatattgtttccaaaattattagtgataataaagaaggatatttaacatgttgtttcttcttcttgtgctgattttaacgatactctttcttgtgaaaaataagttcaaagccaataatgaaaacaagccaaaacttcctcctactcctccaaaacttacagtcataggctaactcacccgatttaattaatttcatcaagttagattgggtcaattctattacatgtataaaaacaacaaaaatacagttttacg

SEQ ID NO: 386650 - DNA, 870 bp, Cannabis indica
ttttttttatttgtaaactaagtttggtggagctttatagcctgggagaattttcatatacacttcctcatgaagatccccttggaagaatgcatcatttatgtcaagttggtggactttatagttatacattgcagctagtgcaagcaagatttttattgtattgaattaagctacaagagcatatgtttgtgaataatctatgccgcgtctttggttgtatcctttggccattaaaggggctttaaatcactctgcctccccattttgtttgtatttgactttgtacacccatttacatcgaatgactttgtgccgtagtggtaatcatgttttgttttttctcaagggccttagtttcattgtctatggccactaaccaatgtttgaattgagaagcttcagcatatgattgaggttctacttgagagaaagctacttatcaaaattaggaaatcaatttagtgtaggatatgaagtgtaacaccttactaggttaggcgtgttatcgtgatttaaagttatttgtgcaatccattgctaatcaatagatttgttagaaaacatgtttaattaaaatttacttatttaaccttttatttaaaataaaataaactttaaataaattgggatctcgtatttaagaagttacaactgtttacaaaacataaacctacaaaagttgtcacctagtgactgtcaaaataaagcttgttggcctgaagaccgaacgctctaggtttaaccgtcctgatatgtgcaatcttcatctactcgcacttactgctgcccagccttaacttttcccttacctacacatataaacaataactgtcagttggcagaatcagtaagaaaagtataattata

SEQ ID NO: 386651 - DNA, 1620 bp, Cannabis indica
aaaaaaatagaaaaacaaaaattataaaatctaaatgtcaaaatttgttaaaatctatataataattttatctgaaatttaaataaaaaatataatatatatttttgttaataataataataataatggaaatttccgtgtagaatctaagaaattccatccaaatgattaataaaaaatggtgtggtgagcttgatgctcctctgccttaaaatctattataatgattaaacgttatagaataaaatcactttatatttaaaaaaaaatggtgtggtgaggagtcaataaaaagtagaaaatacacaaaataatatggtactttattcaaccttcactgctaaaaaatgaattttctgatagttttaaacaatcagataatgtatgtcgggctttataactatcgaccgttacaaaactaggtaaaataagtgatggttgaaaatagtccgcgaaaaatctcttcaatagtgaacactatagttacaacaaaaaggaaaaatccaaatctgagataattagtctcaaatctacaacaacaataatttcagtaatctcaatccaaaaataataatctaaattaaaattcaaaaattaaacaaataaaaaaatatacatttttttttacctaaaatagaggcggacggaggtgggtggctccgttgggtctcgccggcggtggtggttggaggtggtctgagagagagaaatgagagtttgagaatttaagatagagagtgagagtttgtactttgtagtagtgcaatttgagttaataaattaagttcttcttataagaaatattatattaaagattaataacgacaataagaaaaacaatgagaaaaatataaagcaagtaataatattgctacgtagtatagggtagggccctttcttgcataactttatattatcaaatgctttttctttggttactactgtttgaccacgtgtcatgcacgtgtgaatgctgtgaataaatttttaaataaaaatatgagtatgaatttaaataaatattattacagattatttttaaaaaaatatatggtttagctaaattagatgtcaaatttaaaagattagcatttgatgtttaataatattttagttagtataaagatacaataaacaaacaaaggtctccttcttcctctctcttacacatgcacataacttgaaattttgataagacaaacccatctttttatatatgtaataaatttaaattagaatttttgtctcataaaattaaattatagtcttgaatttaattaggtcgttaaatattttacttgaactatattaattgttaaatttaaaaatttttataaaataaaacaaactattagagtttctgcagttaaagcaaatgggatgcttagtgtatataaaatatatatatttattatattaattccaaaaatgttaccttcttttattaatatatttattgggatataattttgtttagttattgtattttcacggattgtaatctgtgatgtacgacagccgtcagataagggagttatttgatctgacggctgagattgatctatgagtaattatggttaaaaagtagaaacgtaccctgacactcatttaatggactct

SEQ ID NO: 386652 - DNA, 2137 bp, Cannabis indica
agtaaaaccttagtgataatgacaggaaaggtatacgagagtcttagatgttgatgaattagcatcatcatcgacggactcactatgagttggcatggtagttcatgctaaaggattgtcagtaaaatagagaatatattaaggtatgtatatttttggatgtgtttgaaagaattttttggacttttaccaaatacagaaacgaaactttgaagtcaagggatgatctctgattaattgttatcagttgaggattcaggaaatggatatttccagtttagtcatgagtgcctagtatgagcaatgttgcctctgtcgtataagttatattaattcacttaagaacggttgctaactgtaagtgtttgggagatttaaaagttgataatatttaagttgataataaggtgaaaattcctcatagttaagtgaacaaaagcaatgaggaattgtaagaggataatgaagggagtgatagaaaatgaattttattaacgaaaggatgaaagcaaaaattacaattaggaacgacaaagaagtatctacttcctgataacccaccatgagcttaccttggagttaagcatacttaacttgcggtaatctcaagatgggaaatctttgaggaaaatatctcaaaaagcagacgagtgaggacaaagttttttagaaaaatccacattaggatgtagaatcgatagtcattccagagattatcaaaaggaagggatgtgttaacaagtaaagaattacaaaggatcaagatgagtatatgttagtgagtagaaataagaaatgctctaattgaatatccatcaaaaacgagtacttaacttattattaagctaagttagtagatcagcttttgaggtcgcataggaggaatagaaagacataattatgaattatgtactatgggttcttatgattttgattgagtagtcgtggttggacatgtcgagtaaatatgttgtctactagggtagacaatttatacaataaatgaggatatagaattcatccgaagggatagtttaatcttatgaaatcccaaagttgatatcattgactatgatgttaacaattaatgaaggttatcgagaaccaaggagatcaaggtgaaaatagtataatgttttattcttgaaagatgggtaatctgggaggatcaatagaatattagaaatgtgctataagcatatttgataaaaatattttaataagtgtggtaaaagaaagatgttgggcacttgttcactggagtaacacaggtgataaaagaacacaatggactgaaaagtttcaagaaactttcattgagtatacagaaaagctacactaatttaaagcatagggatattaaacttcaaatgggagactcagtatttcttcaagtatcacctatgaaagaggtgcgtagatttgaaaagaaaggaaaaccaagccctagatacattggtccttttgagatattggggcggataggccaggtggcctatcaattagctttaccacccacgttgtccaaggtgcatattatcttccacatctctatgttgaaaaagtatgcgtcaaattcgacacacattttgagttgcgatgatattaagctccatacagacttatcttatgaggaagtgacttgggaattaaagtcgcaaatgcgagaattgtatcccaagttattcggtaaattttgaggaaaaaatttttataaggagggaatggttgtaatatcccaacaagcctaatggtaagtaattagggtttatatttatattatgggttaatcaggtaataagcgggatatgatcctattaatctatttcagcataaaatctaaatttgctattagtgagtgaataagcgtaatttaataattacggagatttatttaaaatatgtggagacaatgtgagttattggtggaataaaaatattttcagatttggtgaccttggagacctgtcgaaaaatgtcacaacagttttagtcagtaatattcatgggaatatcgagataagttgattatagaaatatcggtgtattttagcgtactcagagttggccaaataccctaggatagaaatttcttagtggctaaaaaataataaaataatctattattattattatt

SEQ ID NO: 386653 - DNA, 646 bp, Cannabis indica
tgttatgagctctgaagattactgggctttctaaagagagaaatgaaaggataattaatgagtgagtgaatgcattgggtttgtcgatatatatttatatgtaaagggaatgaattttgattggttcaaagagtgagatgcggattggtgacgtggattactttatttgttggggaaggagtgaatggacggtggagattggattatgacaaggattgttgacttgttacgatggtttaagaaaatttgagaaatatttggatttggcgggtgaccatatgacgagggctttctgaaaaatatattaaattacattttgacatattagtttttataataatatttttatgaagaataatattcatttaattttaattggacaaagttctatagtataatgcacagatcttattcttgtaaagaaatgatcatgatcaaacaaacattaaaaaaatttcacttaccattacttatttaataagataattgtagctaaattttctaaatttttaattcacttgcaactaatcttccaattttaaattttagtggaaaaattcccgacctctacttttattgataaattaaaggtatcgtctataaaagtagttatgtgccagcatgaattatcccacatttaaacaaa

SEQ ID NO: 386654 - DNA, 3722 bp, Cannabis indica
aggtaactttttttaaaaaaaaaaaaaaaaactaaataaactaaaaatttaaaatatattgttgttgcttaaataattaatctctactataatttagatttgatggtttataatacaaagagtaaaaaaaaaggttattaggcgtctataacagcaagttcagagacggaggtatttaatgaggtgtggtcgccctgttccccctcaaattttccaaaaaaaaaaatagaacaacaaatatatgtgtaattaatctcatttaacttactattataataagcatttggatatgtataatcatataatatattctaattatatatacgtatttagtaacttattattatcaatatatttatggaaatataattaagatagatactagtgttttactattgggatgtataatgaaatattgagatattgtcagctaaatcaccttaacttttagtttgtaacagttaaccacaaaaactaaaattttgatggcataactctctgaaccctaaatccgttttgcctagcactattccgtccctcaggctccgtttcagtcccaaattgcttacgtggcacgatccacgtcagcgagttatgccaccatggcattaaataaatccctctcccctaaaaaaaactaaacttaattcaaaaattaaattaaaatccctaaattaaataaaaattagaaatacatattaaaaaaacaaaattaatatccctaactgaaataaaatcacttcctgcacgactcgtgtaaagaccgcttagttttaatttggaaattagcagataactagggcttaattatgaaaaattatttattaatatcgaattaattatttatgatgatttatttgaattcagaatgtatttttatgtcatatatagaaatttcataattttgcatgttttgtgcccgacaacattggaacgcggtgtttggctattagaatcacatcttagtaagtatagcgggacaataaagttagacattggaaatgtcaggaataatcgggattttagaatttcccaaaatacccctaagtgatttatgaaggttttgtgagggcaaaggcattttggtctttttgccgatattgtattttatcctttagtggacttagtattgttttaataatttgattttaagttattttcttggctgaaatagtagataaaaactctttctattattttaatatttcatttttacatatcaaaaaagaaggaaaaatcacattttggtctcttctctctctctctccttcgaaacccttggggaaaggcagcaacttgatgtttttttagctggtttttactgattgtaagttgattcttggaggatcctttgaaggtatagttttagtaaccttctctttagtttccttttattttagagtaagaatttttgcatgaattgttagttagggttttgtggttgctatttatgtttgatgttgttttcagaggtttaattatgatagattatgatagtttgagcatgaattaagggttgttgatagatttaaccaagctttgagttttagaactcaaacttggagctttaatagtgaaattcgattctgagctttgattgttgtttcattgcttggaaatggtttattggggtataatatgcaggtctgtaaagtttggttgggtttggaaatgatttgattaggctttgaatttttgggttttttgggtaaaaccggctaaccggttttacaatgcttgtaaaaccggttacccgaattttgtagcagggtatcctgaaaattcaactcgtcttttcgtgctagtttcaggttcttagttggttagtcccctactagtttagggtattgccatatttagttgctgtagataggtttttggtttataaactaagtcccggttgtgatttagcgagtcatttattcgtgttattatcaatgtgatttaggagcctataattcaccgagcagttgtttcactcaggttgactggcacacctgaattcataattgaggtaagattagtataattctatgcatatgttattacatatttagcgtgcatgttgtttatgcttgttagattacattgatagcagtaatagtatacatagagttgtactgattactgataaatgtatgttggctaaaatattaatcgatgctgtcacatcaatatggctagagtatgactagcatattgagtataggctgacattatggtcgatagtattgtcgtatgaacgttctagactcattaccgtgtgggacatggggattagggttatgatcgggtgtatgggcgccaggttataacccgggttattagtatgttttatattatgattttcttactgagtatgtcgactcacagtgctattttcatgtgtaggtaagggcaaggctaaagctgaggagccgtgagaatgagcaagtgaagattgtacatgtcggggcggttaggcctggagcgtacgatcttaggggacgtaaaggcttttgctgacaatcgctaggcgacaaaacttttgtattaaactagaaaacttttataaatacattttgtaacggggtcccggaatattataaatgtattactttatgtttttaattaaataagcaaattttaattattcacaatttttaatcaaattttaattattcacaatttttaataacctcgttgagtagcaacgagctggaccgtatgtttaaaatcacgctaacatgcatatgctagttagggtgttacaactcatccccttcatcctgccattgtcgactcatacctccccctgttcttcccttcagcgattgttgcagtcaaaaaaatgaagaggtatctacatcccaagtgctcttggcaacaccctgtagtgatcaaaacttagtggacagatgcaaacccaagaagaagattcgtcatacgtcgtcgttatagggtgagttgtaaattttttctttattttctctttttaagtcattggtctactcgagtcctcatctgattctacaataatggttttttttttcacatctggttggtggatgttatttttaggagtggatcgacccaccaatgtgtgaaaggacttcagacgtggttcttgggctgttgcgtaaaattagaaggcttgagggagaaatttcagacatttcaagatcaaatattgatgagcataattaccggaacagtgtggaaaatatagatgagcaatcttctatactaaaggccctgaacaaaggggttcaagttgatgagcaatcattgcttaatagtataggagaaattgattgcatggagagtttcaatgggagtagcagcaatagtgttgaagatccaaaagaaaatatttgtactagtggaatcttagtcataagtgttgtttttgccattgttctcttttggttaatgtcctgagggttgtttggatccctgtaatgtaaggagatattaggaaggctaaaccaccttaattattaaatgtgtaacacttaaccccaaaatgtactggttttaaggatattgttccatgtaatttaaggataccctttaaggataatattatttcatgaaaatgtactggttttttggttgctcatgtagtatgagaatgtaatggaaaaattaataatttaaatgaaatgattgatatatgaacactgaagcaaggaaaatataatttctattcaaattgttgttggtgcattgatcaaaagatc

SEQ ID NO: 386655 - DNA, 662 bp, Cannabis indica
accaactaactcatcttgatactaaccacttataatacgccacattgatataatattagattaaattaattaacattaatggtcatatatttatagtacatgtctacgagtttagtcatagagcctcatagtcatattatacatgatttaatttaattgtttaagtttgatgacttttataaaaagtggtgttcatcccgcgtggttggaaaacatgcacaacaaacgtacaaatgtattaatgttgtctctattatatttatacataatacatatatatagcactgaacacgaggagattactgcaataatattcaaagaactttatatatatatatacgtgtgtatagtaaaatttaactgtggcaacatatattggagaaccattgtaataagcacatatataaaatatcatgaataatgatattaataagaaaataactataggttgctgatgagatatataattaactaataataactctaataatattaattttattaaaaaattacgttttttgtcttgttaaaaaggatcatgtgtcctttcaatattagctttaaataaatttttgaaagtatgacgtgttattttataagtagcttattattcaaatattattctttgaagatttttattctattaaaaaataaaaaataaa

SEQ ID NO: 386656 - DNA, 610 bp, Cannabis indica
aaaaaaaaaacctaccttttagatgtttgtccaactttaatttaggttattattttaactaaatgtgtgtatataaaaaaaatcaaatttcccttttataattgttttgaaaataattagagtagtttgacaaatttacttgttttaaatttagtgtaacaataatttaaaatatattaataatactatatatggtagcaatatttaggtttgcttagtctacttttagaaataaagttactagtataatgcaactttatttctaaaagtagactaaattaaaaatataataataataaaaagaatagaacatgacaatgccaatatattttatggcaaacaccaaactcatcagcattgcattgtgatgctcttacaaagatacacatataacatatttctttgggaattttacaaaaatactgcttttggaccaaaactttacatttatactgggacacggcaaaaacaacatttatactgccccagcccaatttcattacttttgtactgcccaagcccaacatcatttcatttctactgtgaacagtaaaacacacgggaaacaaccttgttcgtgtgtggggagacgccggagacggaaatcacc

SEQ ID NO: 386657 - DNA, 933 bp, Cannabis indica
aaaaaaaaaaaaaaacatgatcagacaaagtacagaataacacatccttacagttagagtcacagtaatatctcccaatcagatggtaatcactagtttttcaaggtgctattttcagtaattagtgattttctttctactaaaaattaagttaacttgcatgaatgaaaaatatgtaacatatgcattcctttaaaaagagtttactaatatagtatttgagataattttatactttaatttttttcatgatcgtttacgatgtagttatttaaaacattctataaaattttgagagattcaaaaaaccttaacacaccgaaaataacgttcaaatagtttgtacgtgtgaaatagactgtttaaaccttatttttcagtgtgttaaatttttctaaattttttaaaattttgtagaatgtcttaaataattacaatattgaagatgattataaaaaatattagattaaaaaattcttccaaataccaaaacagatagagatgaattaataaactttttttagggatgcattatagaatttttcaataagtacccaagttttaggtttgtaagcgccataaacctagtaatttgttttagcggcacaagtaccaaatatttataaagctgtaatttttctccagttatttcatcagtacatcttctattattatctcaaacaggacacgtataatacccatattctaaattatttaatttgaacggaaatatgtagtattagttacttccaaatcttcttttaataaatttaaaatagaacttgtattgatgaaaatagaaaaaaaattactgtttcacaaatattggatacttataccacttgttgaccgaggttttcggcaactaatgaaatatgaatataataatgagctgtaagaaagcgagatgaagactttttacgtggttggggc

SEQ ID NO: 386658 - DNA, 1450 bp, Cannabis indica
ttcaacatgactctctcatgcacattgtttttcatgtaggaatgatcgttgggggtacaatacgtctttaaccctcctcccggacttggaaggatttcttaaagtctatcctactccttgtgatgctttctcccttgctcctttcaagcaaagtctaggcttgaacttttaggcaacttcagccttccttctcggaagctgaagcttgctcactgaaagtttagaatgacttccgcaaaccaaaaatacttcgccctttggtgtttactaacaaatttgatgtcccagctcatgcgccctttccaccttttttagttaaagccaaaagattactttcacaagacttgacatgatttttgctgaaacaaaccctacgcatggaagattatttgtataagggagcagacctagctttcctctaagaaaccaaggccccccacgctacaaacaacctagagtctcccttacgggatttgcgccatagaaagggttgttgggatatacaatttggttctcacccagaactcatgttttacttcctggaagcctgcgggtggtcgtgtacttctcaaaaacctacctagaaggagggtacgaggcaaagatatgcccgatactcctcttctgaaattggaaagagacacaagtcaaactcaaagcaaatgaccgagaatctaagccccagaattccaagctcgtttggggggtatgatatatccgattgttgacaactacaacatcctacttccatttgtgaaaatcatttagcccagtatgtaacaaaaaatggggaacgtgctcaaccaaagtctcctcgaagaggaatacgcttgagaagctcgcaagggccaaagtaaggaaactgcttaaagcaattgtagacaacgctcccaaagtttgactttttggagagatcaaacctgagagaggatagtggagaaccttgtttcacgaaaagaggtcatttcctggccagctctggccaagcaaccttccaggaagcgagctgaaaaatatcacagctctgggaaagcaagggccaaatcaataatagttcttgagtcaaccagtaaacaaccaaggctaagggaaaaaggttgaaacactcaccattagaaccaaatgtttcgacaaatgcaactagcccataaacagtctatcacgacaagtctctaagaaaggaacggtgaaacaaaatatcctacttaactactaagaagccccctgcggccagggcaaagttaattgtctctgcggctgaaaaactatagttaagaagagggatatacaggttgtgttcggtaaccattttaaaaatggttttttgtttttaaaattaaaaatttgaaaatacaaatataaattgtgtttcataactccattttatttttgtttttaaaattaaaaaacagaatggagtgaattttaaaaacagattttggatgatttt

SEQ ID NO: 386659 - DNA, 747 bp, Cannabis indica
tttgtcgcatgttatggggtatccttgcaagctttaaggttacagaatttgattttagagatacaactacttgattttatttcatctcctatactaatctattgtgataataatactactgatgagattaacagtgtttccaaacatacaaaaataaagtatttcactgttagagacttggtaaaaaaaggagacattctgatagaatattgcaagaccaaatcgatgttagcagatcctctaactaaaagattaaatgtcgtgttgtttaataaacaagttattgatatggatattttataatcttttgtttttttgggctagtgggagtttcttattctattatttgagattacatttatatgtaattttcttattgatgttatgaactacttgatttgttttgtgggccaataatttttgattattggatattcatactttcaattatgcatattttgttatattcgcaagaatgattgaattaaaagcatgtaattcatattttattgtgattattgtcttttaagtttaacggcttagcaacaataatattttgttggtgacggtgactttttcagccacagtaattttttctatgacactaacttttctggcaccagtgactttttcgacgaaacttattattacaagttttattaaattcactattattttttttctcatattttaaacttaaattactttttaagcccatatttttttgcattatttatttatgtcata

SEQ ID NO: 386660 - DNA, 3307 bp, Cannabis indica
ttatgtcataatgtcaacataaattgtcaataacatcaaatgccgctgctggttccactacattctttattttggggaggagcgatcctaaattatatgagaaatgttaaaagcatcagtattatctagcaccttcttacgtgttaatatcgttaattaatcgtaacgtgatacgtctagaaagtgctagacaccactagtgcccaatagcaatgctcaaattatattgacatggtctgaccttttattttgcttttgaatgtatttaaaccttgtaatacaaatcatcattggaggtcagacaaatttttctactcttcctacttccttcccattatggctttttagaattttgttcttttttgtgttagatttatcaaccatgctgaagtcagggcatctcatggttgagtatacacaatttgtgctttttcaccaaataaatgatccaaattacatactctccaacataatcttaaactttgttaaaaagggttctccatgtggtcaataatgctctgcaatccacacctgtaacttggatagagaagctttactccgagttccttcttcatacgagcattggaaactagtttctccccaatgaaacttcttttcttaacagtgattaaaccaccttgatgtggcaagaaaattcagaagactaactaaatagccagaactttaaaacaggttaatatatatttcgcaaagcaatggatcgtggtacatgcacaaagactatattttatatttatctgtactttttagacgcttaaacaataaattaaatgcaaatttaaagcagaaggcaccaaataatgaaaagtaatattcatcacaaccttctaccaggaccatagatacctccaagatctaaccatctcctctcagcagccagcctcagtttagccaactcacttgttgggctagcaggatatatatctgacattagtgtaattcatttgggagacatcaaatttcagttaatggaaaaaaaaatagttagtatgaaaaagtgtttcgtttacatcgactcactcttcgtctacccactcaccaccacaattgccatatagacctgccaaatataagcttacaaacttgattcttactcatttaagtttaaaagcttgacaagacccatgtgaacatggctccttagattaaatataagacttatgaagttcaccttctccacagttgatttcaaattttgagaaacaccaatcaaacaaacatttcacaatttacttataaaaatcaataaacacagacttatgaagtgaaatgtgaacgtgcacactcactctgacacatttgcgtcaaaatggtaaataccatagattcaaaattacactcttaatgatatagaacgctctatatgttccaagatatagatacgctattaataatccattgttataatctaaataatcaaagatcctatagatgatttacatcaagtagggataaatttaccattctacgcttcaatatattttatccttaaaacatttatcaagttgtaaatgatattttagtaaactaatataattactgaaatgaggcttcagtcattaattgcgttaagccaagctcaaaagaaatcatcgtttcacttttagaagttatgaaagctatagattccatatttatgatcagcgctcccactcaattgtactaacatgttcctaagatgtaagtattgggccaatctaattggttagctttaacgaacaattcaaagaatataaataatatatttaagccagaacctaacaatctcatgattaagatctattgacctaagatcaactacgtgatattgacttaaatagatataacagtaagtttataatatcttatccaatgtcaatatgggtccagtctaatgtatactccatacatccgatcctagcatactttgccaatgccctagaaaggacataacacttatccaaagtgtaagtaaactttatcgctgattatcatgtcagtataaatccagtgtactgacaaatcatgaagcttaaactttgaaacatataatcatgattatattctactgtgttgacaatactataatcatgaataagtataggttctgaatttgatagaatttatatattaaacttataacatgaaagaaatcatgtgaatcatgcatcataaaatgatttctgatattttattaattagtaaatctgattatattgaaatgagttttatttagagtataaaatcccaacaaaatgttatatgtgtttgcagctagggacacgtggagttctcatgataaatacagcttaaatacttaaggcccataatgggtccagttgaggtaattgggccgtatccataaatcatcagtccttccggatgaagaatgagcaactcgtccaaacgagatcccatccaacatggttaacattcgaaagacttaaaaccgcgtagctaaaagaagcctttagcgtgtatctggaagcccagtatagttttctatttactactatcatatcgcataagatgagggattgtctttcaataatctcagacaaaaagatcatatctttctaaataagaaaatatgataattggcaatcaagtaaatgtttcattaatttccacaaatataggataggattgtgacaactagcatcgtgatgtggcctccacgtcgtcaacatacacaacgcggctcatgggttggacttcaccagataagcccaaaattcatattttatttgtaaacttcctattagtgggtaaaaagagtaactagtatgatctctatgcactataaatatacaacaaatcctacatgcaaagggtttaaatttcattactcacatgcctaggcaaaagagagagtgctcgtaccttcttgtaatccctaaagcttttctagcctaacttaataatattgacccgtggactttggttaatgcctcaatcacgtaaatatcttgagtgttctatttttttatttttgagtttttatctttgactcttacatttaaattattggtttccaaaaaatttggtaaacaacactaataaatccaaaaatttacttagcaatttttgaggtcagcaatattcaataaggttttatatgcttccaataagaatttaatatttttgttgactttttttacactattttattaaaaaaaatatattaactttactctcaagattatttctaaaatgtataatttgtgctccatttagcccaaaatatgtacaaagttatatttagcgtacttttttggtaattatgtcgccaatacacaataggagc

SEQ ID NO: 386661 - DNA, 2216 bp, Cannabis indica
agagagagagagaggcttgcctgagaaagtagaaatttcaattgtatttttaaacctaaaactaatctttctcaacacacgtatatatcttataattctaatatatatcgtatatataatattataaacaaactcttttatttattcgtataaaataaaagataatatttatatttaattcaaattttaaattgaaattcaaatataaataacatataagtgattaataaaaataatttttttatttaatattatccttttagttttaaataaattatttaatataattgttaatttaatttgatttatattaataataaaataatcaaccaaatgaatctttatatgtccttacacatatgggccatattttaaggtgcaaaattgattttttaattttatcaaaataaaatttattatttatttgtgaataaataataattgattacttcttattaatctcttattttattaggattaaaataaatattatttttacaaaaataatatatttctctctttaatatcatttcagaataatattatattaagccaattaataccgtttcatcaaataaactaaatagttaaatactaattatacaattcacaattgatataattattcaaaataataatttacacgaaattacaattttgcccttaagaattatttctcatagaaattaactctctctctcaaatttcttcatcaaaatgaacttttcccatacagtgttgattagaggtgacttaaggaccatggacctatattttagagctccaataaacacttgattattattgaatattattactccactaaaaatatggatgtaaagccctacttgctcaggcacactacagtaattttctaattattatgcccacatttgctaatcaaagagtttctcaaaaatatgacaagttaaaactttttgattaaatttaaactttaataaatacataaattacataactctgaacacttctggcttaaccatcctgatatgtacaatcacccgtaagctctaaactcattgtagctcagtctttgtctttactttacttaacatggaataataattgtgagtcgaccgactcagtaagaaaagcataaaatatataatcatatatatatatattttttcttgtagctgaggtgcccatatacacctagttacaagcttaacaaatgatgaagagcattctcatgaaagtgcgtcctctataccacatgcattaagtatctttctaatactagtgttattaggatttattcgttcttcaagtacaactgagtgttataccacatacactctatactcatcctgtactagtgttggtaatgttgtgtcgaacccttaacattatatattgtacaaatatactcagtaccgcaatcgtacttgtgttggtagtatacaaatcacataatttagcatgcatattacatacataagcaaatacagatatatatcttatacttatcttactttatttccagattcaagtgtgtcagtcaacctggatagaaatgcctttgctgaacagaggccctatatcacatttacgtaaaattggtaagtatttactctacggaactttctactatccgtatagacactacacttttctaccaaactctaaggtgaaaatatcatcaaataaatacataattcggctcaaatataaattccacattaaagatctcgtcacaagctttaaaacagtatatagaatacggatactcgagtgaaaagttatggccaaaatactaaaattgaccttcttagtaaaaccctgcctggaagcccccccaatctggaagccccttatctagaagacccctatacgaaagacccttatttggaaagcccttatctataagacccttatctagaagtcccttgttcggaagcccctatccggaagacacttatctagaagtcccttcttcagaaggaccttgtaacgccctactagattaggtgcgctacagagttttacaattattgtgcactcctttgctaataaaagagtttattgaaaaatatgaataattaaaattttcttgaataaacttaaacttgaacgaataaatatacatacatattttcgagatcccgtttaaaagttacaactgttcataaaatatatgtacactacaaaagtttttcgcttagagactatcaaaatactgttgggttttatgc

SEQ ID NO: 386662 - DNA, 2157 bp, Cannabis indica
ttttttttttgtgtgtgtgttgtaacatattattagacttagaattttctttttttgtttgtgttgtaacatattattagaattagatttttttccttacatattattagacttagattttattttttttagttgtgtcgtagcataattgtggtaaattttgtgtatatgtatatatataaacttgtcattttttcaaaatataagtttataaaatatttttaatgtgtgttacaataacattaattaaataaattaaaatattaactacaaaacatttaaattagaataaatataaataaaaatatattaaactaaacaaattccaaattcataaaatataaatattaattttataaaaagtaaaataaagacatatatgccttcggttaaaataaccaaagacatagatccctcgtatgtcttcatcatttatttcaatacttatgtcttcgccttaataatcatttgttccaacaaaataatctcgaagataaaatgggtttttctagttgtggtaaaaaaattatttgtagtagcaagaacatgtgatattgaacgtaagttatcaaattaaacaatcataatagtactatagataagaaagattgataaaaacttatgtctttcacattaatattatttaaaataaaattatataaattcatctttaagagaacaaattacactgaatagtctcattgactttccatgttttataatgactttatttgctgaaaaatgaacattgattaccatttgtaactgtatagagggagtgatctatctcatcattttttgcagacaactccttgtccgtttattccactaccacaacttaaactcggtagatctaaaccttctaaagtatcttcatctttattgttgattccattaaaccttgcaacaacacaatcagtagcaaacaagtttgaagttttaaagtctctttctccacccattacaggcatttttgctccaacattcacacgactcgtgtagtctggcctatatgtttggcctaacacaccagttacttcgttacttaaagagaagaacttgaatctaagttcgagatgggcaaaggtatcctctttagttataccatagttgtgaatccttgattcctctgcagttataggcacaacctttgcagtgattctaagcattctatcaatctccaccatgatattgttagtgtcaacacctcttactacaaaaacacttggggcattgttggattgccatcgagcacctttggattcttgtaggataattggctcaccatcaaaggtgatgaagagacggtcaactgagtcatcccatgtatcagttttaagtgcaccaatggagagttggtgcttaccgaagagaattccaattgattgaacccaagtgaagtctcttttcatatttgagttacgcttgccaatgaaatgggcatttatatggaggttagaatcagatagcagacaaaaatcgttatctttcttaccatggaagtagaaagtgatgccatctccacctatgaaacgaggatcttggcacactgctccaggttggtcacattctacatccagccaaaattacataatattattaaatttagctaatatatatacaaaaagaaataattaatactttttgtgagaaaacttactacaaactggcttgcaggttacacagtcgacctcacatccaccagggcaagagttgggacatacatgttcagtattgtaacattgaggatagttcctattccaacatctagccctcttaactccagcatcggattgggttggaggaggataaggtgtttgagttgttggtgatggtggagatggagtaggggtaggtggtgttggtgatggtggagatggagtaggggtaggtggtgttggtgatggggtagtgggggatggttttgggggtgatggtgtcggagtggtgggagatggagttgggggttttggagaaggagttgttggtgatggagtagtaggagatgggggaggatatggtgatggtgttgtgggttttggagaaggtgttgtgggtgatggtgttgggggtttaggagaaggtgtcgtgggtgatggtgttggggttttggagaaggtgtcgtgggtgatggtgttggggttttggagaaggtgt

SEQ ID NO: 386663 - DNA, 1120 bp, Cannabis indica
tagaatatattaattaaagtacaaaagaaatagtaataaaaaataaaaaataaaaaaaaaataataataataacttttgtaggatctttattttacatatgtctttgatacatataatactagcatacctctctaatatattatagagaaaaagggattttgatgcatctgatgagagtggccatagagttgtgatcattatatcgatcggtatctaattttttttttttttttaaaaaaaaaaggttgcatatgactaaaaaaaattcttattaaaaagtatattagtcataccatacacaaattaattaggatgtatttttaatttttgtaataaaaataaatagttgtgagattagattagtgacaataaatttgcataacaagttgtgagattagtttagtgacaaatgaagatgattttgtgttttgactaaaagtggcctttaattgcaataaattggtactttgactaaaatattattgacaatatattatatatatattttttcgtaattaaaaccttttcttgatcttgatcaaaaactcaatttgctttttatataagttgatatgtctgaaaatgcaattggcaaaatctaaacattttcatttgtccaattgttcaagtccctattatccatttagagacaatattcccaaaaataaataagtaaataaaaagaaaaagatttatttgaaaaatatagataatacgtgacagatgtagctaataaatagaaagtgacgaaagagtacagagctaatctattctagttgattcataaagtcaattaaatctggcaacttaatagagaaagtaaggtccatcttaattacatcaagtactctagcctctacctatttaaattctaaaaccattattgacacaaatgaccattcctaactgctcactatccttattaccactctatgtttataaatgattaataataatattttatactaattaaattaaattatgtcacatttaatatttaattatattaataataataataatattcaacatcattattattagtatatatctttgaacacttaacatttcttataacctttattcaaaaaaaaaaaacatttcttataacctaaacca

SEQ ID NO: 386664 - DNA, 1464 bp, Cannabis indica
atcttttattattgtgaaacactcttttacttttacatcaaataaatggtaaaatattaaatcatatataaaaacatgactattttatttatcaccatgggaattccataattttcaatgctcgtaaactaaatgtaaaataaataaataaatcaatgtcaaaaataaaataataataaaaaaaggctttcataaaaaacaaaatttatcattgaaattgatcactttcttggtccaagtgtggcccaagttgaagattgctccatagatgatacaaattcggtgtagcccgtggaatagttagcccaactccaaattggcccttgtgattttgtgatgtccaagataatgtaaaaatcaacttaaataaaattattttgttcaaaaaatattttaaaagtacacgggctatcccacaaaccgtgtatcaaattacattacaactgatagagaatgagatttaactaaattgtcctctgatttttcaacggttgatttggaacaaatacttttcttgcttttttatctaatcatgttacctctgattattagatttcgcaactatactggtgggtagtataatgttaagtatggatatcattttgcttattctttagctgatgatactattgattctgtttctaacctgaatgtctcatggtggaaatccttttggagtctgaagttgccccctaaagtgaaaatatttgcatggaaagctattcaaaattccctgcctgttgctgcagaattgatcaagaaaaaatccctcacttcggcctcatgtagtttatgtctaaatgcaagagaatctgtgggacatgctatgttctcctgcaagcacgcgatgaaagtttggaaaataactggttttgctttcaattacaaagctgctgtgtccatgaaagctgaagacattttgtttcagttatcagaatcttataccaaatcagagctggaaatgattttctgcacaatgtggtcaatttggtctgatcgaaacaatgtcattcatggttgttataccgaaattaaaaataataaaattggaacgaattaccgatagaataatctggctgagtcgcggacaatgtcgctctctttaagacgtttcgcggctctgcccgaagtgtgcacggcagtctagcaaccacgacgtccccaggataaaacagctcctgtaaaagtacgatacattctgcaccgaactgtattgctctataacaccctaaaattttctctaagaaaaaatcgtaaggaagataaaaaagaatttttaatgttgaaaaagatgtattcttacgttgttctgatacgacttatatagaagtcgatccaagaaaaaacggtaagaaaacggtaatgttatcgttcgtggaggagttggatcgtgggaggaaaaagcggatcattgactgatcgcgttttacctcttctgatcatgtgttaaaattaattaataaa

SEQ ID NO: 386665 - DNA, 1375 bp, Cannabis indica
gacggctgagattgatctagggggtaaatagggttaaaaagtagaaacgtactctgacactcatttaatgtaccccgagactcatctaatgtaccacagaatacattccgtaaaagtacatacacaaaataaaatcgtatccctatatatataaatatagtttatattatagctttataattatgatttgctcacacaatattaatatataaataaatatttatttcctaatgaatgacatatagatataaacacaatatatagtggccggcaggggtgttgaaaaaaaaaagtcaacttatgctatatggagaattttgtgtacccaaaaatttagtggtccaatttattatatttattttgtctaaaatatatacataatatttatatatttattgtcacaagtatcatagtctttttctttctttttgttcatgaaggaattaacatatatactatagttgtattatgccaaactctccatatatataatgattatataaaaatagtttttcaattagttattttatccttcaaaaaaaaaaaaaaatagttattttatttttctcaaaaaaaggttttgtcatattcaatttttttcactcgtatggatttttctcattggataaaagatatgtatataatattattaagtctaaccagttgataaattccacacgtatgtttgagtggtcaattattaaataattttattaaccaaaaataaataaattaataaaaataccaatcacattcacatgtggcatattatataaatatataataatgaagaagaaaaaatgactcaaaagataaagcttctcttctatcaatatatatatacttggcttttaatgcagttgatcttataagaaaattttatattataaaattaatgattactttaatcaaggtgatgctctctctaatcattattaagcttcatttttatttattttttatgtaaccatttaaaccatcttttttattgttcttattggggttcttaactattaattaattattcttttagttgtgttgttggcatattttatggcaaattggactgtttgttaaaaaaatatgggtatttttgaaaaatactaaaaaaatacgaataaattctattttaaatcttgtgttttataagttactgattagatttttgctttgttaaatgacaaattagatctcatattttttttaaattaatactaaataatattcgtgattttttcatcaaaataaaatttaataataagtaaatctagaagtattatgacaaaagttgttatattttctatatgtgttcatgctagttaagaattatcttcaagttagttatatttaaaaaaaaaatattaaaaattgaatt

SEQ ID NO: 386666 - DNA, 2565 bp, Cannabis indica
ttgattttatttaattcgagtttcgagactgggtcctaggtcgggaccgggggcggatccaagtctgaggcaaggttcgggttcgatttccaaggattaagttagggtcggattccaaggtctaagtattgattaaaaaaactatttaaaaaaaattaaaagtgattttttaaaaataaataaataaattctaaattaaaaaattaaaaaagtaaaaataattttatagaatatgattttggaatatatttttacttttctaattttaaaaacaaaaaaaaatgattaaaatattgttaacaaacgcacccttagtaacttatttttttattttttttatttatttatttatttttttttgatttatttgtatcgcatgtctttaaactatacatgttttggcaagttggtcctcaaatttattttttgacaaattggttttcaaactatataagtttttgcaagttgtttcccaaattttatattttgataaattagttctcaaactttatttctttagcaacattaagtccccactattaattagattttgatatttttattatttattttacatattttaatttattgtttatgttaaattcaaataattttatttttttaattttaatactttgataaaaaataattatattaatattaatattttaacatttcaatttattatattcatatatattaataataagaaaaaagagtataaacattagcggacacatataatggctaaagagaattctagcccccttacatttttacattttgttgttgatttataaatatttttaataattctttaattttatatatttatatatatatatttatatttattgattatttagattttacattcaacaattgtaaaaatcttataggttcagcgcgaaatataaattaaaaataagttttaaaaatataatttattttcatatatagtttagagacctacggtacaaataaaccattttttttttcaaaaccactttattgtattaaaaaaattaaagatcactattacaggttgttgaaagggatctcttccataataaaaaattttattatctatttgaaggcgtgcttaacctattcatgagctataatattaaaatttacttcaaaaaataagagacatacatcaagaaagctagagatttaatgtactagaaaaaacacctaactcattgtgatacactgaattattactcatactacaagaaatgtgacttttatcagtgcattattacaccgacaaatttttatcggtgaataaatccgcaggtaaaagctatctgcaaatcttggtcgataagagacctaatgctagagcaattcccctttgcaccggcaaaaatagcttttactgacactattatgcgttggaagaaaattatacaccggtgtaaattatggtccctgaactgctattcaatggcgaaaataactttcgtcgatgcattaatgtgcgaacaagatttttgcatattttacctttgcacgccatttggattttggtgcatatgacctgcaccggcaaaatgtgtcggtaaaaggttagtttaggtttaggttttagtttagcataatttttgtcggcccaaaaatgtgtcggcaaaacttttgcacgccattttgattttggagtaaatgacatttaccggcacataaatgcactgtaaatcttttgctttaattttttttaatttattatatctcaataatttaatataatattgtaattatttttaaatataaaattaaactttaaacaaacataaattaaaaaaaaaatgatactatcacatttataattaaaaagtaattctgatcgaactaatatataaacatgcttcatttgtattaaaattaataagtaatcaaaagttttaaagttattagtaaaaaagaaaataagtaaaaaatgttcagaaaaagaaaaaaaaacctcaagttctaaagttaatcataaaatatatatatatattgttctaaagatgagtaatgtcatcgtcattgttgttctgagtctttagacgatacaatgatgatttagttttaggaggagtggggaatggcggaagatctataggaggtatatggtatattaaaccaggcacaactcaagagagatactcaaatggatcttggaatcacttgttgaagaattattgtatttcatactactacttcaaatactaagattcttgatgtgcctcctctacttttttctgtaaggcctcatactgttccatagtaacagtttgtgaggcagaagaagtcgtggcaggtgctcttttggccataacaacctttaatcttgaaagatggccaaagcctctcaaatgtcaaaatcgctcacccagtacttgtgtatcaccctgggagctctggtgttgtttgttaagaagaaagatggatctcttcgcatgtgtattgattactaagaactaaacaagttgataatcaagagtaagtaccctctacctaggatgatttgttcgatcagcttcaagaaatacactcttttctaagattgatcttcgc

SEQ ID NO: 386667 - DNA, 1560 bp, Cannabis indica
tttttttgtttctttttgtttttggatgattcttttaactcattctttctttctatatttattccattagaattgtctactttcattgtgactgtgctcactgtagccgtacttatgcttggtttacttcccaagccagtcttcaacagcttcatttcagtccttgcttccgcttttcgcacaaagacttgtgttctttcattaaactcgttaatattcctcatagggcgaccctggagaacatcccataactcacctcatgttgtagatcagtcagttgtgattcctgcttgaagtgttgttagttttataatatcattcaggtttgtgactttggcagcagttgaacggaagtgactcatgtacgctttaagagattccctaggttgttgttttatgttggtcaaagatgatgcttcgagtcgacggtctcttaaagcctaaaactaatttttaaagtctctcgacaactattctcaggatgttatggaatgatttatgaatttatcaaatcaactactcgtggcccctattaaggaggttggaaataaaatgcagcgcaagatctttgaaacattacttgctcgcataatggtattaaaattatttaaatgagcaaccaagtatatggttccatcatattacgagacatgtaggttcttaaatccttaaggaaattttgaatttaagatattgggatgaaatggctcagtttcttcgtctgagtcgtaacctggcaacttgccatattttccatgttgatattttctgaatttatcctctaattgaattactcgtaattgggtgggatccactggctattgatttgcatttttattaagttgattatgcaaattaagtgcatttcaatttaggtgcttgcgaaggtcaggctgctttcaatttaatctcttgcgtaaattaggtttgcgatgcctttgttcatagttacttataaatctagttttagagtagctctcagactaatatctacatgaattacttatgctttccttgttagcatagtaacgcagagatctacaaccatctcacttttgtctacttgacctactatgcccgcaagatcgcgattgtcctgtgcttgagcttccttcatctcgtgtgggtcctcttctttagaagagattagacacatgttctctactcaagtacgtgtggacattttctctatccatgcaagaaggacattgaggatgtctcaaaggaagccacttgaccttgcttgatttccagggtttctctcattattacgaggaaatatctaattccttagtcgaggctacctcgcctcttcaatcatgcaagatgattttggcatgctagttcgttgattcccttagttagaaaatccatgggaagtttgtggaacatctcgtcaatgtttttcattccttgcattgttaggatttggttgatttgctctatctatttggacatcccttgtattctctggtcctggagccttgaggtcttccttgtggtctccttacagtaggatcaggttggttttgaggaactgtcccatgtgtagccctggct

SEQ ID NO: 386668 - DNA, 1022 bp, Cannabis indica
aaaaaaaataataatttattaggttagggggtaatatctaagattatatatttgtttaattatatgctcctttttcttaggtatggtgtggataagttgagttggggacagtactttgatttttttgttttgttgtgcactatgtgagaaaactcatttttgcatatgttccaaatcctgccaatccaattataataaaaatagatttataaatagatagatatacagcaccaaaaaaaaagaaaagaaagtttacatcttatccaatctttcaagtggggttggtcatagattgttccaaaccgcaggaattggcttagcggcggttaattccaaggttagaccatgttcagttttgggttcactaaaattttgaggatgttaaatagagaaaataatatatttttttttaataaatggagaatggctaaaaatcatgcgcagtttcctaaacgagctttaatagtttgttttgactgaaactgtaatcaaaatttaagtcagaatgttagatatcattttttttaaaatatataaaacttttttttattattgtgtacttatttggagaaaattatgattaatagtacaaatcgaaaacaacaatcaaataaaaataggggcgaacaaaataataaaaaccaaaatatagaagttaaacaaatttaacaccaagatatatatactgttttaagtcctatagatcgatgtgatttataactttactccagttctcgaacactaccgaaatccttttttattgattgggcaagaatataagtacaatagattcactgtagagtactcttcactaagtgttttaactcccccacttacacctaaatatcttcttcatttacagaagatgcctcttacaaaacttaaactcaatctctctcttttctctgcagtacctttccctttacctcttaatctcgtgaattcttccttcctcaaaataactcgtcagggttgtctttatagctttaggatcaagatcttaaagtcagtggctgcaagaa

SEQ ID NO: 386669 - DNA, 636 bp, Cannabis indica
ccttgtgtgtatccctagttgcaatctaaaaaaaatatcaaccacagaaaaattgaattttatgtatttatttatgacgtaaaaataaaaaaaaattattaaaattaatagtacttaacataatttaatataataattttggtaaaatatttttgtagtctccaaaataaaattgagtagtttaatgcaatttgataataagtgagatacgtgtggcatgagtgttgctgctgagtattttgttagtgtgtgaagtgggctgatattattattggaaaagaaaatgtgatatcactgaatccctcccactatggacctggtcttcttgaatttcccacttcaaacaacttgaccaaagtactattaattaaaataaataaacaaataaagcagtccccaccaaataacaggtccactttgtatactagatctggttccaaaaatataaaataaaaaaaaaaatttagaaagaacaaaatatgtatatattgtaagagtttgtttggtacactctataagaattgtaacatattaaataataaataatattatgtttagataaaataatatgttgtattaattattacgagcaaaatttttaatacaatgtatggggttcgtttggtatgtcgtatt

SEQ ID NO: 386670 - DNA, 3349 bp, Cannabis indica
attatctaaaaatatatttatttttagcattacttttatctgtctttattgctcaaactcaacaattttttatcactcttttggttggatagaataacatcaatcatataatgcaaaagtaaagattttttttttatttggatagaaaaattaagcatgaaatacaattttttctaacaatactcattcatagataatacccattaggagtgcactaatgtcttaatagatacatcaaatgtgtaactatgataattacatttatttttagatattagatgacaattgaatagttataattaatttaaaaataaactaaaaataaataataaataacgtgtaatttgatagtttattttcttagaaaattttatttaagattaattttattttaaaattaaattagttataagtattattaatttttttaatttattattaaataaaaatcttttagtaattaatttttctaattaaattattaaaatatattttttttttgtaaattagaaatttcattgctctaacaaactttcaatacaatcaaaagactataaaaggtctgtaaaatgtctatacaattgtacctacatgctaattacaaagaatcaaaccactcataatctatttgagctactgttttaggcatcacacaagtgatcctagtttttacttgccacttcacttcttgaatcatctgctgcatttgagtattgtttccctgccataaaatgcagttcctggttttccaaatatgatagactaaagctgcagtagcagccgcatatacagccttcctgaacttggatttcttggctctatttatccatctaatgatctcctgcagtgatatggttgtagctccccagccaagccatgccttaacttgttcgagacactccttagagaatttgcagtagaagtataaatgctcggctgtttcatcagattcattgcagagaatacattgtgcatctgttgcaatctaaaatttgactagtcttcgcctggtttttaacctgtcttgcacagctagccaaagcaaaaagctatgctttggtatgttcatcctcgaccacacctgtttactccagtgacaaacttggtttcctactgtcatatgattgtatacatcagatattttgtaatttccagcagcaaactgacttgtgttgatttgatctttccattcatttttgagctcaactagtttcttccaataccaactgctttgaataggggcctcgtactcccaccaagagtctttgttgatatagacattatgcacccattttacccacaagttgtctttctttgatgcaattgcccatatatttttaataacagcagctttgttccattcatgtatgctcatgaaacctataccaccagatttctttggcttgcatatgtttttccatgcaatattcccagcacctgccataacactttgccctttccccaaaaaacttctgcatatggcttcaatatcagcaactactcttttggggagaatcataacttgactccaataagcatggatattgagaagaactgaattaatcagaacaaccctcccagcatatgatagatttctagtgctccaaaccttaattcgggcaatcatcttgtccactaacaacttgcattcctccttagaaatcctttttgcacaaattgggagaccaagatatttgaatggaaggtcttctctagtgaagccagacatgtcaaccactcttttaatttcattttcctccatgccagtgcagtaaatggttgatttagacttatttgggaccaatccagaggaatttgaaaacaaattcaggccttgaagcattcggtagatgcttttaaaatcacccctgcagaataatagtacatcatccgcaaaactgagatgatttagtttgagttcgttgcatctttcatgaaaaaagaaatcttgtttttcaccaactttgctcatgattctactaagatactccattcccagaacaaagagcaacagagacatcgggtctccttgtcttagccctctgcttgtttgaaaatagccattcatagaaccattaaacatgagtgagaatcttggtgttggatgcaagtcatgacaatagctataaactgtggcgagaatttaaaagcaaccagaacttcctccagaaattcccaactcatggtatcataggccttttgaagatctaatttgatcatacaattggccttggctgatttcctcccatagtgccttatgagaccttgacaaatcataatattatgggcaataaacctcccttgaatgaatccaccttggtttgaggcaaccaaatctagcagtatactttttagcctgctacatatgagcttagtagcaaccttataaagtacattgcaacaagcaattggacgataatcacttaccaaattcgggcacttactcttggggataagagtaaggactgtagagttgatttctttagtaattggctagaatgaaggaagtctatgattgcatcagcaacatcatctcccacaagctcctaattgtcttgataaaaatagctgctgtaaccatctggacatggagctttgcctcctggaatgctaaaaatttcctgtttcacatcttcctttgtgtatttagctaacagtatgtctgcatgtgtattagtaatggtgtcaccactctccattattttggttgatacctgtgttctcccctccatgctagaacccaataggctttgataatagtgaagaaaagttgctgttataccaatagaatcttcgactcgaactccttctacattaaccacttataagatcttgttctggttccttctttcacgaatactgatttggaaaagagcaaaattttcatctccatcctttatccatgccattctcgatttcagatgcaagaacgaacaatagtttttgtgtacatcagcatatagcttcttggaatcagcctcctgctcctgtaaaactttactcaatggatccttttgaagtgtagtttgacaatcgattaggtcttgcctggctttagcatctgctgcttgaatttcagaaaaatagcacctgtttagctctttaaatgcatatttaagagcttttaccttggtaacaacctggtacatttttgtgccttgcacatgttgattccaaattgctgagataatctgctgaaagttaggatgggaagaccacatcctaaaatacttgaagggcttccttccactctccaaagcagggtgtatagaaaccactgcatgtgtgtgatcaaataagccttctgtgagaaagatagcttctgcagttggcaataattccatccagg

SEQ ID NO: 386671 - DNA, 1289 bp, Cannabis indica
aaataaaagaaaaattaggcaatattttccttttgaggctgctgagtcatttattttaatttttcaaggctgcctagtgcctatgcttagaaacgtatgggtttcatttattaaaaacacatgtaagggtcttgctttttctggtgacataaaataaaaataaaaataaagttaaattaattaataaataaatgtgcttcaaaccttccaaagtcggctatatatattttgtatgttttaattttcttatttggttgttaatatttaaaacactatttatattaaactatatgttaattttttggggacatattttgctaaaattattgtaagagtgagaattgacatatattatgtattttcttcttttggtgtgtgcatgaatgtgaatttgattaaatagtacatatgaaaaagatgttttaccccatgaatattcttgtatgaattcaaatgaaaaattaggttgccctacaagctaacacaatgggaaacatagagttttagggttaaaatttgagcttgggaagtctaagctaggctagctaggttttgaccaaaaatatcttaatgtgaatttattgagattgacgtgaaagatgtatattcattgttttctagagacttgtgtaaactaatgagttgatgagattaacatagtaaatattggaccattcttattgagtattagtagtgtttaacactttatagtgttctataattagttagttaattagtaatattttttaaaaattattttattaaattatatgggagccgatagttaattatactaatagtggtatgatactgaaaaaagtatgaggtaccaatactacttttagtaattctctaaatattgttatatattatggtgcctaatataatcacgatatgacactttgtcaatagttattattttttataagaattataaattaaaatttattagacttaaataattaattacactaaaatattattgaacactataaaatctttgagtattcttttaattttaaccataattaattttaaagagcattgttattaaatattagtggtgtttaacacttactaaatgtattgtcttacaattagttagcgatactctataaaagttattgtattgagaactgatacttaattaaatcaatattaatattgacacataagaatatattagacactactagtaccttttaacattttctaattttaaatgtggtatcgtacactttcttatgtatgaatgagactttcttctgtatgaatgagactttcttctg

SEQ ID NO: 386672 - DNA, 1667 bp, Cannabis indica
acaaggcagacaacagctatggaagggaatgcaagatttttctaaactgatccttggatagtactaggagatttcaatgacatactcaacaaggatgagcgtataggtgaaagagtaaggcatagcagttcgactgcattcactaattgtgtttcctattgtcaacttgaagatatcagatactcgggaagcttcttcacctggaacaataaacagcgtgctgaagatagaatttactccaagattgacagagttctagctaacaaagtttggatagaactttttctgactgcagaagctattttccttacagaaggcttgttcgatcatacaccagcagtggtatccattcatcctactttaccgagtggaaggaagccctttaaatattttaggatgtggtcctcccatcctagctttcagcagatattgtccacagtttagagtcaaaaatttcagggcactaaaatgtatcagattattgctaagttgaaagcacttaaacctgcccttaaagaacttaacagatgccatttttcagatatacaagcagcagatttcaaagcaaagcaagatttagatgaatctcaaactcagcttcaaaaagacccgttgaacagtgagttacaagaacaggaagctacagcaaggaaggtttatgctgaaattcacaaaaactactgctcttttctgcagcagaaggctagaatggcatggataaaagaaggagacgaaaactctgcactttttcacttcagcatccgtgagagaaggcaccaaaacaagattttatcagtgattaatgcagatggtattcgagtggaggattctcagggtattacaacagcctttcttgcctattatcagcaattgttgggttcaagcatagagggaaggacaaaagtttcaactaaagtaatgaagaatgggccgatcatcaatgatacacacaaagagattctcttagctcagtttacaagagaagatgtgaagaaggcagtttttggcataccaggaggcaaggccccaggcccagacggatatagcagcttcttttatcaagacaattgggatcttgtgggtgatgaaatctctgatgtaatactagacttccttcactccgggattctactaaaagagatcaactctacagttattactcttatccctaagagtaaatgcccaaatctggtaagtgattatcgcccaattgcctgctgcaatgttctttataaagttgctactaaaattatctgcaacagacttaaaagtatactgccagatttagtagcttcaaatcaaggcggtttcattcaagggagattcatcgctcataatatcatgatttgtcaagacctcataaggcactatggaaggaaatcaaacaaggccaattgtatgattaaattggatcttcaaaaggcatatgacaccatgagttgggaatttcttcaagaagttttaacagcattcaacttcccaccaaagtttatagctattgtcatgacttgtgtcacatcacctagattttcacttatgttcaatggctctatgaatggctacttccaagcaagaaggggactaagacaaggagacccaatgtctcccttgctctttgtccttggaatggagtaccttagtagaatcatgaagagtgtaggtgaaaa

SEQ ID NO: 386673 - DNA, 1290 bp, Cannabis indica
agaaatgctcaaaaacaatgtacaatctactagtcaacttaaaacctaaaacattcacacacatggagaagtggatacctacacacaaaaatcaaattgatgattctctctcatagaaacagattacttaattagggtcaccttaagtcattcttagaagtctagaaatcaaaaaggggaaaaaaccaatgtgattcacagttcacattagtggtaacacaaagaaaatgtgtaaaatttcttagttttaaagacccaaatacccataacccactgaaaccaccctaagccacaccattggttgcaaaataccctagcttccaggaggaagatactccaacttcctatgacatccttgaccatagaacccttgtgaacgagcaatgaatagaatatggccattgaattcagtatattttgcacagaacaggccagttcaaaaaatcatgtcaaaaaggttttcttactaacataaaaggcatgtacaaccatgccgaaactacttataatacatcaagattaatttaagcttatcatgccttgcattaaaatacagtgtgaaatcatgccggaaaaacttatctgaaaaaatgaggttttgaaagtctaacttaatttaccacacattacctttcccaactggttcttccttgagatcctcgtaaaagattctttgcatctctagtagtatttcttcacaatcaccttgataagcctcatgaagaccatcatattcccacaacgtatcatccatgtcacatttagaggttgacttttttatattgttatctgatgaagagtccttcaattttttcaattcatccgaaactatattctgaaaagcagggatcaaactcaaaccctgcaaagagaaagatacgagatgatttgaaggccatgagacaaataattatacctaaaaaaagtaaaaatgccaaatagagtgaaaaatacgataaaagtcataaaaaaattatagaattagatctttatgatcaccctcacagtgaaaaacatatcatagctcgcaagtagatttagcaaaatataaatcacgttactaagtgtgatgtatacattcataaaaacgcataatatagcaatacaaagaattgacaacagaagaaagaataaacacaatgaaagtacaacatctagacctatcagttagttaaaattggaaaaagagaagacggtagtcagtaggatacagtaaaagtaatataaactactttagaccacaagctagaaaatccaaagatacttttaggttataagacttaatagttt

SEQ ID NO: 386674 - DNA, 1149 bp, Cannabis indica
tcagatattgaagtcccccaagaacacttctaaagaaagtgggctgatcgaacaatttactatcattggcactaagtttgtcaccaactgagataggagttgggctgtcatgagagagtagcatgttggtcttggtgagtaaatcagtagtgtatttgccttgtgagagatgaataccatacgcccctctagtgatttcgaacccaagaaaatagttgaccgaaccaagtgttttgagggagaaaaactgttgtagttgagagatgattgtgcggactgtggaattgttgttgccagtgagcagtatatcgtcaacatagacgataagatagagttcagcacctgcatttttataataaaacagtgaggaatctgagatggaattgcagaaaccaatagagagaagcacagatttgaggcgatcaaaccacgcccgaggggcctgccgaagtccgtataaggccttttgtaatttacacacatatgaggggtgtgtggagctaacataaccaaagggttgctccatgtatacatcttcagtgagaactccattgagaaaagcattgtcgatgtcgacttgctgaatgtcccaattatttgtggcagcgagagcaagaatgatgcgaatagtggcactttttacaactgggctaaaggtttcgaagaagtcaataccaggttgctgttggaaacctttagcaacgagccgagctttgaggcgttgcacagtcccatctcgattaagtttcactcgaaaaatccatctattatcaaccacactcatacctggttgtcgaggcacaagaacccaagtgttattctttcgcagagcaaagacttcggtgtccatagcagctttccagcgaggattttgaattgcagtgagagcactatcgggttcaaactcagtcataaaggccatgggagatgggaagaaagcattgaacacacgaggtttacggataccggctttagcccgtgtgatcataggatgggatggttgttgtggcataggaagagaggagggtgaagtcgaattgggttgggggagggaattgatgaacgtggctgagtaagaggtgatattggaagctgcatatgtaggggagtagtggagtatgagtgtgatgatttgtttgacattggtgt

SEQ ID NO: 386675 - DNA, 1416 bp, Cannabis indica
catagctctttttcctactctgaaaggaaagtattctagccttgatcttttctatagccttattggttcgttgcactgattctggacctaaatattttctttctccagtttcatcccagtgagttagagatctacacttcccgccatacaacatctaatatggagccatccctatggtactctgatagttgttgttgtatgaaaattctatcaatggtagctacttcttccaggagccttcaaaatctattacgtaggccggcaacatatcttcaagcatatgcattgtcctctcagactgtccatcagtctgagggtgaaaatctttactaaatttttaatttggtacctatggctcgctcgggactttgccaaaattttgaaattttgaggtaaattttggatctctatccgatataatggaattcagagccccatgtaacctcactagtcttttacatataactctacatactgatctactgtaaatgttgttttcaccgtagaaaatgtgcagacttagtaaataaatccactaaaacccaaatataattgtacatccccgtggatctaggtaattcaaccccgagatcttcccacttccactaaggaagagttagagaatgcaacaatccttcaggtctctgatgttcagccttaatctactgacaagtcaagcaacgagatacaaattctaccacatttttcttcatttcgcaccactagtagaatggtttttaaatcctgatatattttggtagtgctaggattcagttaataaggagtggtatgagcttctttgagaatttcatttttaagttccatactacttggaacacaaactcttgttctacacaacaacaccccattactcgacactgtaaaatcttcaactttactagctaaaacttattgtcggatcttcaccaattctggatcagttaactttggagctttaattctgtctaatatatccaattgtaatgtcaaattattatgtttgcctactacaaactcaatacccgatctaaccatatcatttgctaggtaaggtgaaatcttaatcagactagttacttgtctgggcccctttttgctcagggaatctaccaccacattatcttttccgagatggtaaaagattttacaattatgattcttaaccaactcgaaccaacgtctctgtctcacattcaaatcattctgagtaaagaaatatttgaggctcttgtggtctgtataaatctcacacttttctccgaagagatatgtcgcaaaattttcaaagcaacaactactgtgacaatttctagatcgttcgttggctattgttgctcatgttcctttaactgatgggaggcataagcaatggcccgattggcttgtataaaaacacaccccaaaccctgtttggat

SEQ ID NO: 386676 - DNA, 1163 bp, Cannabis indica
gttggcacaattactgaagccaaccttgccagcctattgaactgagttttatactcagtaacgatcatattttctttttgagtcagttgagtaaactcttttctcttcacacttttgactgtctcgttttaatactttgtattgaataattcttggaactcttccgaggtaatggtagtaacatcccaagtcagagccaccctaacccacaagactaaggtatcctcctaaaattggaatgtgacacaagccactttgtcatttctagtgaatcctataaaattcagaatctgtgtaataacagttagccactactcggctctcatgacgtctgggcctcctagaaatactagtggcatctgcttacagaaccttccgtacagttgttctatcctgttcttaacagcaaccaaccctgtctacctcaaatgcatgatatccttgtcttgttcatgggttctatcttgcatagccacaaacctatttcccaacctaggtaacctgcggtcggttgacatctccccgattgcatgctctgcctcttgggcctctatctcaaccacgtctatttgtgggaaactgactccctaatcgccagtgcacctgaccaagttaccctagcttctcatattctgcctgacgttcattctaatataatagcctgcaaaataaaaaactaggcttatcagatcacggttaagaataacttaactaattatagattattttaaaaactaaatcgtgcacctattcaactatcacgctactaacatgcatcctatcacgctaatggtttttttaaccggttaattttgtagtgatcttatatgttttttgtttgtttgttaacttgtttgtcgttgtatctattatatagaactagtttttttttttattgattatgtttgtcggtacatctttaaatataaccggttaaattttctttgattactttcttttggtgcatgttgaatataactagtttcattattgttgtaatttttttaaggcaattttatgttatgaaaattttcatttttattcaaaagcaatgttgttcgaagatatagttcatgttaaaaaaatattgaaatcatttttggaacatacaaaatctaatatagtatttttttttattgtaattgtatctttgtattcaataa

SEQ ID NO: 386677 - DNA, 2061 bp, Cannabis indica
ttaaccatagtgcttccttgatcacttcttttaaggccatatattcagcttcagttgttgacagtgtcagaaccgtctaaaggttcaatttccatctaatagctatcccaaacatagtaaacccatattcggtcaaagacttccaagtatcaatacaccctgcataatcagagtccacgcaaccattgataacatccaattcttccttccagttattcatgccaaatattagctcctttctgggatttcccatgaatctacttaccatgctcagtgcaaacgctatgtccgctcttgtacataccatgacgtacatcaaggagctaacagaactagcatatggaactcttgacatctctgtcttcttagtatcatcttccagcatctgagtagcacttagtttgaagtgttgaacaagcagagtacttactgccttagagttactcattttaaaggtatctagaaattttttgatgtagctcgtctgattcaagtacaatagttttttctatctttcccttcttatatccatgcctaagatcttactagccgaacccaaatccttcatttcaaactccgtttttagctgaagcttcaagtgcttgatctcttgtacactcttgctggcgatcagaatatcatctacgtacagcaacagatacaaagtatctccatttctctctaaaaactatatacaaggatcaaacttacttctctttagatctatcttggtcacataatcatcaagccatacagggacttccgtaacaagcacacccagtgttcctttccagcctcttcaaatccttcaagttgtttcattagaattctttcattcatatgtccataaatgaaggcagtcttgacatctaattgttctagttcgaggtcttgacacgcaataaatgccaacaaaattctaatcgatttgtacttaacaatcgaagaaaaaacgtcattatagtcgactctttcaatctgagagaatcccttcacaaccaaccttgttttataccgtgcctcttgtacacctcgaatgccttcttaccatttatacacacatttgcatatgatgactttaccatcttccgcacggtattacatcccaagtctagttcttcttcaacgagtgcatatctcttgtgatatagctccattccatttcttgcgatctttgcttttcattgcttgtgcatagctagtaggctcttcatgcacaatctgattagcaacatggaatgtgaatgcaattaaatcagcatgttcgtatctatctagagcctttacttctctctgtattctgtctcttgccagtttatagctcttcaaattattgattctgaatcatcacttctgtgatctacaaatatttcagtctccacccttcctgaggctccaccttaagctcagttcccagagcttcaatttcttctcagtcaatattggcttgacttccagcagatttgtcaatgaatcccataacagattcattaaaggtcacatccctactaattatagattttcttattctgggctccagacaccacagtctataaccttttactccttttggataccccaagaaaatacactaaaaggctcttgccccaagtttgtcttgcctaatgtgtccataacagacacatctgaataccttcaagtgttcataactttttggctttcctgaccacacctcatccggcatcttgaaatctagtgctattgacggacatttgtttatcaaataagctgtagtggacacacctcttccatcatcttgaatgaatatagggcctatttcaaatataatctattcaccaatgatttagtcatatacagactttcaagtttccaccacacacttgtggctgtatctttttttgcaacctttctcataaccttatctctaagatataaaatgatcacactatgagcctttgtaagaatctctttcttgtctttttcagacatcaaatcaggaagaggcttttctcctagaagatcctcatacaacccttgatgaagcaacaacgccttcatcttcattctccataatccaaa

SEQ ID NO: 386678 - DNA, 826 bp, Cannabis indica
ctgtactgataaaattagagaaatatttaaaacctctattgcaactagcactgcaatcactttagaaatccaaaccgttaatttttttttaaaaaaaagttttaaaaattataaagacatacttacacaaatattggctttaatatacgtaaatttttgataactcttttttataaaaaattattatatgcacagcattttccaaatttctatatttattttattttaaaaaattattatcatctatttttaacatataatcatttcttatttatatgaatttattttaaaattgtgtaacacgtctgagactacaatccttctaaaaaaaccaagtttttctcattataataaaggtaataacctctcaaaataacgtgaaaaataaaatgttggctatgataaccatattggacaataacaaataaggcctcatttaatataataaatatatttgtatatttattaatttattatcgtagctcttgtaaaacactagatattctgtcacttggattttgttctcttaaaaatatatgagaatatatatagcccatattcttcataaatattctccataaataccttataaataaagactaaataatataaaatattatggataattacaaaactttcttggcttagatatataacccacacccactttttaaagttcaatttattccccataaatgtatgtagttttttttttaaatggataaatggatgtagtttacaataacaaaaatttacactaaaaaaaaaattgccactaaaaataatttgttagactataatatagtgtatgtaatatagcatatac

SEQ ID NO: 386679 - DNA, 758 bp, Cannabis indica
atgtaaaatatataataaaaatgcggtggtttggtaatgtattttaaaggataaagtggagaaataagtgctactcggaataaatgaactaaaatagctcaatctttaaattatagagaaaaagttacaaaattgaactttccaacgagtgaagtaaaccttaactattttacatattttttagctcaatgaattaatagtgattaactaaatgtagtaataattattcattgagctaaatatattttaatattatgttcttatatgtttgtgtaatattatatgaactatttacataaaatgaataaaatatattaaaaatataatatttaaattaaataaaactgatatatggtataatgtgaaaatttgaggtaaaataaataaagtgaaattttaataatatattttaaagaataaaatagaaaaattattgaaaatgctctaaatttttcagctaaattagaagttttaaaaaatttgaagttttagatattttatgtacattgatgtgggtgttctaaccattaaattttagctttaagctattatacttcagctgatgtagctaggtttggtttgaaagcaatagctttcaaattatctacataaaaaactaggcttgagttgggatgaattaatattaatctataatcttgtaaattgtcaaattatctacaatatagaatctatgatcacatttaaaatttattaaatagactacactatagagtatatgtgttcaagtaatagtgttt

SEQ ID NO: 386680 - DNA, 1461 bp, Cannabis indica
ataaaaaaacaaaactataggaaatctattagaaccaattagtctgtttggctataggtttattgttatcccttcttgattatatatctattcgagtataaaggttttaccctacgtgtaccatatatatatatataataatattgtaagaactgaccataatatcaaactcatattttctttcacttagtaataaagaaattttctttctctttcctaagatagtatcaaacgacttctgttagaccaaattcactttttacggattaccaccatggttcttgctgttcttctcgaatcatcactgtcttctttgtccgagtctatggtgcgcactcgcagaggtcttcctcctcagtctcccactgccagttctcatagttttcttggctcaagatcaaactccgattcatccatggtagcaggcttgggttctatatccccgaccttcttgctcctacgacttcttcttagctcgacgacaccactgttcccgtggttctttccagcgaacaagattggacctgcaccaccaatcttgtggttcgcctggttgttcatgatcaacctccactgagcgatcaagatttgaatcctctaccttctattcatagagattcagctggagccttctattcccaacattcgatcggagctctgcccgtcactgctggtggcttctctctttgtgaccttgactacgtcactaagcaagccaattgagccaacataaataatgctcctccaatccacgatgcaagtcatcgtccaactcattttcgcaatgaatacaatccctacttcgttagcttaagtgaacatccgtgtctcatacttgtcattccaccactttcaaataataatttttagtaatggcgtagggatttcaaccttgctcttggccctacgaataaaaccaaattcattgacggtactttttcgcaactagtgcctataagtcctctgtttcattcttagattcgatgtaaccagttggtgatgtcttggatcatccatcgtgtttctcttaacatcaagataagtatcatgtttctcgacattaccgtggatatgtggactgagctcactaatagaattagccaaggcaatacacctcgcctctttaagcttaatgaatctctcactgatctacgctaaggcgatgattccgtcacagcttacttcaccaaacttcagggcatttgggataagattaacaagctgcgacctttcattccttacacttgtcaagcctttatcgacaacttgaaattttagaattaagagaaggtcctttgttttttcatagggcccaatgaatcgtaccacggtatccgtgcccaagtgctcatacttgagctgtttccctctcttttgaaggtctttttgttacaaattattttaccaggatcttagatctactcataagtatgtttattaacatcctaaataagaactttc

SEQ ID NO: 386681 - DNA, 1903 bp, Cannabis indica
ggtgaagtcggattgccttactgttattaatgatttgaataatgaataaaaaaaaaaagtagcttttcttatggctatattttacatgattgtaaggttttgattgaatcttaaaattatatttccttttcttttgtaaaacggactgctaataacttttcacatgctttagggtgggcttctcttgttgagggtgactgtgttctttgtggggattctttatccactttattctcttccatagttatggatgagttggttgaatgaagcttattttcttttttaaaaaaattgtggtataaacttcataaaataataataataaaatttgtgtttttgacaccttattttttttttagattttccctcgtgttttgctctcgcagctccaagctggtggccatggctaaaacgaggtccaagattcaagggaaggctagatctatggcaagaaatcgaagaagaaacaatctgaattgactcgggaagcaattttgattatggctcgatgtgaggaaaccagagttgaactgcttgaggtctcggaggaggaggagacaacggaagacgatcctactcttgtggatttattccagaaacctctgtctccaagatcatccctaaagcttatacagaggcaggaagacgttcagaaggactttcttcagtttctgcaggccagcaaccaatgtaacagtgatgtgaaacaaggtaaatccccaattcctcctattttgcgatctggtattgtgcgaaattgggaaccttcttttaaacagtctgtgagtacaaacaaagtaaaaatcactcttgatgatattgaggaagaaatttatttttggcaagcttccatagtatgttacgtgcttggtgcgaaccctccattacatgtactggagggatttgtaaacagggcatggaaggataagatagatagggtgaagatgttgtcatatggaattttcattatcagattcaattctttgaaagatagggatcagattctggagggtggctacatattcttcagccgaagacctgtcatcatgaaggcatgggatccaaatgggaattttaagaaggaagatgtaaaaaaggttccaatattggttcaacttgaagacttggatctaaaatattgggaacaaagatctttgttcaaaatagtcggtcaagtaggggagccgattatggtggataatgttacaaaagagagggaaaggttgaattatcctagagtttcttattgtagttaggacagatcaacaatttctcgatatgttagaatttgagaatgaacatggaaacaacacacatgtgggaatcaagtatgaatggaaaccgattgtttgtaataattgctacgggctggggcatttggctgatgattgtaagaagaatgccaaagtggagaagaaatgggtagtgaaggaagatcatagaccaaaacaggtggtggatgaggatggctttgttaaagttacaagaggaactaaggggaaagagcagactagaataacagaggttataagggtggaaaatactttccaagccttagacactgaactggaacatcaagtaatggcagaaaaggaagatgcagggaatgagggcaatattgggggggagatccctctctcaccaatggataagctcctatgttggaatgtccggggagccaacaatcaacaaaaacagagactaattaagcaatttattagtcaccaaaaggtttattttattgggcttctcgagacaagagtgaaggctcctaaactaggtaccttgtacgctaatgtatttgagggtggtgtttctcatccaatattgcgtggcatactggagggaagattgtaatagcatggaatcctttaagattaattgtggatattattaggtgcac

SEQ ID NO: 386682 - DNA, 1009 bp, Cannabis indica
gaaaaattattttcaaatttacattaggtatatattattaattttaaaattatgatattaaaaaaaactaaaaactaaaataaaattaaaatacgtacacgtatcatctatctagtatatatatacaacaatttctttaaacaaaataacaatttttttttttatatatacacatgcttataaatataaaataattaataaaaatatatatatttagaatgataaataatataatattatgtaaataaatataaaacatgaataataaattttaaaaaactttaaaatgaataataactcagaatatttattttatgttttagtgggttttttttaatttgattattcttcaaatacattgaaaaatctttattccaaaattaatgatgagagtgctttaattaaagttttaaaattttagaaaagaatttttgagattgcacccaatcatgcatgactgatctatagtgaaagtttgaaggagtacacataaatttaattattgataattgtgatgtgaaattaatttcatattctccaatgtatcaaagtcaatgtctatcaacctaattgcggtccaacaaaaaataaaataaaatgatatcaacttaacttgctttttggtcatgttcagccactcgctgacaaaagctttggataaccctttttaataaaatcttttggcacaataattctcatacacttaaacgacaatagtattatacaagtaaaaaaataatactaaacaaataattataataataacaacaaattaagagagatctctcttcaaatttaacttgcttgttactcaattggcagtcaatttgaatttccagtcaaaaaaatagaaagaaaaaagaaaataatctttgaacttttggtcatgaaaaaaaaatgaaaagattgtatacaatcagtttcttgactctttatacatagcggttcaaccattctttgtttaccaagtcgtttttttattttctgatcacattttgttcaggtgact

SEQ ID NO: 386683 - DNA, 622 bp, Cannabis indica
aattagaaaactgccatctcaaggatcgattggaggaagcaaatcatcataatgctgaattagagaatgaggtagctacagctagggcggcataagggaatagctcccaaaatcaacctaaccttggagaaagagaaccacgaggcagacctcgagacttgcgaaccagggggcaggaggcagcccaaaggaacccttagaatgctcaggaaagacaaccagggaaaactggggataccttgaaggcgagattccatatgatcaaccaggaaccagggaacaagaaattctccgtaggaataagggaaatcttgggacacaacctagggtacatgcatcattgttaagggatcgccaacattctttccaagctcataggaaaggagcgctcacaaatctcaatagagggaacgagacgaatcaaacccaaatgagaagagcagggcgtgaacaggcgagtattaccacaaggcgcacgataactcatagtcgatcaatgcgaggaggacggaatactggtcgcaacgatgatcaagaaagcagaatacgatctatgggttgaaaaagatccgccacccatcatggccaatcagacctacgagaacgcttgaaccagaaaaaa

SEQ ID NO: 386684 - DNA, 797 bp, Cannabis indica
ttacgtatataattaaaaaaatctcttatattttattgggttttttagtttgtattttttgtcgggttatctcgatttggtttgggcgaattatttagtttagacggtttacaaaaatttatgtacaatcctaacgaatacacatgaaaattgatatgaacttttattagatcatattgcaattgctttagaacatataaaaaagaaaggatataaatgactttcggataaaataggtatgagcagcggaaggtaattttctcaaggtgcaagctcaatccatacagaactaaaacactaaaggattgtttggtacaattgtattgggttgttgtattgtgtagtattgatttaaaacaatagtatctttgcaattgacttgtattaacaagctatgtaaaattatactatttaccataaattcggcccgaccccacacctagactctgactttggtcctacactacaaactccatacccagaccttggacccgaccccaacccccgaccaggaaccagccctataccctggaccaggcccaagcccgtccctggcctcggactcgaccttggaccccaaacgcaaacctcagatctcagatgtcagaccctaaactcaaacccgaccctgatcccaaccccctacccttactatagacctcatccccaaactcagacccaaacccaatcctggattctagacctgacccgaacctcaaatgccaaaccctagactcatactctgaacctgacctcgacccctactttagactcatacaaactaatacagattattt

SEQ ID NO: 386685 - DNA, 1437 bp, Cannabis indica
gggcacaaaacccaacaaccatcaccagttgcaactcctataagaactggttatgtgctttgttaatatggattaaaagcctaactaaatcggcttaagtcgagctattcaaatagtattattatatatttgaagtatagatgagatcacacatgtttttgcactatttttgataatttttataccttttacggtttatgtgctttttatggcatttgtgccattttttatgatttgtctctatttgtttagggtagttttgtgttatggtcaatgggcaagagaagtgattcattttgtgctcatgatttctagttcagcgactttttacttttaacagataagtatttcaagtctttttaagttctcatatttaagatagattgatttaccatcgttctttgacattatatttattttttttattatattgtgtggtaatagaattttattttgttgttttgtaggttgttttgtcgagggcttacacttacagagaatttaccaataagtttttttaaatataatctgtttgatattgattttcagcagttttaaattagggtgcttgtttgttgttactggccaaagggtaatacctttggctagttatacttagaatttatattggttttttaattttttagtaatgttaagctagtgatatgggttgtgtgttaaattataagtttgttttttaatttttattttgaagattgtgattctaatgtaactatattttttggtttagtgttgtgatgttttttcaattttgctagctctggcgacaacttttactaatgggaacgtgttttttcaatgtgatggggtgccgtttattgtctaaatttttagaggcagttttgtcccatgtggctcgcgattagaattttgcagctcatggtttggtaaaacatacctttcggttagacgatgagctattctgattcaataggaagctccaccgtcgattatagtttgctgctttgataattatgtgtaactttgttcaccacgttagaaaaatcgactaaagctgttattcagctcatttgtgtaattattgagtatataacaccactctccctacatcattctattcgtgatcaagagcctctttatttatcttgttttacattttacaaatttattcaacaccttatctccaaaagagcataagagtagagtatatgagtacgaaacacctcatctcataagagcataatagtacatgagcatgaaacagtactttaaccaagatagcaagatgaaacacttcatgaaatgagcataatagcaagataggaggaaaggaacacttcatatcaaaagactaagagaaaagtaaatgaagaagaacatataataagataggaagaaacaaacatttctaaaacttcatatcagaaaaccaagatagtaatatagatgaaacac

SEQ ID NO: 386686 - DNA, 601 bp, Cannabis indica
gtttatttctgaaatgttactcacgtacgtttagaaatgcaaatctcttaattaatagattttccatttatatataattaaatgttactcatgcacgtttagaaataatattataagtttaccaaacatgatctagttaagtaagcaattaatatgactagctatgaggcaattgatcaactacaatttaaaatttattagtctacaaaatggaaaattcccctataaattaagaatcaattaagtccaaaaccctttttaggttttgactaaaagtatatacatatgttccttaaaaaaaagtatatgcatggaatccatatttgcttctattctatatcaataattaaattacgatttcaaaagtgctaatgaaagggcatgaaaaacattttaattgccatggaaaatattcttggtatgtattatttttacttaaatcaaatgagggattgattaatgaatgacccattaattatatgattaaattaaattgcataatgtatctaggcaaaatacttaaaaagtaataattatttgctgccaaaataaaatcttaaagtgataatattaagataaacagggtgcacaaattaaaggc

SEQ ID NO: 386687 - DNA, 658 bp, Cannabis indica
cgtcctgcccctttatatatcgtagaaagtgtcattgcgatatgagaccttctatctcatctttaagttgaagacactctttcgtggtatgaccaatatccccatgatattcataccgcttagttggatcccttttatgcctcgcaacaagctgtaggaaatgaacatgaaaccaggcaatgagtaaccatttcaaccccctattacacctgggacaagaagaagagattcgaacatgcctttggagaagtaatccatatgtaggcagacaatttgacaataatctcaacagcatatctttaattttggaggacatttcaaggcccataatcctccataaaccaggactaatagaggagacgggtgaaggtttcaattcttgaattaaattgtatgccgacttgattgaatagacccccaaaacctcattgccccaatgctagatatctgccataattgtgggggatataggtattttataaattaatttcttgtctatattattgaacaaaaatctaaaatgacttccacatcccatgttttgccattaacatccaataaacagctcactttttgatcaaaaagagtaggatgagatgaggaaactgttgggttttatgccctaaataaaactccatttcaatgtaatctattttat

SEQ ID NO: 386688 - DNA, 928 bp, Cannabis indica
ttagtcccatcgaagtgggccgcaccagtcaatgacatttctgtttattagcttttttttctttttttccattggatgctttctctgttccattttctcatcttttttctcttatatagccaaagtgtgaactctccatatggtattcttcaccaccaagtgaacttaaccctagctaccataccacaaatctaccattttttttttatttaaacatttatatattacattgtataacttgggactcgaatccagaacctccaacacacacgcaccctcctatggcgacttgagctaacctcaagtggtatacacaaatctaccataatatacaactactaaaccccaaacgctataaatatatatttatgaaaggaaaaaaaaactaatcccatgcatcatgcatgtgaaatgtgatcgttattatataacttgtatacacgactattactcttttagtagttttagattttgccataattaattttgtaaaaataataatataactttttatgtatatagaaaaatataactgtataactaaaaatgtatagaaagtaataataataataaaaaaaaaactttgttatatacatatagtactcgtgaaagacataataattaatattgagattaattaagctagatcgagagcgatcgatctgattaatatccttaaatatgaaattttcaaagactgcaacatatatatatataggttttattatttcttgcttgtattataatataagcaatattaattctttgggctcgtttggaatgccgtattaggtcgtattgtattgtattatattgaattggattatacattatatttttatataatactatgtcaaactttaagttatattaaaatattatatatttaagtgtccataaaagttaataccacatatagttttacata

SEQ ID NO: 386689 - DNA, 1019 bp, Cannabis indica
cgccgcacactgtgaacgacgaacggtgaacagcgaccaagcaccacggatttgagttctccatcctcccaaaccccagtcatcacctcgtcttcaatctgcctttctcgccgacgatcgagatcccaggaaaccaaggttctcggcttctgtggcccctgttcgtggttgacggagtttgaagctcgtccgtggttccagttcgtggtcgcctttgaagttctatggatctcagagtcaatctaaaaaaattaacgcttttctttatctagttaaaattgtttttggatattgttgttagtagtttctagttactacacctgtaaattcaaactcatctcaaggtttttttcatgcccaaattctgaaaatttttgtttattcctatcaattttaaagtcatatatacatatatagtcatatatttattgaaaagttttttttgaaatgttatttatgaaaagatttttctttgtcaataatctgaaataatatatatatatatacacacacatgacagcatcaaccaccacaaccaacatattgaagtcccaaatcatgtcattaccagtacgaaaaagtgggtagacttgatgtcgaacatttgggtctgaaatgggagaatgagtgaattttgtagtcatattttttcattgtattttgtttatgtattttacttaaattatacttgtattttcttaatcacttattttgtattactgctactaattataatataattattttggtgtatttttttggttattaatttagatgtatttatattacttatataaaagaaatttttacatcaaaaatataaaatgataactttattacctaaataccactacacggtaaactaaacatttatatctttcatctttattttattactattttaccacatgcacactcttcccatccatcaaacatgtgtgtgactactatcaatcaatcaaccatccatcatttccctttctttttttcttctttttccttttattttccatttcttt

SEQ ID NO: 386690 - DNA, 1129 bp, Cannabis indica
gccaatggatacagattgctcttctatgttagggaactgtaaagatcaagaggtatcaagaggtacaatggttcatacgctgaatagagtggagtatttttggtttattctgaaggttctaatgttgcattgaataaaaagattattgtttggttaaaattattattttgccttatgactattactgtgataccataatattaacatcgtataggtgtattagaagtaaaattgtcgggggtggcaataagggttacgttatgcggggttgagatgaacatgataagaaattttgcaagttcaatacgacactaaatttatttgagttgtgttcatgtttgtgtgtttgtgagagatgacaatcaacaatttaatttacaacacgtcaatacaactggagaatttaaggatttgacattatacgtatcgtgttcgcatctttgttttataaatttttcatgttacaaattgtgttttgttcgtaaatttttaataaatttaaaatctttaacacaacaagaacatgaattgctactcctataaaattctcaataatgtgttatttcgtcattcaattcactaaataattatatgagtgtattctggagttaaactattggaattgcaagaagaattttcggtaagtgtaatttgaatgcagattctcatagtaatttttaaaaattaaactaatataaaaataaataaaaaaatctttaaaataggttatgaaattattatttatagtctttaaacttttaatcaagtgcacttcatccttattcttaatatttaaaataaagtaatattaaaaattagaaaattacccttaactattaaccgattcttaactcatgataagattttgatactttgataaatgatgtgtaattgaaatttatcaaacaagttgtttactccactgctctctttctccctataacatcgaaagctaaaaataattggtttgaactttaagttctgaaaacaatcaaactagttttgataacacacttcattttcttactattttggtaataagattcttgataaaagtcacaattacatgattccaaaatattatagaaataagtacatgtcaaaataggttaaacacaattaaatttta

SEQ ID NO: 386691 - DNA, 1290 bp, Cannabis indica
gctataatcatattataattgaacatatgtttatataaagaaatataatatctatttagtatcttatgtttagttatttatattttcaaatatgtttatatgatattctatgattcaaaattatacatacttttagtactttaaacatagactatattgttttttatggtgttgactttaggcttatttttatatttgacgccgttatttagtcatttctttgtgagatttgtgcaaatctattttcacttgttatttttttttttttttcgggttattgtttttttaaaccattggatgtattttttttttaccaaaaaaaaaatgaactatatgtaattaaactgaatttaaaactagcataatcaatataattgagggcaatttgattatattaataaaaatgattgtttaaatatcgcattttttttaaaaaaaaaaaatgaataattcccactaaaggtaaaaagttgaaatccaactattattaaaaaatatataatatcaagtcaatattttgataaataatacaacataccatgtatgtagtatctaataaatacaagatcaaaaagttttttagatcattaacttagttgagttggaattggatagtggaaaatgcatgagtggatatgtgacaattaaagaagtgcatataaggatatacacttgttaacaatctttagttcacttaattaagaagtacatgataatggacatgttttgttgcatttgtctatgtacatagtagtaagaaataaataaataaaaggattttgtctctaatatatatttggaaattgtatcttggttaaacttggatattaatagaaaaatcatacatgtaaagtgacactatatccacattctttaattaattggttgtggtccatgcaatatcacatacattaagatagaactatactaccaaacacttaaatataatacattattttttttgaatgaatataatacattatttttaaatacatgtataatgaattaaacttttaagatataaaatattaatacaattaaagctacataaaatttgttgtataacaataatttatgataaataattaagaaaatttgttattacagtactatgcatgaaaactatagtttaatcgttaattacatatttttaaaaatcttttattatatttttaacatatataaaagcataggtaagttttttttagaagtggtataggttaagtttatagtacactttttattctgttttggtcatttaaaaaaaataagttacattttttttattaa

SEQ ID NO: 386692 - DNA, 1990 bp, Cannabis indica
aatcgagcagtagtaatgatgcgaaaaaatggagttaactaacctgatttagcttccttgacagctggggaatgccacaagaactaggcagaccactatatacctttaacaaaggtatgaaaaggcaaatgaaaattgaacaaaaattaggaaccaaagcaaatttaagccattcttcaagtcaaaatggtaattaagggagtgcacagtacaggatgatcgcgaaagaatgtctcttcacgagaaagagcatcagcaatgctacggtttttattaatgtcctgcaatttgaaacagggaaagagcaaggcatcagcttaattaaataatgctgacaacaacaaatgaaatcaaaactcttcaaatgcacttggccataacaagagagtgaaacctcattttcaaacctgtatctcacaactactagtatatagtatatatagaagatgtaggacaacttgtggtgaccaaggtgtttgttatgcaaatctgagttgggaggagtaaagttggagggagtttagattaagggctcgtttggtaggccgtataagagccgtattgtattagataataaataacactatgtttggataaaataatgtattgtattaattatcacgacaaaattttttaatacaatgtaagttgtattatttaacacataacaaatactgtattagtttgcattataatatttacaaaggatatagggccaaccccaatctccgacccaaatctaggggcccagacacggacacaaacttggacccagaactggcacccgaacccagaacctgacctagacttggaatggaccctagatccagaccgaacccaaactagactggaccatgaatcgggactcggatcctggacatgggacctggactcggaccaggctctggacccaaatcacggacccaaacttggactagaccccggaccctggactcggatcccaaactccagaccccgaacttggacccgacctagagtcagtgttagagtcaagtttattgaaaatatattataactttacacaacctattaatataagtcaataccaaacatagtattgtattaaacaatactacaatacaatacggcgtaccctacgaactctaagagaatatgaaactctagtgttggaagggtttaacattaccatcatttaatttaaaaagatgaacccacttggaaacacaatcccatcaagtctaatccccataccaaatgccccccatctgtggaaagccacaaagatgtttgaagaaaactttttatacagtcaatagtagttcttccttcatttcacatcttaatactttcaccgagaaaaataaaaaagttacctcttggcttcgattaataacgccaatataaccaagacgaagtggaataactttcccaagcaaaaaattacgtgcattagttcctcgatccattatatcaagctacatagataaccaaacatcaacattataacaactcaagagtataatcaaaacaaatacttcagaaaaaaaaaatacaaacctttgtgattacaccaattgttcgagaacctgtttaacaatcatgtcaagcacaaaaagttagctggtagattgagtaaactcagtgaccgaaaaattcaaccccgaagcaattcccacccgttggatcagcttctctagccatttgaagtgcatcagaggtagccaaatcagaatttgcaggactaacagccagtataatacatttttcctgcctaatttgggtcattatcattttcctaacccttgcctctatatcactaggttgatctccaacagggactttagtgatgccaggtaaatcaacaagcatcatattaagtacatttggagaagaaatctttaagaaaatttgttcttctgaaactcctttgttagaccctgctcctctgtcagtctcagccttcattaatcaaataacaaaacatgtaaataacaagaacaataactag

SEQ ID NO: 386693 - DNA, 3550 bp, Cannabis indica
aaatggaagattttagggaggtgctggatacttgttctctagtccagcttccgtttgaaggggatcctttcacatggatcaaaggtagacacaatatcaaagccaccaaagagcgtttggattggtgtttcactaatgatatctggaacacctttctcaaacacttgaaaacatcacatttggactattattcctctgatcatcgggccatagcagtccacatccaatacatccatttcctgcaagaaaaaccagtaagaagaactcggttcagatttgaaaaaatctggttacaagaaccagatgttggagctatcattcgtcagcattggaacactaattcaagtggtgggattgatcagtttttgtgcaatttgcagtcatgtaccgatgctttacaggagtggcatgttgccaagtttggtaatctcaaaagccagatctcttccttgcaaaaaaatgttagtctgcttaataatgctgctcccaggaatccttcgggtatgatggaactgaaaattttttaagcaatcttagatgaattgcttgaacaagaagagaaatattggcatcaaagatcaagggtagattggcttcaatgtggtgatcaaaacaccaaattttttcatgctcatgctacatccaggcagtccaaaaattccatcaaatccttagtgaatgcccatggaatatctgtcacttccactgttgatatgaccaacactatatgttcctattatgataacctttttgcctcagatggtgttgatcaatcctctttacaggcagttctctctgctgtgcccaccacgatcacttgtgacatgaaccagtccttaactgatccttttacaagtaaagaagtgtatgatgctctctaaacaatgagtcgtgacaaaattcatggttgtgacggaatgtctgcaatgttctaccaaaattattgggatattgttggaacttcggtcactactttggttcttggaattcttaatgaaggtcatgacatgaggacactcaacaaatcaattattacactgatccccaaagtgtctaatgcgagttctatgatggactaccgccccataagtttgtgtaatgttatttacaaacttatttcaaagaccattgttctcagattcaagaaagtgttgccttatgtcatctctgaaactcaatctgcatttctatccaacaggttaattacagataacatcttaattgcttttgaactcattcaccatcttcgacacaagactcagggtagaattgggtactcggctcttaagttggacatgagtaaagcatttgacagggttgaatgggagtatctagaggcaattatgcttaagatgggttttcataattcatggacttcattgattatgagatgtatttccacgagttctttctctttctcacttaatggtgaagtggttggtaatgtgtagccttctcgggggttacgccaaggggatcctctttccccatacttatttcttatttgttcagagggactctcgtgcttattacaatcacacgaacaagctggtcagttaacaggtcttcgactaacacgcaactctccttccatgtcacatttgctatttgcggatgatagtttattattttgtcaatcgaatgaacattccgccatttctatcaataactcacttgatacatatcataaggcctcggggcaagttctcaacaatgacaaatcggttatgactttctcgccgaatacctctcaagctgcacagaatttctttgctcaaactctccatatgcctattactgaatgccatgagcgatatttgggattgccttcatactccagtcgggacaagcaggagctatttagtaatatcaaagaaaaagtttgaaaactgcttaatgcttggaatgagaagattttttctgttggtggcaaggaggtacttttaaaagctgtggttcaatccatcccaacatatacaatgagttgtttcaaacctacaaagaagttttgtgatcaattggagagcatgatggccaatttctggtggggtagcaatcaaaatggcacaaaaattcactggaaaagatggaaatctttatgtaaatccaagcatgaaggtggcatgggattccgatattttgttcattttaatcaagcactcctgaccaaacaagcatgggggatatttgatatgcccgattctctattaagtcgactcctcaagtatagatatttttccaattgttcgtttctggatgctaatattggtcactcaccttctttgacttggcaaagtatctgttggggtaaggaattgcttctcaaagggcttaggtttaagattggcaatggtagaagtgtggattgtggaactgatccttggataccaagctacactgattttaaaccagtcagcttttcaagctttatcctgatgtcagtttctagttttattacagatgagtgtgtttggaatgtctctctcttgaatagctacttccagccaattgacattgatcgaattttgtccattccgctgagtttctttgctgataatgaccgtctaatctggcaccactcaacaaatggcatttataatgtcaaatctggtttccatttagctacatctttggaagaacaacaaatctcctcaacgtctaatctgcaaagtgattggtggaaatatttttggaacttaaaattgccccctaagatcagaatttttgcttggaaagttttccaaaatattttaccaacagcggctgcattgtttaaaaggaaggttttagattctagggaatgtgctctttgtaagtcgagttgggagtcgattggtcatgctctctttgggtgaaaacatgctaaagatatttggaaacattcaaagtttcagattgattatcgccaagcaaatagcatgttcaatggtgattatttgcaccatttatcttccacatatcagcagaaagactttgaaatcttgttatgtgtgttgtgtggggtttggacagataggaacaaaattgtccacggtggggctcctcgactgccatcagtaattgtccagtatgctacttgtttctatgaagactttacacggcatcaagctcctgtaaaaacagtagctactgctagcaatcatagtgcagcaaggtatgattctgtgacagagaagcatgttcaaaagtggtcgccaccgcaggttcatggcttcaaactcaatgtggatgctgctactgatttggagcaaaaaagaatgggtatcggggcaattcttagggatcatattggcttggtggtggctgctctttccaaacatgtacaaggcagttttccatcagatgaaatggaagcgaaagagcttttccatgccattaattcggtgatgcaatcacaattgcctctcactcatatagaaaccgatgcttcttgggtttcatctgctctaaatgtcttaaccatagatttatcatgttttttggatcttattatggatgttcgttgtcttttatcctttttccctcaagttttagtaacccatgtgaaacg

SEQ ID NO: 386694 - DNA, 665 bp, Cannabis indica
tatattatatatatttataagaaatggaaagatattattcactaaaaaaaagaaatagaaagatattaattcaattattgttgaacagctgagaaagtgggattgccaagttcgccaccatatctatctctcctcaaatccaaagagaacactgttttgttgatgaacggaactagctttgcctcagggggagcaggaatttttaatggtacagacgaagtttatgtaagtcaacaatcacaatcctctctctctctctctctctcttttatatgtcattatatatatatatatatatataattgagaaaaaatatataaaaattaaaaatgcggtgagcgtggatcgaacacgcgaccttcagatcttcagtctgacgctctcccaactgagctatccccgcagatgaaatatccttaaaaataatgtatattgaacgttttatttcagagacagtcattacctcttacgaagcaagtggagtactattcgatagtacacgacaagctagtgcagcagctaggatccacaagcgcagagcaacatctctcaaaatctctattcacaattgttattgggagcaacgacctcttcggatactttggctcctccaagcttcgtaatcgaaccaccccacaagaatatgtagaagaaatgattgttac

SEQ ID NO: 386695 - DNA, 730 bp, Cannabis indica
aagaagttaatgaagattagagatttgtcaaacatgaaaacattgaatcaagctgtgaaaggaggcaaatttaaggtaatcaggttttataatacgttgatagggccagttaaagctccctattttgttattgtttggcagaagctcattgtcccaaaatatcgatttatttactggcagattttcaatgaccatctcctaaccagagatcacttaagcagattcttttcaatcccctcgaacttgtgtgtggtttgtgagaatgcccaggaatctcacaatcatttgcttatggaatgcacctttaccaagaagttggttgaaagtatagaaagttgggttggtaatcggaattggctgagcaacatttaggatctgcagcaaaagaaatggcaacaaaaaccagacctgtctgcaactgtgttgaatgcaattactgctgcaactttgtattgtgtgtggattaacagaaatagctgatattatgatcttgtttgtaaaactgtgctgtctattaaaaaagaaattaaagctagagtgttaggaggacactacgctaatgttaagacaaaagatagttatgtttacaactaattagtaggtggtagctgttcggtttatggctagttacagttccaacccaatttgctttgtattgttcggtctttttaaataaaatttttcttttttttaaaaaaagttaataaattaataaaaatacaacataaaa

SEQ ID NO: 386696 - DNA, 1840 bp, Cannabis indica
gagagagagagagaagagatgagtttcagacgtagagattgagagttagaactgagagcctaagacttagagaattaggatttgactaatgctctttatatagtagatcttacatccataatattcaaataaaaataggtcaataaagctatatttaaataattaattaataaactttaaatgactaaattatcccttgaaaatagaaaagttgctgatgttatctccctatttttgtggactgtcaaggctgaattcgctgcttaacttgctattcacaaatgaaggttgctcatcaaatgcctactaggaaaatgctcgatgtccatgcaccttccagggttcatgctgaccggctacacattgctttgaagctgaccggccacacagtgcttggaagtcggccggcctatgctggccacaaggctagctaggggtagttggccagtcccttgaggtgggtggttcatcatttcttcatccctcttaagtactcagacgcctcgtttattaaaataatgagtagatggattggccgtcttgttggtgagttgtactctcacgtggcattgatattgtccacgtggacatgcaacatcaggtgggcaaaaattgggataatattttccctccaagttcttgtgcggacgtttgtacagatagagactttattagcttagttggggctgatgtagccttaaccaggtagatctcgtagtatattgagcctttgaaatatttgatcttacttacatgatcacattccttagcaataacttaatagcaatacacttctagatgtttattgatgcatgttgcatggcaagtgagaggaggtcccacagaagctttgtaagctcatggggggactcacttctcatttcccacatttcattctctgtcttcaaaaataaaattttgaaagctcttcattctctattaaggccgacgacccctagtgctccatttcttgagatcttcatgttattttgatgattcaagcttcccatcttcttcatcaatgatttctactagtgggtaagctttcaaatcctgttcttcaatttttttatttagattttcaatgattgctttgaagcttttcttcattttgaacatttttcgattcctacattagattgtaatctttttggtattatgatccacatgatagttttagaatgcataatgtatgaattcctaatgaaaaagattcgattttgaccttcgttgtgattcttgactctttgagtcacaaagaacatgaagaacatatatgagtttttgaaaaacacacattttgatccatcacacaccctggctagccataggggtcttgttctggttgttggattctctccaatagttaggggcaatcagatgtaccccatgggtgcaatgccttagccaaagaagccatatattacttgagtgaagggtaccgaatcagttagctagagtcccatcattccatatgtttatctaaaagaatgtttgaggaggctccattgtccaacatgtatcttgtaacttttatgttcccgatttgtgcagtaatgaccaaggggtcattttgcgggaaaatgacttgagcaacatctccttctatgaaagagatagtgggttctccaagctttggtttcttggagcccctttctttgacggtcaggatatcgcttttaggctcatgacggagtgtccgagcatagcgctccctcgcctttttggtctcccctacgatgtggggtctactgataatggcctctaagtgacttgccactggaggtggcattgttggaatttattttaccaggatcttagatctactcacaagtatgtt

SEQ ID NO: 386697 - DNA, 767 bp, Cannabis indica
aaaatattttaattaaatttattataataaaggtaacaaattagaaaagaaattctaataataaaggtaattaaataataaaagtatcaaagaaaataaaacactaaataataaaatatagtttactacaaccaaatgcaataaagtaattagaaaaaatataaatatgtaaagtcaaaagcaacaattaagataaataaaaataataaaaacctaatcacctttaataacaataaaatcaacaataaataaaattaaaattaatattgatatatcaaatattaatacgaaatcaataccagatgtgtgaatctcggctgccaactccaaattccgtcatcatctcgaaattgtctcctcctggaagattgtactaaacatctccgaccaagttacacgtctctgaccaagaatagcaacacaacccataccccaaacaccaacatctcaagaatcaagccacaaaaaacaagaacaaaaaatcccaacaaaacaatcaccaaaacacatcgatagttgttaaatatcattcccaaactagatttacagataaaaagactgtagaaaaaattctcattacaagagagaataggaggattacaatcaaaatactcaaaatacaaataaaagtatttcatcaagattacatgaaatctagaaaagaagaaggataacatacaaaaagcttgaccaaggctcaaagacctttgtcctaaaagtcatttcctccctcatatggacacttagggaaactctagaaatgctct

SEQ ID NO: 386698 - DNA, 1348 bp, Cannabis indica
aaaagttacaaattcagtacccaatttttattcttctcctttgttttgcttggccaaaccccaacaattctcctcttgctttcctgctgtacccgatccacaattatcctaatttgccattgtttttggttccacaacacatcgttacgtgcaccccagatctggtatatcaaggcagccagcatggtcaacatcatgctcctccttgttgctgaaattcccttaagcttgctgatgagttgcagcagcctgtgtacatcaattgctttcgtgccccagttcagtctagacttccattcggcaaggcatttactgctgtattcacattggaaaaataagtgctggaccgactcatttgccttcccacaaagcaaacaggttggatcaacctgtggatcataccgacatactctatcctttgtcttcaacctatccaacaagacattatatatatataatttgcattaactttattatttcttttaaaacacacttttctttcaaacaagtttgcattaatatataatgataataatggtaagtttcttagctaggttttattaattactaaggtgaaatttattgattattcaatcctaaataaaaccaatatctaaaactaatgacatgcatggcaagttgaaacatgacatatattatgaagatctaactaggagttagttaagttagttgtattggttttttctgtaatttttgtaaaggcttaaccgactgtagtggcctatttaaactctcaatttcatttcacttgtaacttagaaaaacatagatagagagagagagagagagagctatgtatggtgaggagagaatacttatttagagagaaaattcgtggagttatgaagaactaaaagtgagaaacaaagggaagcaaggatcgggcttctggatgttattccaaggggttcaaggttctcaggttaaggctaaaacaagggaagtatttcatcatatttgtgctctaaattgtaatcttgccattttgtcataataaagactaattctaataaggaagttcaaagggaactaagctcttcacttttgtgaaagaataagttcaaacttctataattttgtttgtgttctttaattctgtcatttttcatttcttcaattatagttattgatttctgttttttggattattgtgttatatgcttcctgagaggttgttgttgaaacacaacatgagttgtatcaaacattgataattaggtgaagatgaacacattaagcttaggaaaataactgtaaaagatttatattagagccgtgtttggtcttaattatggatagtgtaaatcgaaaaaaataaaaaaaaaaa

SEQ ID NO: 386699 - DNA, 1054 bp, Cannabis indica
tagcatttatctcgaaggtggccaggtttttgacaattggaacaagtgggacgcattttcttgtttttggaggtaaaatttgctgcagggctggaatcagtggtgggatttgggttgtttgtgatagtagcagcagtgatgggattggtatttctatggccaatggttctttggcgttcttgatgaacgatcattgaaaaaaccttgtttaaaggaggacaaggatcaagaaggagaacttgatctcgtacagcatgataggagtcattgagtcctttaagaaattgtaggacttgatcatgattgtgataatcttgattttgtgtagcagctacacaggtacatgggatttttgggcgaagttgagtgatttcgtcccaaatagcagtcagtttggtgaaatatgtactgacagaatcgtcaccttgttgaaggaaggtgaggttttcattgagttcgaaaatccgtggaccattgctttgattgaacctattatttagttcagtccacatgtctgcagcagtatcaagatacatgatactgcttttgatctcgggtgaaaccgagtgaaggatccaagattggaccatttgattacaacgaatccaagaactgtataaagcatcattaggagggggtttagggagcgtaccatcaatgaaaggtgttttgtttcgagcaccgattgaaagtttgaagtcccgagtccatggttgaaaattcctgtctgttaaaatcggagttacaagtgcaattcctggatgatctgcggtactgaggtagtaaggactacgaatatcctcatatgccggtcgatctccatggctatggtggtttgatggagctggaacaggaatttgggggggaagatctgcagagttctgggatgctggaggagcaggattctgaatcgcatcgtccattggattgtcagtggaagtagcagaggaatttgctctcgtacgcaccattgttgaatgcagaggaaggtgatgatgactagagttcttggattaaatcttctgataccatattagtgaagaacagagcaaaa

SEQ ID NO: 386700 - DNA, 795 bp, Cannabis indica
tttaataacactagcatattaataatctgtacatttttttcaaagttttctagctaattaaataataatatgatttcatatatgtgacaagattcatcatttgacaatttcttacatgaaaggggaactaaactaattccaactctcttcatgtatattttcacatatattcagtactaacagtgaataaatcaactatatttgaaaaataataataatgttaagtcgacttaatttcaattatatatatatttatataggaatgactcttggtaacattattggtcaacaactcaactacccactaaactatattataattagtataataatattaattatcttcccacttagaatgcttgtgaaattttcaactatatcaccttggtctaaccaatacaccacccacgaaataacctaagtgatctcctaattaacaagagccagctccacccatataaatataatagcattatcaatagatagtacaacacaacaactactaaatcattctatcttctttgctcttaactcagtcctctaacataatctaaaagttcatacttaagagttcttaatttgctctatcttgaaatatagatatagcaaaatgggaagcttaggcgactttcaatttcctctaaacaacggtctctccaacatggccaacggggcaaccactaacccattggaccccgaggagtttcgacgccaaggccacatggtgatcgatttcatagctgattactacaaaaacattgagaagtacccggttcttagccaagttgaaccggg

SEQ ID NO: 386701 - DNA, 583 bp, Cannabis indica
tctccgttcctaattgtcatgtatctagatccttcggaaccataagaatccttagttagaataagattctaactccccactttttgagattttgagaagagttgctttttggagagcagagtacaatgaaagttttaagctgtgtttggggggagttattgcctattgttgacctctatggtagaatcattttggggcttaggcagtgatttgccctgtggtggatgtcagcagtgagtctgcttatctccaacccgtgaatttaactgatacaaagctatatgataacattctatttttttgatttgacaatttgacctattctagattttagagtacaagaaacttcaagttgagaatgttaataaaagattctaaaatgtattgtacatttttttttttccaagagaaatcattaatttaatcaataacataaaatttcattcccttaaataaagtgcggctacatacattaaacaatttttagcattaattgataaaaataagaaatttttacaccaaaaatacaaattatacactttattacatataaacctacacacggttaaagcaatttttttac

SEQ ID NO: 386702 - DNA, 814 bp, Cannabis indica
ataataaataacaatagaaaaaaggccaaataaaaccaaactaagagtctaaaataactattaacacgcacatatatataacaaaaaataaaacaataaaaattcacaaaatatagacaatattagaatattaaaattggtaaaatacataaataatcaggtaggaatatttttgaatatatataattaataaaagaagagctcgaagcatacttggagttttgtgtgtactctgtgaacgtcaatgcgttgtctatcaacgattgatagttgatgccaccgaaagttgataaattctctggaaaaaaccaattagtgaaattcatggagtttcaattagttttagaataatatataaatggcaaaatatatacatttataaacactaataataattatatataataataaaaaatataaaaacgagattgtatttgtacagtacactataatttatgtaacttatctatagtctatacacaaaaaaaaataaacaagtaaaacaatttgtacatgttgtaagaaattaagaatattgatagagagatagagacaagacagtgagaatggttggtagtaaatgtgaatttgatagattagaggctttgagtttgataaattagagagaatgggtggtagtatatatttgtattataaaatagggatttttacactagatgtcaaatttggcatcttttttacatttttatttatgtttgatcttttaaacttttttataaaatctggttttcaattttattttttaaaaagttctttaattacaaaaatacctttattgtttatgtcatctttc

SEQ ID NO: 386703 - DNA, 1193 bp, Cannabis indica
taattaagaagtgagaggaggagaagagaggaaaaatgacggttgagaagctggattaactagagaagaagggagaaccttagaaagtttcagagcagatttcaatcctcaaaaaattctgactttgttcatagctatagccttggaaaagataaagatttttagtgtcatatgctaaataatattcatatttggtatggaaaaaattgtatagttgagacttgactgtattaataaaattttacaattaaatttaaatttaaattttaaaataagaagatcaaaagaattaaaggtaaatgttgtcaacagtttatgttgctaatttactaaaggagatatgaaagcgtaaatacggtgcaaattttggctatgtttataaaattgaattttaataatagtatatattgtggtttaaatttgatatatataaaaattgtgctaaatttaacataaaatataacatgaattaaattttacactacaataaatattattattttttatttaattttgttgccactcattaatgcttttaataaacttttacattttatttatatatttaataaaaattttatacacgttcaattaaaatttaaattatttattgacgacaaccatcgatccagaactgttgtcgagaaccacagcataaacaactttccatcttgatcactgcaatcgcctttctctctatctctcaaccccaatcttctctctctctctctctctctctcagcccggatctcctcttctcttccaatcttgatcgatctcaggcccaatctcctatatctctcacaattttgatcacatttctctctctctctctctagacaacgaaggttttctagattttcttggattcttttttgttgatatttttgtataaataatcctattaggatatttttattttctttcgatttagatatgagaaaaaataatggttgtgggaaaaaaagtttaggttttaaatttgggttttggaactaaaattttcgtgtatatatatatatgtgtgtgtgtttgttggatttagatttgaatttgtttaaatttgatttgagttgtgtgtaatttttttgtgtgtgatttggattgaaaattatttatggtggtggtttcgatggtgatttattagtggtgggtggtcgtttcgattgctatggatggtggtggtagtgaca

SEQ ID NO: 386704 - DNA, 1542 bp, Cannabis indica
actcgtgcaaagttttggctacccaaaaatgtgttatatacagctactttcataattccatatgtatttgattgaatttgtttttttttattccccttcttaaaatataaaaaataaaaactaaaaatgttacccgaccaattgtaccggccaagacagggatccaagtaggacgtcattaaaaaaaaagtagtttgaaatttaaaaatacttatacaaccaataaagcgcttatgttataatatattatattatatatatgcatgttgtttaatacatattaaaataagacccaaagcatctgaactacctaaaaagcttgaccattttatatacttattttgtttaatggtaatctttattataatggcgatacatatatttagttcaaaacgcacgtttaagattcgaaaaattaaaaaccaccgaagcatatattcatattatgaggcagatatgtttgtgggaagaaaaacgaagaacacgtaattagagccactttgttgtgttttaatacctaaaatgaaaattaaggtaaacggtaaacaatatttgaatgtttgaatggtcataatatgattgtaaaattatatatataagatggttccactcatatttattactagtcttattatgcgcatataaactaaactaagactaagactaagtaaattaattatatatttgtaaattgaaattatatattactgcaaatgcgtgtgtttacttcctctaaaactaagactaaggctaaggctaagtttaataatattatatatatagttagttatgcatttatgtattctttttcctttttgaaggaaaaaaaggcatctaattagggattcttaattcccattattcggaaaaataatttaaacttgcttcagcattcagcaacaatttagttacttaaatattgaataggtaattacaccttcaagctttatttgaggaataacaatttttcaattagttatattgtgaaccaattaattaggatccattatagttgtggctgagcattttccccactggaagggtttgaactgtgaaccacacacttggaacaagcctcacaacactttatgagttaattaaattgtttattcttttaaatatctatagatatataaataaattttgatgatgactataagtaatatagtaatactaaatataatagcatttattgttattgttatgtttgttagattatgaagtatatcaaagttactattattaatgggttaagaaataatatacattataagttttttttggtagcattaattataatattatcaagttcttgacaaaatacctatattttattaacaaccgcactatgtttataaccatgtcatttagagtccatttggcatagtttttagataagttaatggcacgtttacaatacagtaatcagaatcggaataaattaatggagaaatgtaacggaataaataaaaaataatcggaatcaatatttgtaatatgttgtttactaaaattttttagaaatggaatagttgtgattta

SEQ ID NO: 386705 - DNA, 659 bp, Cannabis indica
ttttttttttttttttgcattgtgcagagagagaaaaaccactgctaacccaaaaaatttcaccactaaatgtctggcagaggcttcgttttcatcaatggcttactgcaactacattagaaacttctccttatgacattgctctatttgttatcgctccagaattatcatcaatagatttccagagggattttgataagctttccagaagacttcaaagcttttagacgagcagttcattactaatccagaattcaacatgtcaactctccaatatcacaagtaaatgtattcttacttgcaatcttgctgttgtttctatcttttatttttgttctacttgattgtgatatgggttaataggacatagattaaaatttccatgtttagggggaattctaagttggtatgatgatgtagcactgtatgctccaccgtgtagggtggttaacgatttcttttttcctcggaacttaggaattcataatgatacactgaacatagagacctttccatgtctagaaaatgaacacatagggagtctcaaattttctagattttttacacaactttcgatctcacgagttctgacaatgtccctagggaccttgttgttggattttgtgccctaaataaaatacatttcaatataatcagat

SEQ ID NO: 386706 - DNA, 1559 bp, Cannabis indica
cttttgccgcaattatcccaaaagaaaaaaacaacctttttcgtaagagtactttatttgatcagaaaaaagaaagtgttattacagaaaatgataattggttttttcatcaaataaatttattatttatcttaaaaacatgaaaatgaaaataaaatcattatttatcaacaaataaacatttaaaacatgctagaatagggtgaggattgacactataaatgcaccggttacctccttcatagcctggtgcagttcggtttttagcaagattaatgcaaaaaaaaaaaaaaaatactcttattgtagccgtgtgttgggacatttagagtgcacgtaacgaagttgtttggaaaagaaagtcgacccatggtgatgacattgttggatttgctaaaaactaccttaattaatggaataatgctcaaaattctatccttggctcatcatgttctgactatcaggtgcatgatgttgcagagcattgattctctccacttgttaacaaaattaaggttaatgtaagcgcagctttatttgatgatggtcgatcgtttgatttgagtatggtggcaagagatgataaaggttggttggtccgaaccattttttcttcgagtacggtggaactaatcttggctaaagcaattagtgtcaaggaagctctcacatggataaagagaaagcagtggcatcatgtgaccgtggagaatgattgtcttggggttgtgcaagcattacgtagttctatttgtatgatttctttgtttgatcaagtcattcaaagctgtaaaaatttacttgctgaattgtgtatcgttgaggttatttttattaaacgatctgctaatatagtgactcatagctttgttagagtctctattttgtaccttgatcatactttcagtatggagtttgttcctactaatttattaccttgtttaatgattgagtttgttggttaatgaaatttacatttttcattgaaaaaaacatttaatatatgacaattgacaactacaacagcaacaacatcgtatatcaataactgtttgaaatgcgtagttaaatataataaatgcagtggaagaaacttgtttttgattttcaaatgaaaaaaatatgtctaatcaatacataaacaaccattaaaagagttttttttatctattttttttaagaaagaatcaaaatttactgtctaaaaatgtgtggaagttatttgaaatctaaaaatgtggtttgattggtgtttaatcagattttgacaataattaaactataattaattacaattaataatttattataaaagtcaattagcttaataaatatattaaacatcattgaaaaattgaaaatcactcaaatttttctaaaactccaacacaacacatataaataagggtaaatactattttggaccctctgttttacaaaagttatcaattagaccctgtgttttgttaaatgacaaaatggaccatgtattttctaaaatagtacaaatagaatcctgaattgattttttgtcaaaataaagtttaattataatccga

SEQ ID NO: 386707 - DNA, 1944 bp, Cannabis indica
actattttaatttagatattacatctagagattatacatttttttttacatgtgatgtgtatttacttttaaatattaataactttgagtagggatgatatcgatccttttttaattttatggttaaaattaataacatatgagtaaaatatatataatttaaatgtgtcataatcattatttttttcttttaataaataatgatataagtacccaaatattacaaaaatgatactatttttgtaaaacattggataccaatttaaacaaatgggattgattaaaaaaatactatgggtaagattataacatttttatttgagttttttgcggcttaattctctaagctcaaattttgacggtaaaactctccaaattattgaatcacttgcaaatttaaagtgtcatccatttttttacagtaatggtcgatatagattgcttatgtgtacacttttgtacatgtgtcaaatttatattggtacaccttatatattattttaaaatataaaaattatttcaaaatttataatattttatttttatttttataattttatttaatttaaaaatgaattttgaaaataatttttaaataataatattaggtgtaccaatataaacgtgtcatgtgcatacgggtgtacacataaacagtctatagtgacggttaaccgaataacaccttaaatttgctactagttcagtaatttggagggttttatcactaaaatttgagcttagaaagttaaatacaagtgaaataataattgagaaggttttgtcggaaaaaattatttttattttaaccatcattcactctattaatatttactattttttactattgaattttttagggactggttttgtaatttaaagtaaattatataatttgaatcaaaataacaaggtcaatttttaaagtacatcgaagaaaaataaggtttttggtgtcttttttatgctaaacatatatacttaattaattactagcaagtaggcatataatttatctttgtttgacaaggatttagaaggtgaggtttactattattatttttttttcttcaaaaaagtaaaagaatttagtcatgacatactagtaatagtttgattgaattcattcctttgggcaataatggatgaccttttcaaccacttgcaataaactcaaatgatccaaagggagggcctctttcttgtgttaatgttctcttgcctttatgcaaaatcaagtatttatccacaaaatgtgtgtgggtgccttttcatttgtgtatgtatatttatatacatattttatgatttatgttaaagggtactcatagtttttagtaccactatgaaatatcatattattattaattagtaaatttcaatatcgaatctcatatattttaatttaataatcataattatataaatttattaattatatataacactcatattttatatatccataaagagctcctttgacatgcagaattagattagaatggactgaaaataattagattgaattggactgaatttgattatgttaaatataattctatttggttttacaatggatttgattttattaaaaaataaaaggctaattataaaataataaataaatttaacaagtttttgcaaaaatatatattaatatatcatatataaataaatatatatgcaataaaattaaataatgtatcatgctttaaaatagtaaataataaaataaaagtagtttgatagcaaacaaatatttatggtcaagcaatattttaaattaatcatttaattaatttaatacaaatattattaatatattaatagctgataaatattttaaataatttaaaaagaatttactatataatattattttatttagatcaaagtatttattttttagtgttttcaaaaatgtatttattgtttgatcataat

SEQ ID NO: 386708 - DNA, 978 bp, Cannabis indica
tgtcacctttgctttcatgcatatatatcttcaacttgtcaaaaataacgaatgggaaattaaagttggacagctaaatggtttgcggaaaaaccaaccaagtctcgtcatcgttgaatgacaaatagatagttgtgttgcaaacaaacacttacaataagttacaacatagagtctagttgccataatgttcatataaattagaaaagagagcctcattaaattgttaagctaatagtaataatatgggtcatcatcatacattctcccatgtggatgaatagcccactttatatacacacatatatttatatagatcatcatgatcatgtgtgtgttttttttcaacatctttcacgttagatatataacacattgccttttgagtcatttattacacaagtcggtttttatcaaacttaaggaaatgaaaaaagttgttagcatatagtatagatgtaggagtatacaaatcactatatacaattgtgagagcgactactctcggaacaagctgaaccaaaattaacactagtacctatagtcattcaattttatttctcataaaatatatttgtatatatgtttattccattagaaagatagttaatatattttaaaatggatatatatatataatcactttcccatgagtccatgaattacagtatactcattttatcttatgactttctctatccgcactcacatttttctctttcctcattctgtcattactttcttgctcctcatctccctaatgactttagctgaattacagtatactcattctatcttatgactttctctatccgcactcacatttatctctttcctcattctgtcattactttcttgctcctcatctccctaatgactttagctgtacccactcttatgaatttccctctcttcaatttctccataatcaatctctattatctctttaaactccataaaatctaatgactactcact

SEQ ID NO: 386709 - DNA, 1502 bp, Cannabis indica
gaggtctacgttgatgacatgttattgaaatcagtaaaaagcgaggaccataaagaggatctcgcagaatgttttgccatgcttagaagtatgatatgaagctaaaccctaagaaatgttcttttggggttatgcaagaggaattgaagctaatctagagaaaaataaaagcattaatcgagatgccttcaccgacaaagacgaaggggttcagactttaacaggaagaatggaagcactcaatagattcatctcgaagtcaactaataagtgcctcccatttttcaatgtcttgcaaggcaataaaaaatccgagtggaatgaagagtgcaaggaagcatttaaatgaataaagaaacacctttctacacctctagttttggctaaaccaattactggggaaacattattcccttaattagatatctcaaaaaattctataagtgcaacattagtttgaaacttcaaataatgaggcagagtacaaagccttgttagtaggattaagaatattcgaggcactaaaagtgaagaacattacatgctttagtgactcgtagctaatagcaaatcatgtcttgggagaataccaagtgaagggattaaaaatggccaaatacttagagaaagttcagaagaacttggaaaagttcaattatttcaaaatagaacaaattccaagagaacaaaactctaatgcggatgccctagcaaaattggcatctcagtttgatctcgacaagttaaacttggtctcggtggagatactggacgagccaagtatatgtgaagaggaagatgtcaacatgatagattaaagacctacatggatgacaccaattgtcaagtatctgttacagggagaacttcttgcagataaaaacgaggcacaaaagctcttatattcgatccctcactatactatggtcaaaggaaaattgtataggagaggatattctatgcctgcactgcgatgtgtgttaccaacagaagataatgaaataatcagagaaattcatgaaggctttcatagagatcattcaggttggaaaagcctgtccaagaagataatcagtcaaggataatactggccaactattaatatggacacacacgagtttgtcgagaaatgcgacaagtgccaaaggttctcacatatacctcgagtaccacccactaagctaagaatgatgacctcaccatatccatttcaatatcgaagattcgcttgattgggtccttacccacaggtcgagatggtgcaaagtatgctattacggcagttgatttcttcacaaaatggaaagaagccaaacctctagtatccatcacatgcaagaaggtccttgattttcttatcaagaacatcatatgtaggttggcattctaattaagatagtatctgacaacgatactcagtttgatagagaattattcatagagttctttgaaaggaataaaataattaaaagcttctcgtcagtatcgaggcctcaagcgaa

SEQ ID NO: 386710 - DNA, 659 bp, Cannabis indica
gaagaataaacaagagttgccttaaatatatgtgttccacctactccattagtatgaggtctttttgaaaaggtgtaccaaaaataaaacagtaatagcttatagcccaaaaacagacaatatcatattaacagtgggagttaaagtgaagtggtaggtctaacaaggtgaaagagcgaggtcaaacaacctacaatttaaaaaatcaatattctcattctcttaatgtatgtatttctttgatttaggatatcttggttaattaagtaactctcaaagatttagcttcattaattacagtacattaacctttaagtatttaaccaattctaacatatgcaattcatcaaatggtggtagtcattatctgtatagctaatgtgtacttcctcaacaaaaatcaagtcttttacaagcagactaagcacataaatgtgagataccactttattcgtgacataattggataagaaaaagtcaagcttaagaaagtttcaaaaatacaatccttcaaatatgctaactaaagctctttctggggcaaaatatagacatttgttattcttaggtacattggacgcctaggtggagaattgtagtattagtagttagtctatctgaaaaatcgtgtttttgcaaatgtcaattatatataagaa

SEQ ID NO: 386711 - DNA, 1533 bp, Cannabis indica
tctgacccgttttgccagccctatttagagaatgcattcaagtaatcatgttactcacccgaataaagtatggtcttcattttactagtcctaacaccaaagcagggaacactaatgacccacatgaggcaaccagtcaccagaaagatcacaatgatgaagatcagaatcaagacgatccaataatcgaagatgcaaaatctagagagaatagttctggcaacactgaagaaaattctaaggatacacccgaggatatgcctgaagacgatcctgagaacaaaactactaatgatgatgttagagagaagaatcaacttaatgagtcagacctcgtggtcattatggctaaacaacttcagttagaagaaagtagattgactcatcaagatcaatccaacgagatacttctaagaaaggttacaagaatggagggcgtgatgactgccctacctaaagggactcctgatgtacaagctcctccaacaactgatgcatctgaaagagcaccaaaagatcctggaacctcaagtcttcgcaaagacaaaaggaaagggatagtcgttgaaatcccaaagaagactacttccaccaagcagcataaaaagtctaaaacagtcaccaacctaaatagaagaaaaaaggaaaccatgtttcagggcatggtgaccagactaattctagaggtagagtagaacaagaaaataagactaatgtcgaaacccaaaagccaaagtcctggaaggacaaaaatcatcccagtgattccagcaatcaagataatgatgtcgatgaggtgtatctaatatcatctggcaacagtggaagtctctccacgactgatcttcgaagaagattgaacgagaaaaaaaaagtgccaaagtagaaaaagccagagctcatgggaacgatatgagaaatcatatcaacaatcatgttcatggaagagaatcctcaagtgacaagactcaatgcctcgaatgtaaagttaaggagttaataaaaatcacggaaaatatctctatgaagtaaaatagcactgtgtcaaaagctgaagaagaagatatggagccatcgtaaaaagaagtatagaactgccacggtcgaagcgcttcaaaatgacataaatccaattataccaggaaggacggacccccgagaccacctgtccaagtacaactacattatgcaagttgccaaggccaatgtcgatacaaaatatttatgcttttcactaatactaagcaaattcgcagaggactggtggaagagattgtctaaggaatcaatccacaattggagagatctataagcaatgtttaaaaagtagtttgtagcaacaaaggcctttgacctggtagtcggttccctggccagtgtcaagcaaccactaggagaaagcctaaagaaatacatccaacgcatgatggatgtgttggaaattattttaccatgatcttagatctacttacaagtatgatgattaacaccctaaatatgaacttctaaaatgattatgaaataaacacatat

SEQ ID NO: 386712 - DNA, 900 bp, Cannabis indica
ttggtgggaataccggcctcccaatcttagtagctggtgttgaaggaaaattatggattgtaatgaaaagatcaagcttctcacggatccaggttagttttcaaacactgagtactctatctctattggttacaagatgattactgaaaatcgagaaagagtcttttggagcagagtagtttggtgcaaattgaatatccctaaacatagctttatgttatggacagctactcttaaaagactcaagacaagagagagacttttcaagtttagaattatagatgaatcgagttgtcttctttgcaatgctcatgaagagacaactttacatctattttttgcttgccctttctctaagaagtgtttgtaaataatcaaaacatggctgaactggagtttacaagcagtaaaacttcaaaccatcttgagatggattgaaagatcaaagaaaagcttgttcaggagaaatatattttcggctgtcattgctggtttggtattatctgatttggaaaataagaaatgaataagtgtgaaataatgcagggatagaaccgattcttgtagggcatcctagacaataattaaaacaagaatctcttgtgttttgccgaaaaataacaacccaagttgacattgagcggtttaattaattgtaattatctataactaatacaaaaaaaatgatgtatagattttctcaggcctcttttgaggtgctattaggttgtagactcgtcccatgttctgagttatgaagcattggaactttagccagacttgtcatacaaggaacaaccagtgcagatacttgatagaagagaaaaagtcttgagaagcaagacagtggcactggtgaaagtactgtggaggaacagttaagtagaagaggcaacctgg

SEQ ID NO: 386713 - DNA, 1005 bp, Cannabis indica
gctccctactctatatggcgctttaaccatgacatcaagttgaaggctaatcgatgtggtcgttggtctctcaaaggcatgtcacattagacatctcccaccagtccactttccttaatcttgtcaagtgtctgagtgctgatagaggatggaggagagatccaacggtcatgctgctctccataatcaagagcttaaggctatgatgcctcctctagaaaatggtccactctgaccttagaaagttggacaaggctattcaagggtcgcctggcctcatcatatgaacctggagagctattgaggaaaataaagcatgtcctgtactgtctccacttgacaggcacaacctcctcgatctcagattcattatccaagctctccacatctcgattatccatgggcttgaccacatatgtctcagcctggccagcccccgactctctgtcatctagaggttgtgcagcctcctcaactataccaattctccctctggtcaccagtctagaaatataagggtcatgaggtggtgctctgtgacatgtctgcttgactctcagcataatgaaccactactaacctcaagattgctcgaggagatgctagaggaatgaactagacactagtcctcaaagggaagaccaactaaatctttgtcgacacggttgtcacctcccccaactgtgacttgggatcatctacacacataagacaaggggaggtgagcaacctgacaaagcgacgaagtatagacaaaattctggtcaatcatacccaagggtacttgccaaaaaatttcattgtacaaggctggatagcagtgaagtacagtctcaagtgtaaaacttggacaaatgctaagtcttaagatgagcattttttaggtatttttagtcttaattttagattaattttagtatatttttaattaagttttaattatgtttggagcattttcacgcttgttatcttttatttttgcagatttaaaatagaagaagatta

SEQ ID NO: 386714 - DNA, 1046 bp, Cannabis indica
tttttttcaattagtttcatttgatttgagacaaatttgagacaaatttacgtacctagatatagtccttggtcatttctttcaaagttctatgtaacaatgcaatgaactgagtttttgaattgtttttcttcagtgctccttgtgacattgttggtgacattagctatgaagaattgaggatggctgcatatgatgatgctaagcgtggattgagtttgcagactatagtaagaatatttcatgtgtttattttgctcttctgttttcttgctttgaagttcacattaatacacttgatttcccgtaagttattttgtgtcaccattgatgcttgtggcacacagttttatattgtgcatcttgcaactctaacatgggaaaatgtgtacaaattatgttgcttgtaagagaagtgaaatgtaaatttatgtggttatgcttccatctcatgatgcttcaaattttcaatgaagtcatttgctgccgcttctaattttcttttcttgatatgcttgctgtcaattggaaagctatttatctaaagatcattgctataaacatggatatagtgagtcatctgttgttgttgcaaagggcatagtttagtagggcctatgttttttgaggtagttgttcgcatgaattgtagcgactctttgttggtatcagtaatatattcagtatttcctacctatttgtttcaagatacttctatatggaatatttccttgcacagaaatatcaagtgttgaggtttcattgttatgtttctcatattattgacacaattttctacaggttgatagagaacggaatttagtgaactctaaggtgatagagtttgaaaacctttgcaagtctggtccagttccccgaaattcaactcccgctaatcaaacttttcctggaactgctccaaatgcatttgcacaaagtgctcaagctccaaatgcatttgcacaaagtgctcaagctccaaatgcatttgcacaaagtgctcaagctccaaatgcttttgcacaaagtgctcaagctccaaatgc

SEQ ID NO: 386715 - DNA, 654 bp, Cannabis indica
catatatatattatttatatttatttagtcggtcaatatttattatattatttgctaaaataatataataaatattgaataactataaatagagatagatataataattagagaatacatctaaatatatattgtaacaaaaagaccatgtacattcttacaccatttcaagatggagtactaaaaatggagttatagtaataattacacttagccatctaatcataaaatttgagggaatagtaatcttaaattttttgttattgttgcaattgacccatttccactgttaagtgccactcaagaatataaagtgacaatataatgccaacatattatgtctattctcatttattttgaagtaataatagcattggttttattggaggaataaaataaaataatatagtgtaatattccttctttttccctgaattacgtgaagcataagcatattagttttttttcctccatttcataaagaaaggagaaaggagagagccttggaaaaattacatttgatattgtttttaaagaaaaaaaagtttgttttatagaatgtagtacttaggtggcgtttggttggaggtaaaagaatggaaaggaaaaattttattccattccttttttggttgcattttgaagtattggaat

SEQ ID NO: 386716 - DNA, 1162 bp, Cannabis indica
atcatagcaagtttaaattgagagtttacaaggagaaatggtctttcttggtagaagaaaggtggaaagatgagattttctgaggaaaaacaggaagaggagggggttcgttgtgaggtttaatgagggttttggtttaaatggtggtgagaatggtggaggtggaggtggcggtgggaaagacgatggtgccactgctagaattctgggtaatctagctttggctatcgggttgacctatctttccatgactggacaacttggttggctgttgataccattgtttccattggggtactctttcttgctcttgcctttaagctgtttgattatttgactctgaatatttacttaatattcttgtatttcttaatttgaaaaatattcactgatttatccttattcatgctcagcttcttgcagttgttgtacccatagttggtattggagctttcctctggtgggcaggacgggatatagttcaggacactgtaagaccctttctattttcctttctttatctttttcgttgaacaagtctaaaagaattatggttgtgaaatgatgttacttgtgcattcttactctatatttgcttgcctaattgactggtaactttccagtgcccaaactgtggaaatgagtttcagatcttcaagtaagacttgtttgtagcctcatattcctgtacatcacatccacgaaatttttcttgtattgatttatattttttactttttacaggtctactatgcaaagtgatttgcagttttgccctttctgcacccaacctttctccagtaagagtttattcttgacccttttgcctctttgcattctaattttttagttcatcactctttctactattagactatagatgtcattggaaagttattttattgctagctagttagttagccataatgttccccttgtgtctctaagctgtttttgcttatgatctctgttccagccatatcttaactggagagattatctaaacatttattcaagttttctcttttagattaagctagaaatcttcttatctattgtcatttcgtctgtcagttgtggataataaatttgtaagggactctgtcaaattctccaaccagtctacaacattcggagaggccttcagtgatttcactcgttc

SEQ ID NO: 386717 - DNA, 1416 bp, Cannabis indica
tccaccgtaagagcaaacttagctaaaacatgggcgtaagtattagcagatctcctaacatgagtgagctgtgctcgtgggaaaaaggatactaaatagttaacatcttttaacagagtatgaaaagcagaattacattcagaagcagcctttaagccttgaactactaacaaagaatctgtttcaatgatatcagtagttaaaccaaggctgaggagccattgcagagttaaagctaaagcagttgcttccatttcctctgctttgaaacatcccaaaaaggtcttcgagagagcagctttgatgtatccattagagtctctcaagacagcaccgataccgattaacttgctcgatttgttgcaggatgcatcagtattgagcttccatttgcctttaggtggtgcaatccaaggatcgactaaggaagttgctggtgtgacattcactggaggggtgttggatacagcaggagaggcagaggctgttgtcaaggcatgagcagactgatatttgatgaggtactgagttgcaaaaactaagatagcagcagctaacttaggtaatttgccatgatattctgcatttctctcataccagatactccaacaaatagtcaaaaattgctcaaattcctgtgtggaagtgttggccgaggcatacagcaagaattcttctggtgtagatgtggcagccaatttgaaattcaaatgaaggtgagaaagacgccaaacctccttagctcttgtacagagaaataatgcatgattaatggattcttgctgcattttacacaaaggacaaaatggtgtatctgcaatatgcttacggtgcagttcagcagctactggtagtacattgtgaaacactttccagacaaaaatacgaagctttgaaggcaactgtaacttccaaaatttggtccaccaatgttcacatgtgagagtactgcctgtatcttgaagctcagcaagggaagaggcaaaataatatcctgacttaaccatgtagttacccgaattagttccattccaaaggaggacatcatctgagggaaagatgctaagaggaatagagagagtattctatccatatcagcttgtccaaagttagcagaaatagccgttaaattccaatgcctttgttgatttattagatcaacaacttggagagaactatcattgcttataaaactgtaaggagtaaaatcagtgtgaccaggcagacaaggatccgatttgcaattaattcgatttccaagtcccactctccaacgaagacctttagcaagaagctcttttccccatacaatgcttcgccatgttaaagaaggacaggcacccaaaccagcagtaagaaaattaccattcaaaaaatatctgtgatgcaagatacgactgaggagagagttaggtg

SEQ ID NO: 386718 - DNA, 1908 bp, Cannabis indica
tttttacctgttgtgttataggtactgtaaattttgcataatttctaaaaataacaagagtaacaccaattccatttttcattgttaatttcacataaattatctatcttgacctaaatgtcgcagaaatcataatttggatacacataaaaaaaaaattgttacacatataagttttttttgtccatcgtttgtattacctttttcaattttttgattgagctgtctcggggaccatagacctattaagcttcaataaattaaaactaaataattgaaatttttattgatactagttagtttactaattctgatattcttccactatgaattcagaattaaactctttatgttatagatgtacttttactgaaatcttttcttaatttttccattgatataattatcttacaatagttcagctctccaataaattggttcataaattaaaatggaagaattaccattttacccttctaatttacttcttattccttaagtaacattaattcactagtgaataataaacctataatatgattatagatttgagcttaacataattcagtatcagaattaacccttaagggaaccaatacacaatgtcacaatccgttaaaaaagactggattctttttcgttaattcatgttccctaccgtccatgtaattaaatttcaaaaacaaaagtcactagactaattctattgagagaccttaacaaatgacttaaaaaattcaatcaatatgaacatgatttcataaaacactcaggattgaggttgatctataaacgatcatctgttatgatattaatactagtctttgctattaaatgacttttatacaaagataattattcatatcaggccatgtcttatataatcatattatataaaatttcattaccaagatgtcttaccacatcaataatctgaatctagattatttataccaacaggtactcagtaaaccgcactataattccaattgaaaatttaaaatattaattagttgttgactattttatacattcatgtgatttaaattctcttgcactaatacaagattacattcttaataatgaatatagaattttctaatatttatataaacgattcaacaaaaaatttagcaattcaaatataataataataaatcattatatttattattcaagttaaaaatattaaatgcttttacatgcttttagggcacactcctaacagtaactagttactctttttttaggatagaattgaatgtatttttggaatgttggaatcctttctaccagctcaaaatttctccaaattacccaattagtatcataaacacttgtaacacccatacttttataaaaatattaattttatgtacaagcgttaaacgtgaaaaatcataatgtcacatttttatttattacttgaaaatgttcacaactgaccagtttgtacaaaagacataataaataataaccaaaataattgcgacataaatttaatagcgtaaataaataaacagagcgcactagactgcccacagttatatggtcctcagcaagttcacacacacaagcgtccaaagttccactcgccaccagcattctagactttcagttaccttggtctgcacatggtaatttgataagggtgagctactaaactaagtaaggaaatgtgtgtcaggtagtcacataaataaaaataaaacacaactaaaatgcacatatttagacaaataacaattcataaatttaatttgatcactagtaactaataactagtttctaagctaagtcacataataatgattacgccagagtctgactttggcaaatgaactcaaactataggactaaatggcggagggcgtgggttcagtaaaattgtacccactactaaatggc

SEQ ID NO: 386719 - DNA, 1298 bp, Cannabis indica
ggctccttgagtcacgaagaacacatgttcaaatcctgtacacctcctggccgaccaagaaggtcttggtcaagacttgcttggccatggttggtcactatggtgtctggccagccaagggggataccataggctgggtcatgggacctggccgaccctctaagttttgggaactttggctggccaaggccaaggttctaagcgggcaactagtcttttgtcctctattgacctcggctagggtctcgtggcagccttggaggcatatacaactgtaatctcatgtgtggtctcccttgggaaatctgtgtgagacttggtagtgagtctattatagtcgagtgcacaacttaggactcactatttgtctaagtaaatgtacttgagaggatactttgcagatactcggccttgtaaaatttgatttacctggaaggtactcttgggtacagttgactagaacttatctgtagctttgtcaggttactcacatccacttgtctcttctatgcaagtaagtttgagtgtggatttggggaggtgacagatgttgtgtcattggtcttgtcagccttgtttttgagaaagggcatttagtatgtccccttactcctttttgtgtgattctggactgatagtcatgcccagaagaaaaacgatcatgtcgtagagcgcttccacatgatccttatgttgccatggtggcaacaatgggtagagtcagagttgtgaaggaggccacacagcctcgtgaggatgtagatccaaaagttggtcacgcagaggtacttgaggttgaccagggggtcgagagttctgactcgaatctaaggtggaggatgcaatgcctgttaggacaaagacttatagaacttgctctgtccttcccaactggcctttaggtggatatgatggtgacggggagccattgaacaggctaggtcagccttcagtgatgggtttggaacatgtcttgatttagtctttagagcctcatgttttggatgctagatcatatggagacaggtgggtctctcccgcatctatcatcttgttgtgataaatccaacacgcaagtatacgtatcgttttaacaagtaatactcaggtaagtgagatcgttcccacgaggactgtagctaagtaccaatcaattgaatttttgtttctatttggtagaatcaataataaggttgaataattaaataactaaaaactaaaagcaggataataataataaaaagtgtaattaattatggatgaatatttagggaaaagaatcctgttgatttaattac

SEQ ID NO: 386720 - DNA, 2278 bp, Cannabis indica
attgaagaatattgtttcttcttcaggcaaagcagtagaagattgagacggaggaacaaagtatatttttatttgttatgtaagataaaatcttggaagggagtttcttcaagaactggtgaagacgcttatagtaatggtagagtttcttttccagatccacaattggtggattctcgttcggatgcatcgatagtctcgtgttcttgtagataagcaataataaagagattgagaacacctattatgttctttttttttttgttttttttttttttatatatattttctttttttcttttgttatacaagtaattagttagtttatttttcaaataagagaaaataatctctcagacataccgtttctcacctttttttttcttcaaggcattaaagttagaaagtgctaagaattttttattttgttttttttttttttttccttacgctatcttttgcactgcaatgttgagggaaagaacctaaactgaaaaattaaagattacacgggaaatgttcatttccattccagatccatgtgagaatcgggccaaattatgagctgctgtgacctatggatatgggtgagggaatcagggagaaaagacaacacatcaatgatacagtcaactactctacagttagagaatttcactgttggcgtttacttcccgaactaaattgaggcagtcactcttaatatgatggatactaatttgttgatctttgttccagcggactgcctgaagcaaagcccaagcttccacattcatggggctcattaaacctggatagtatttggccgttcgttcaatgacatttccttgagagttcctgatcactcccatactcgacttgttctttatggctgaagttgccccatctactttcattttcagttttccttgaggtgggagataccaattcaagttttgagcatggtaccggtcaattagaggtgtcctggctaagtattgggcttcttggaagtgagtgagtatgtagtttctggcctttctttagcattcttgaaaagaaaagagtttagactgttccgaatcttccacaaaacacataaaaaccttaaactcattttcatgcagcttgcttttaattagtagtattgtatcaaaaatatttctgtgtttagcattagttaatagaagctaaaggcgtacttgaccaaaccttcttgacacccctacactcaaataactcatgtggtaaagtttctttgcattgattacatctagagtgaattgctgtgggaacaacctttcggaaatggagattgacaacactaggaagagtatcatgacaaaacctatagataaagtgcttgatttttcaaagaacatgcagaccccaaagagattttctccacttagagatgacagttgagttagaggaggccaatttagtaggtttggatagagttcggtccaaatgatatcctgatttaataaaacagttcccatgggaagtatactgccagaaaagactatcaccttcagacaggtagggggaggaagggagaggatatcaagaatagtgtttgactgaaagagataattgagaagaggacattccaatcttttgaaggcagtaagagctcacccacttttgatattagataggaatgaggctaaggaaggaaattatagttaggaaaccatttatcatcatacatactaataattttacaatcaccaaccctccatctcaccccttaagtaagtaactccttacctccttacatcatagatactgtttgtagcttctagaaaagaagtacgaggaaagtatttagccttaaaaattttggctaagagagaagaaggattcgactggatcctccaagctcgcttaggaagcatggcctggttgaaaagacaagacatttgaattctaatcctccaacaaacttagatctacagagatcagtccacttccaatgaatcttaccatctccacaattggaaccccacaaaaattttgccatttccttcttgacaagcttgcaaaagaaaattggcagcctaaaaacagacatagtataagagggaatgaattcaatgactacttttaaaagcacctcttttcaccatttgagaagaatttcactttccaactattgaggtattgttgggttttatgccctaaataaaactctgtttcaatgtaatccagattattctatatcaataaagtgacagaagtattttttcattcacttgtgtatgttttggttcacttaatcaattgcttgtctatt

SEQ ID NO: 386721 - DNA, 816 bp, Cannabis indica
tttctctaccactaacgtgcttctccacggtgtcgggatcattctattgctcaagtactccatggcctttgcaagcatgcacgacctcgactcttcttaggattagtttggattaagttagttaagctttggattaagttagttaagggttgttttgtttgttacaaagattacattacagctgtacaattctgttacaacacttcttgattactgagttatataagctccttccctttttgtaaaaatcagtttagcataatcatactaaatgctctgatatttctctgctttttctctctattctttctcataaatctatggtccgggaccactttcttcgagttcttgaggtgtgaccaacttcaaacttcctttatgtttttcaggaaagctatgatgtatttttttaatcttgtttgttttctacctgtttgaaaactagggttaattcgatttggtcgtgtttatgcttcatgaacaggaaacctttcagaatgtctttaaattttgggagcactttgatgcttgcagcaatgcttctaaactggaaatgaaaaactctcatgtatacgttagtttcaaaaatcttaatcatgggtttatttattcatttaggcatttactaataggtgtttggtgcaatattttaaagccagaatggggggatgaaatacaggaagtactttgcaaagctctatttgcaatacataatatatatttagttaactgtacatgtatatgtatgtaacgccctaaataattaggcacgctacccaaaaatgattatgaaaccctaatcccctaaccgggatt

SEQ ID NO: 386722 - DNA, 1184 bp, Cannabis indica
cctcctgataagccttggattctcatgggagtgtatggaccaccggtatatgcagaaaaagaaggcttttggaaagagattagtgagtttgtctgcaactgcactctgcctgttctgctaataggggatctaaatggcacactattagacagtgattgtttgaattactcaagggcgagtaatatcagtcggtactcttttgactttcgaagagctgtgcaaagatcgggtctaattgatcttggctttaatggggtaaaattcacttggttcaagaagggatcaagctcttcatcaagtcccagcctcaagagagccagactagacagggagcttgcatcggtagataagagattggcttggcctaatgcaattgttagtcatctcacggctgcatcatcagatcataatccaattattcttgatacttgtgggggacggcactgctcaaagcctcaattcaaatatgaactattgtgggaaagggaccccagagttttctgggttgtgaaaaaggcgtggatgactcaaagccatagggacccaatggttaatatgtaccggaaaattaaagccactaaagagcatttgcacaaatggaacaaaattcatttccgtaaactggccactcaaatctctgaagcccgtgcgaggctcgaagacatcgaaggcagtcagtcaatggatgaggtttctcatgatgaggctatattggctctgaatgaggcattggcgagagaagagattttttggcgacagaaatcaagagttgcgtggcttaaggagggggaccgtgctacgaaattctttatggctagtactgttactagaagaaggcgcaattatattcaatctattaaggatgaagaaggtaatcactatgaagaaatgaaggatatcactaaggctttaattgacaagttcagcaacattttttctaaagtcaactaccggggcagtataacggacttcaattggcattatgatatgttaagcttgcctcagtcagaggaactttatctcaccccaaccatagaagaggtccttcgtgcccttatgtctatgggtagggacaaggccccagggccagatggaattccggctgcattctttagatcccattgggataccattagagatgacttaatgggtatgattcaccctttcttcaccacggcaaagct

SEQ ID NO: 386723 - DNA, 1072 bp, Cannabis indica
aattcgacaaaaccagataaattcacaccgatggtattggaaaagaaggatgattatgtgagagtggaataccaaagccccattcttggtgtaggtggatttattagtaaaaaaaattatgtttttaaattgaaaagtttcttaggcatgtgttgaatggtattacataaagctactgatgtttgttgcaaccattaaccatgcagtttgtggatgacgttgagttctggttcccacctgtgaaggattccattgtggagtaccgatcagcttcgcggattggcagctttgattttgattacaacagaaagagaatcaaggttatctcttactttatttattttttattttttgtaaggttattttttacttcataaaaatatttatctttacagttttgctgaaaatgatccctcattcatttctctaatattttactcctaattaggcattgcggcaagagttagaaaagaaaggatggacttctcaagatagtttctgaaaagactgacatctgccattcaaaagcaatttcatagctctaatgacatttctgaaaattcaatgaaaaattatatctagcttttgtatggcaaaaaaaaaaaaaccaacgaaattttcatgccaagttaatggttaaattgttttaagcccaaccagaccactaatgtaatctaataattacttttccttgtttccatctactgcaagtgtgacagcaattttcataccgatgatatcatttctgaaaatccaacaaaaaaagttgcatctctagtcaatttaatagcttttgaatagcaacaaaagaaatttccattctaagttatggttaaatttacttcttgtattataattgcttcaagtttttgaagggtaatcagaatttgaaataatggcatctccattacaggcattgcagtttttcgactgtaaatagggaataaggaaagaaaagaatttgaaatggtgtaaatgcccaaattgtttaatgtgagcttgagccatagaaattcaacttctcttttaatactaactaaaatatgagctcgtgaattcatcatacgttccc

SEQ ID NO: 386724 - DNA, 1119 bp, Cannabis indica
gactggctgcagcatcaacttaaatgatggcaaacacctaagtaagtacgggctttacttcttacttctattcttctttcttcgtctaagggtaatctttcttaaaatgcccaaccatgccacactgaaagcatgttttttgatcgcactgtccgagatggtgtttcttacaatgtgggcactcaaggtaagagtaaccctggtctccacctctcccttggttcccttggaaccttttgttctgtctcgaacaaccagatgtcaagaaagtccttctcttctagtcagcagtggaatcaccaccatccctaccatatccaaatgtaggaaaagcggtggtccaaccaacattttgagtctcttagggatcctgaataaattttactgctccctcagttcacagagccttctcaaccatctaagcataagtcattgtgtcacctgtagtaattaccagatcatgtttaatcttggaatttaaacctgccagatatttttctttcttactgaagtctgtgggtactatacctgaagccaacttggctaaacggttgagcttctttgtatattccgtttctgacatgccttctccctaaaccaaatcaatgaactctttccacttagaattgaagactgcctcgttataatacttgacactgaatatttctcgaaactcttcccaagtcatggtggtgacatctcgaatgagggataccaactcacaccacacaagagcatcctcctagatttgaaacatagcgcaagtcacccgatcattcctagtgacacccatgaaattcaagattctctctataacagtgagccactactcgtccttcataacattcggttctcccataaaaactagaggcgcctccttgcaaaatctctcatacaatgtctccatacggttcccaataacaggtagttctgctagcaccgttggaaccatatcgaccgctgcttgctgcggaggcaccacaagaggaccctgctatttaaacctctgaatatcttcgtcttcttgaagaattcaagcttgcatctctacaaaactttgctcccaattcgaaggagcttggggtagattctcatgtctaccaccttgaaaccttccac

SEQ ID NO: 386725 - DNA, 859 bp, Cannabis indica
tcttattaacagatcgtttaacacgaaaaacagaaatattatgtaaaatagaaagaattgattgccattcttgaacaaacaagccgaaaacagatggaagtgcaatcgagctattaatagcttgaacaacagcgatacaatctgtctcgattagcacattcgacaagttcctcatcttcaaccaactgagggcttccttaacactcaaagcttcagcaacagctggctgacaagccccaggatgcagagaagagcgagcttcgataagcttcccatgaaaatctctaatgacgatacccgtaccatattgagtcgttgcagcaaaaatcgtcccatcagtattgattttcaatatcccagcagacggcttctcccaacacacactgctaccatcaacatcaacatcaaataacaacagtttgaacctattttcctgagccgacaaccaattataaagagtagacctagccattcgaaccacatccgcagcctgagaagaacgcccctgccaaagaagctcatttctggctttccaaataccccatgccaccatcaatagctcatccaccaaagccactctaccccctatcagaaacgccttaaaccaatcggcaaagatagcttctgcagaaaattgcaaccccacaccagacctattccaacaagattgtgcaaaatgacagccaaccaaacatggacaatggtttcttcatcggaattgcaaaacacacagcggggatcaacaggaacatgtttagtacataactgggaacgagttggtaaacaccccgagatagctttccacgcaaagtgaagaaccttgggagggactttagctttccatagagccctccataat

SEQ ID NO: 386726 - DNA, 955 bp, Cannabis indica
tctcgcagatggcagatcttgcatggatgtgtgaggtggcaaggtctctgaagtctagctgatctcgttgccaatgggttatctccggcaatcccaataccatcattcttgagttgcagagagagattatcctgtagaaacaaaaaagagaaaaataaactaaagtttatttattttttgtgaggatgaaagaagaaaataaataaattatttattgtaataattttataactttattttttaaaaaaatgaattttgaaataatattttataatttttaaataattatattaggtgtatcattataaatgttctacgtgtacaagagtgtacacataagcaatctaccttggcagttaattgagataatggatgaccccttaaatttgttaacagcctattagtttggaaacttttacatcaaaatttgtgtttgtagaggtaggaacaagaaaagtgatacttgagagggtttagcatccaaaaatactatttttaactaaaatcttattttagtttacaaaactaacaaacaaataatattatttctcattacatgcctgaccctgctagaggcgggttagacctgtgcttaggagcgtacctagactagaggcacaatttattttttttttaaaaaaatacacatatcttttttattgattttgaaaataccctatttctttttaaataaaggctcaaacttttcttttttttttttttcgaaggcccactaaaatttagaatcggccatgtctcaatagctaaagtatattttatggataaaaagaactaaatttatatctattctatataaagtgtgtctatataattgaattcttggtttatgagaaattcaagggtaactttttattttatttaataaaataataaaaatattatttatatataataaaataataataaaataaatcctattaatatttgaactgat

SEQ ID NO: 386727 - DNA, 1655 bp, Cannabis indica
taagtttggttagacaattagctatctgagcattggcgggaatatgattggcacgaatttgctgttgaataaccttgtcatgaacaaagtacagatcaatcttaatgtgtttggttcgtgcatcaagaacaaggttagcagcaagtagaactgtactttggttgtcacaccaaagagaagagaaatttagtggttgggatatatgcagcccagtcagcagagattgaatccgtgacacttttgagacagtagtagctaggtttctgaactcagcctcattaaaggatctagatattactcagggctatctaaaactcatctcaactgagacaaaagtgcgttggccgagcatagcttggagttggctaaactacccaaagcatagctttattatgtggatggccatgcttaaccgactcaagacaaaggataggatagccaaataccaacctgaaattgacaaaacttgtctgttttgcagcaatgaagatttttttaactgctcctttgggcaggtttgtttaaatcaagttaagatgtggttgaattggaacatgagcaaaagaccactgccaggatgtgatcagatggctcggtaaggccaaaataagcaagtgatgcactggcagctttggtgtatgcgttgtggtgctcctgaaactcaattttttgggaggaaaaagttgtaaatagtgatataatcatagcacaagaacaaaatgtttcaaagagtcgaatttcttgtatttggccaaaaaaagtgtccaatagagatagaatatggtttgaaaccttgtaaatattagagattatttagatcctctagatggagggcgcgatagtgttgtacaaattttcttagagtaatgaaattcacctgattcataaaaaaaaaaagcttcaaaggtgaattctggaactagcttcaaaaacagaccatgatctaaggttcttgcaatgtatcgaaaaattttatttacagctgtccaatgttgttgtagaagagtatgcatatattggcaaactttgtttaaacagaaggcaagctcaggtcgagtgattgtaacatattgaagtcccctaactatagatctatacaaggttggatcttccataagctcactgccatagttggacagcttaaggccactgttcattgaggtactttgagtgttaacattctgcatttcagctttgcagaaaagatcttggagatacttggttttagtaagcagcaagccttctaatgtgttaacagtttgaatcccaagaaagtaatccagttctccaaggtctttaagagcaaaggttcagctgagatcaacaataagagtgttcaccatgttgtcattgtttcccataaccagattgccatctacataaacaagaacttagatacaaactgtagtagtgaactttatgaaaagaaaagtgtcggcatgtgatgactagaaccctaagttgattaacactattgaaagcttgtcaaatcatgctcgaggagcttgcttcaagccatatattgccttgttgagtttacatacatagtttggatgtgttgcaccaataaatctaggaggctgctgcatgtaaatttcctctttaagatcaccatttaaaaatacattttatattactaaaaataatttgtaatt

SEQ ID NO: 386728 - DNA, 900 bp, Cannabis indica
tataattatttactcacatctcaatatttcagtcataagacagaatatttgaaaaaacaaaataaagaaaaagaatttttttttttttttttttttttctagaatggtgcatttttcaatattgctttccgttttcctagtaacacattaggagaaacatgttttaaatgtaggattcaacgtataaccaattgaaattaaatgtggagtaaaattttgttaatgcagaaaaaaaaaagtttatgatgtacttaatctggatctagaagatattctaaatttcggtggcgtttggttgcagtcaatgaaatataatgtaatggaaagaaaataattattattttattcttttgtttgattaaattttaaaatattggaatatcattataatataatgtttttttattattttagtagaataacttttttatattgaaatggaacaaataaccattataatacaaaaaatttaataatgttttcataaacattttaaatttatttaattctatttctatttccaagagcaaacccacatagaagcgaggaggatcgctcctaaaaaaaattaaggaaaaatatatatgcattttaattaattatgatatatttatagtaaaggataatatttataaaaataatattagagggagttacaagtgtgactttaaaaaatgtctggttttaattgaaacacacaatcccacaaaaaatgagtgaaatgaacaaattcaactgggctttgatgctgatagagcaaagagtaaattgggctaagactcagagtcaaaactaaggggtatattgagaaatacctcttttatttatcaattaattaaagctacctctaattttatatttaattgaaagatacctctttttatatgtattgtacccaaa

SEQ ID NO: 386729 - DNA, 791 bp, Cannabis indica
aaaaaaaaaaaaaatcaaaacttcgtttccaatcatcaatatcaacatgattcattgataccgaacccaccaaaagcaaatatcattttgaataaaataagttaaagtagaactcgtttcactaaaattgaccaatcttccatccataatatattttgttttttaaagagaaaaaatatacttgcgtgtgttatcacaattcacacatctaacataattcttaaatcaaaatccctataatttaatcttttcaaacaacactatattaaatggggtcgacccaaaaataggacaataggtatcgtccaagaccctccattctagtccaaaaaaattcatttaaagaagaattaatttatttttttaaaatatcatattttagatttttaatattattttggaaagagtgcaaaattattttttttcaaatggcccaatttattttcctaaatgctatatattaaattgcatttaaaaaaaaataagaaaacataaatatttttcttcaaaacaataatttaattaaactttttagcttaagactcttaatcagctaggtctaaccttggtactaagtcatctaagcctatagagtgtacttaagaattaaatcaacattttcatcatgaaaatcccttagccagacgacaatgtggagatccaaattattttgttctacttactacaaatattacataagcttttcaagtcgtcgctatgtgtcacgagctcacctttttaggcagcggaacatccgtacgacaccttgacttctctaagccaaggtcagc

SEQ ID NO: 386730 - DNA, 1718 bp, Cannabis indica
aaaaactctttgtggatttattctaaaagatcaataaagattatactcttgtagctaagatttaaagtctgacatcacaagaaacgtaagagcacaaattactggaatcaccgacatcaaatgagcggtaccttgcgggaatcagagcaagatattgaatagcttgaggcaaaacctggatcacaatgtggccactgataagtaccacagcaagacccttgcatagccgagtgaagccagagaaggcgcccatgctctgtacaaaacaagaaaggggcattcaattcttaattcgtaaacaagatccgactcattcagagggagaagtggaaaattgacttaccccagagagcgagggagtggccatggcgggcgggagagatataggagtgaggtttggtgtggtgtgagatctgagggtgatgatgatagagagagcgtattaagggagacactttgagaccaacgtatacatttctttaatcttttatataaaacaaaacacaaattacagattataaggtctttttatttaaatatttatatcctaagcaactgaataaaagttattaagacatctccattgcaaattgcaattcaagattaaatttaaatttggaaaaaataaataaaattatattttttgtcaagaaatatgtgattgttttgtaaaatagcttttgtgaaaaattttattagcaaactaattttttgtgtagaattggcgagagttaggccatagtattcagagggacccccagcttatatgtaattatagaattggtgtaggggtactaactactaggtttcttcttgtcttcaaatgaatgacgctttacgggatcttcaccacatggattttacgtgtttgaccgagagattcaagctttgaactggaaacaatgacatggtgcgcctaggagctaagaagaacccttctcagaaggtcagtggctccctccctccggttgtttcgttggacgtagtgatacaagggtcgatccctcatccacactaagtttcttgtgccaccagttgggaaggtgatgaattgaattcctccttgcgatgtgttcaccagcttaggaggatcgtggtgaagaatggaatcgcccctcgccctatgaaggagtttttcatcggattgctcggaacaaggaaaccctaaattataattatgggggctttagcacgtggagccaagcacattggatggttggggcgacccttccgcttcaaaattatttcatcaacttcttggtttttgttggactacctcattttcaattgatcccacaaggctacaggttgttagccggtttatttattttttataaagacaggccctaactaatcatacgttgttgtggtcatgtacagtaatttgctttggaatctgtgttaggctcatgattctcttggaagacctgtaattcgagggcttggcaccttccagacaactgaaagctttctttattattttccttggcaataggagaaccactttccggtgtcctctcactcgtagagttcaaagtggagtaaatcgataaaagatgctaatttatctataaatatatctctctctctgccacatgaagcttcatatgcatgccacatattttggtaacaacaaatataacaataatatatttattataaatgtaattaatctcatgtgttgatttaaaaataataaaataatttcaaaataaaat

SEQ ID NO: 386731 - DNA, 1070 bp, Cannabis indica
ttcctgacattaattcctaagaaggtcataaatgcagggtgtcaagcgaatactcgagtacccaaatgtctcctcataaatgtgcttgttatgagttatccccagctgttagatttaaagtgtatttcttgggaatcaaagggccccgtaggatccctaaattccctagattgtgtcctttgggctataaatagtcattccttcttcaatattcacactttactctctgcttcaagtcttcaaagctttcaaactggaagaattttttagcaaaccagacttccttattctcttcctcaggtgttgtcaagctttatactatcgccattgtctcctggtgccttcgtctttgactcgatcatcactttgtaagtacctatacttctgaaggccttgtgatattattttggtcatgcgtgtactctttctttctttttctccttgggtgttgattttgcgaatgcctcaaggtaaaaataaactattttcctgcttagcttgacattcctgcggtaatttaggcttcttattgctaggaagttttcttgagaatgtgccattttcctttcgtttggtaggttctttaggctctcctcgaatgggcaattcatccttcttcctttgggttttattttagttagtttcacgcattctactgttttccatattggatatggtgcgtttggcgtcaatactctactttgatgaaagttgggtcgttgtgttcggagggggcctcttcccaacaattaagggacccccagattatgttcttattttttgatttggtgtggggatgctaactgctgggtttcttctcgtctttagatgaacgacacacttcgagagcttaactcgcacgacttctacacttttaattaggaaatccaagctttgtatttagaggaaaaaggcaaaatggtgtgtttgggagccaagaaaagtgttagagattttattacaatggaagaaaatcaagatattacaactctattgtaatacaatacaaggaccaacaaagagattaaataaatgttacaacaacataatatacaatatatatacactat

SEQ ID NO: 386732 - DNA, 4128 bp, Cannabis indica
cttaatatcttgttgacaaaatagttaataattacacgaaaaaaataatattttttagtaattaacgtttaaaatagaaaatttttgtaattacccactcaatagtcaattctcgtgggaggctatgaaaattggagagtataattagaaccctttaattatctctaatgacacaattataatataggagatttttcatttttacacttcaaaatagttttttttgtatttttacggaattctacatagaaacccctattgcaactagcactgcaacctgaattgcaataaaaaatcgtataaaaacccttattgcaactattgcaaccaatttagaaatccaaaaaaagttaaaagaaatagtatataagataattttcctatataattattttgttaaataaacatgataaattatataatcatctacaaacaaatttatttatactgtgactttccaaagaagcctttaatagactcttacaatagttaattcgtttattttgtgtaatttaataactatttgattgaatctagaaataataattaaaaaaaaaacctgcacaataaacacttaaagcatttgattcgctgctagttctcgttgatactgacatttatacagtatataaatacaaagttcataaaactaataattaacataattacattattgtatgttatccaattgtttattaataaataggtgtaatctgaatgcaaatttttataatccaattatttggcaataataaactcggcacccggagattcccaagctaagaatagtgacttaattacagtgttgtttagtcatgattaattgtttgttttttcctaatgtccaaattaatcatttattaaataactttaatgttgatactctatattctcatctaattaaaaattgttgccttcgtttaaatacaaatttattaatatattactttccattataaagtgatttgaaatggtttggattagttttatattattatatttgttttataataatttatcgatgattaaagtgctggtataattctcaacgattagttgggagtttacaacatgtggatgcgtgttagttgtggataagaggctctaaagtttcacaattgtaatactaattaataagataaacaactacagcaaaaaaaaaaaaaagattctttttcaagtacaaatacatactttcatacttttacttttgttctaggagccttttctattttcatacttttaagtaattatacatggggtgttatgaaatcactcactccaatgtgaggtttgagattcctcaaatgagagaaaaatatatataaatatatttttatataatcacaagttatttcaccttaaaaagtctgttttatcacttgatgggtacttaatacttatattgttgtcaaataatttagttttattgttgaaatgtattttgagatcgaacatgtatcagtgtttttaataggtttaaatgagattatattattagtttgcattattttagtaagaatattaaaaaaaaataaaatttgaatacaccaatgaaaaattacattttattggaaataattataaggatttttttctagcaaaatatttataactattattattcttttaaatttgatttgccttttacattatatatcataactactcaaatctttattaattttttttttttgtaaaaaaattgtagactatatataatcaaaattaatttttataataattatcattaatttaagagttttctacatatattaattgcacgtagttatttcaatgagagcattgttataaaatattagtggtctttgtcaccacctaaagataacactttgcgattagttagcttaaatgatataaaactcaatacttaattaaactaattgtaatataacaccttaaaaagtactagacactattagtattttctagtatttctcgatttataattatgttttacattcatatatagcttcaattttgtttgaattttcacaatccataaacttgatctagtgaccaaataatgcaaataagattcttgttaagaaaaatacatataaaatttatttttgtctcatggatatttttctttttattctactttcttactttaattttaacttgttttattgagtggttaaattttagctgcttgtacattatatttttttgacttgttttttactaaattactttatggattatctcgtatttacattttaggaactcagtagtgctatagaaaaaaaaagcattaatcatagatattgacatctataacttctctttaagaagtgaaatgatcattttcttttagcttggttaaaaacgttaaatgatagaatactcattttagaaattttattagtttactgaaatatcatttacaaaaaaatagagtatttttatattaaagggtaaaacaataattttagccctaatttattctagaccgtctataaaagattagttgataactatggcaaaaataatgactaattaataacttacctatattacttataaagtaaactataaagagtaatttacggtataaatacttaaatgtaactctcagtagcagataaatacttaagtttaactctcggttgcagataaatacctaagtttaatttttgatggtaataatacataagttatatttttagaactttcgtaggtacctagtcattaagtgtcaagtcaatggccttgtggcagtccctgattagtctaagtcgttaaatttttattttttatttaaaaaattaatttaaatatataaatgaaaaaatgacacatggataatgacttgacacttaacgatcatgtgataggctagctgtaggtttgttttttgaagtattttagacatgtgttttagttaattatattcattttgtataaaattatgcttattttctacttgtttcaagtctaatgctaaaattttaaaatgaaaaagaaacatgttatatgagatgaatataatgaatttatcatggaatttggaattcaagatataatggggtaaaagattctaagttttgaatgctcaacacaccgtttgtgattgaaaatcaagtcttaagcttcaagacaattttttactatgacatgtccactttcaggaaaaatgttgtgaataaaaatttagatctctcttttaactttctaaaacatcttaaattattcaattctgagcaatattgaaagaattatggcaaaaatattatcactcgttgcaccaacaagcttgttgcccaaaaatcaaggacccagactgcaaaactgaaagggctatgctgcgttgactgacaaacagagcacattttgtagtagtgtttcgttggcaggtgttcacaactcatattgtcgctatatattgttagtgttacattttttaagttcttaaagttggatgatttcataattctgaaaatggaaaaatattattcttgtttatatgttctaagtgtttaatataatagtttatctttgcattttgcgctattgtaaggagaaatttaaagagaaatattttcatattgaagtgatgaattttatgcaatattttgcgcaattctaggttttcgcttttttagaacatggttgaaaaaagatttgaacataattaagacatgtttcatttaacgccctactagattagtcgcgttatcgtgattttaatttattgtatactcctttactaatcaaagagtttattaaaaaatgtgaatagtttaaattttcataattaaactttcatcttaaatatataaatagtttacataatttaggatctcattttaaagttacaaccattttgtaaaatacttagttacaaaaattatcgcctagcggatcaaaataaagcatgttatcccaaagatcgaacactctctgtaagatcctcgctttaagcttttattgggcccttacacccacagaataatggctcttatacacgagtacgccactctcgctgcttcctggattgacgattgaccctatagaccaacaagactgtttctagcgtgctttgtcctcactctcatgttttctaggaaaatttcccaaaaggtcacccatcctaaaactacc

SEQ ID NO: 386733 - DNA, 758 bp, Cannabis indica
atatatatatatatattgtgaaacaaagcacttgacgccaacacaaacacttcaagaacacaaccaatttaagaaacaccaagaactataggacaaattaaacaagaaataagggaaaagaacgtcaaaaaaattaacgagttcgagctcagtgcaatgcaacaaccgtcattatcttattgatcatcaatgtttacaaggttacatagatcttaatcacaccactcaagagttacaagacactctttcctcacaatggttttgaaccaattctctctgttataccagaaattcggttgtacttcagaaagtgatacgtatcaatctcagagaatatgaatcaacaaatataatggtaattatatcattaaatgcaaaatggaataactctataaaagtagaattaatagagtatatttataactcactaactgcacagtcttaagcgagatcaaaatgtacaaactattgattcacgtattgacgagaaactatttcgcatcagaaggaataatcccgagggagacatagacaacgcatagtgtggcgtgctgccccatggcacacccacaatagggccattttgtaacatgagcatgccttggtgcttgatcattagtcaagtcttgcaccaagcacctcattggggtattttgtaacatgagcatgcctttgtgcttgatcattagtcaagtcttgcaccaagcacctatgggggttggaaaccttttgttctttagctttctttctttgtattt

SEQ ID NO: 386734 - DNA, 1457 bp, Cannabis indica
caagacttttcttaattaaaaacaaaacaaagatatatgaaagaattgagtggttgtataatacataaactacgtactgatgcaaaagccaaattagtactcctgcaactgcaaagccaaattagtctattcaccggaaatgaagaatcatttgcccttcctcactcttatctttagcttcatcatgatcatgatcgtgtgttgttgctctgttacaccacaacaacatactcttaacaactctttcattagttcccctccagtaagatgcctctctcacataagctctgctttgttgcaactaaagcaagagtttgtctttgaaaaaagatttgacgattattcaccttcttacccaaagatgaagttttggaaggaaggaaatgattgctgcaagtgggatggtgtcacctgcagcaccaaaacaggacagcttataggccttgatctcagtcaaagttggcttcaagggcctgtgcattccaatagcagcctcttcaccttacgtcaacttgagcgactcaaccttgcctacaacaactttagcaattctaagattccatcaagttttggtgtgctttcgaggttaacccgtctcaacctttcttcttcttatttttctggtcaggtcctgtatgaaattgctttgttgtccaatatgattgctcttgatctctccttctcttttgatgtaagtctttcatatagaacaacaataaaacttgcacaaaacatgaccaagttagaagaacttcacttggatggtgtggatcttccttcaccacttctacttaaatccattgcaaatctatcctccttgatatctctatctcttagttcgtgcaatctgtatggtgaattcccacaaaatatttttcatctaccaaatattcaagtcattaatgttgcatccaattataacttcagtggttttcttcccattaattttagttcttgtagtaaactaaagtcattgaatctttattacagtagtttctctggaagactaccatattccattggcaatctcaagttcttaagtgttttaaatctctatggcaatgatttttcagggactattccatcagctttattctcaatgcctagtttacgatttctaagtcttggagagaatcaatttacaggcacactaaccattccatcttcagttaagaatttgtcatgtctcttatctcttgatctggttgccaacaacattaatggtcaaattccatcaactttgttcgaaatccctagtttagtttttctaaatcttgaatataatcagtttgtgggtcctttgaccatcccaaatatctcgttgtcatcccaattgacgagtctttgtttggctgggaacaagttaagagaacaaattccaagctcaatttttgaaatgaaaaaactggaacagctctcctcaatgacaattacttagtggcacatagagatgcaca

SEQ ID NO: 386735 - DNA, 1989 bp, Cannabis indica
aaaaataatctaaaaatagttttaaaaaatttgtgttaaacaccattaaatttttaaaataacaaaaactgttttctattctcacttttaaaaacaaaactttaaaaactaaaaacacaaccaaacacgctcttagattctgaattctagacaagatctagcttgtttatggtgaaagttgacttatattaaaatagtattttctagctaaaaagccgaaataagctgaaaaatagcttctgcaacatgtttagagcttgctcagcataagaatttaatatgagaaaaatactaacctggctgaattggtgtttgtttttcattgaagtgtagattgaaggaataacagggtgtccagcaaagcaaactatgtacaaactcacagcagtaggcaatccactcactttaaccaaactccctttttcatgaaacccaactccaccaaaaacaccaacacagaaaattgaaccaagaattataagacaagaaaacacaccagttgcagacacatatgacagtatactcaactcagttaacatcatagaaggtaagataaccaaagcagtgatcaacacaaatgattgtcttccctcaataactaataaatctccaatctttatcataaagtttggaaaaagttttcttaagttgtcactttctaagatcataagtcctatagccactaaataaagctctgagttcattataatcatcactatgattctaccctttttcccaaatgctctctctgctatgtctaagtaactttttattgttggatcagtatccatacatgtcttgagtagaattcctgtgtagaaagtcatgattgtgattaggaaaaacaacactaaactcaaccatcctccacttgagagagcataaggaactgttagtaacccaattcctgaaaagtaaatcataacaaattagtaacctttttcattaataaaaagaagaagaagaagaagaagttgtactaacccaaaaaggcatttgttccattgaagcatgcttttaaaaaactagatccttctctttggttttgagctaataaaggtgtgtttgactcacttgccatttggtttttgctttagttgaatctgtaaccagaattgttaatacttatacaatattttcagaagacttgaagtacataataaattgctttattttttctctataccaagttttatcacaattcacatgtggagatggcaacatattggaatctgtgtatatatatataaatgaagtactttatattagaagtgctatgttattaaatctgatttagactccctttcaaaataaaaataaatgattcatcttgtcctttttgtctacatttattatatttatgcctattgtgtacttaaattaaataaatgaccttgctaggtccaaccacataatttaaatactttaaacttatctacttaatttactatatattgattaatttttaaattagtgctactaattctatttatactatattctcaatagggtcattatgcatggtaagtcccctccttgcaaatataaatgagagagaaattaaagtctgaaaatgaaataaataaattgagggatttatcttcaaacaatgaactctaaaacaataaaaaaattaccacgtcaaaaaaaaattataataaagaatagatagggaactctacatgtaatgagctcattatttttttttattaaatttttttaatagcattttaatgatactgttacttttttggaataattacatgaacattaatagttgtaaaaaaaaattatatttttatatttttacgatattttataaaattataaaaaaaaaaatacataaaagtaacaagaaataaaatcaaaataataacaaagcaacataaaaaataacatacaaataataaaaaaaattaacaataaaataacaaaaatataacataaaaatacacttaaaaccgttttttatgtaaataaaatctaaaa

SEQ ID NO: 386736 - DNA, 2077 bp, Cannabis indica
attattattactgatattattgtatcgtgtattccaaatattatccctaataagatggactcgttgacagtgaagaattaacttacaaaactacgttaaaaacattatgttgttcatttattgctataattaatttagtagttcatttattacaaaaaggctaatatttttggttaacgaaaaattcgtgttaatagtttggtgctttcattgagagcatttgtagtaaaaactcaaaaaataccctcctcacagacaacaactcgaaatctgtacttatggtggacgatactcagcgtaataaagagaatcagccaaaggagacaacctgtcgccctggaaaggaacctcagggttcatagagagccaacacaactgaaactcctagttctagaaggaacgatggagatttcaacccaattggtgaataaattctagaaaggcgaagcgaagacgcctatgatccaagatatttcccattggtggaactagaaaataagaaacttcgataatgcctggctaagttaaatcggaggaatgtcgagttaaaacgataagcagcggcagccaaggctgcatagggagccactcttactcaacctgatccatctgtaagacaatcacggggaaggccccaaggttctaggaccagaagacaagaaaacaatcaagggaaccccacaaacactcaggaagaacaacctagaaatgtgaaggatatcccaatggatagaaaaaacccataaaacactagaaatacgagaaatcaagaggctcgacgtgacattcagagaacttcccatggattctcaaaccaaggattagaggattagaggaacactcaggaagaacaacctagaaatatgagggatattctttataaagaaactttaaataagataagattagaggaaccaccattatccacaactcaaatgcaagaatttctagttgttgatatcccttctgtttacaatgtgttgataggtcgtcataccttaataggaatgagggcaataagctcaattaagtaattgtcactaaaattccccactcactctggagtaggtcctattaaaggcaaccaactattagctcggtagtgctatagcgtggaactggaaaatagaaggaccaatcatcaattgatggtgattttggcagaagaaaatgagaaagagatagaagatttggatcctaggatccatgatgagaacaaccaactcaagccaatcgaagaggttgaggaggtgaatttagatccaaataatcccactaaatgtgttaatatttagaagggtttggaggaagaactaaaaaagcaactaatcgcctttctaaaggcaaactaagatcaaattgcttggagttattcaaacatggtcgggataaacccgaatgtaatataccatcacctcaatattgatccaaatcatccttcaaaacgtcaaaaacgatggcctcttagatccttgagagacaaaatgcactaaaagaagaggttgataaactattaaccaataacttcatatgataagtattttatccttcgtggatatctaatccagttgttgtcccaaaaccaaatgggacatggagaacatgcatagatttctccgacttaaataaagcatgcctaaaagattactttccactgccgaggattgaccaatcagtagatgcaacggcatgatatgaattaatgactttcatggactcatattcttgttacaaccagattaaaatgcatgtactagatcaagaacatacaagcttcgtaataaatatgagactatattgttataaagtcgtgcgataagaattgaaaaatactgaagcaacataccaacacctcatgaatggtatgttcgaaaactagatagggcaaaacatggaggtctatgtcaatgatatattggtaaagaatgtcaaaagcgagaaccatacaaaggatctcgcagaatgcttgccatactgaaaacatatgatatgaaattaaatcccaagaagtgctcttttggggtttcctcggggaaattattaggtttcattgtgaatgcaagaggagttgaagcta

SEQ ID NO: 386737 - DNA, 898 bp, Cannabis indica
ttatatgctagagttaagtagagtgttggaggtcaagtaggtatattttaataaaatataatatgaaggtattttttaattaatggatacaaaaaagtggtattgttaacttatccccttccaaagccgctttgcagtaggaccatctcaaacttttatgggcttagaacaaaattttaaaaacgaaaatctacaaaaatactggaatttgagttaatttttacaaaaatactgtgtttttataaaacaacagtggaatacaaaacagaacaactaaaaacaacagtggaataactaaaaaataacagtaaaaaattaacacggtgcacaatataaaacttatatagtatatttgaaaaaaattctgtcctacaataaaaaagtaaaaaaattaaaattttcaatccttttaaaaataaaccttttgagaccttatggactaatgttaaaagaaatttattttcttagaaaaaaaaaattggaaggcctcttgactgaagtgaagaaccttggacaacagctctgatgtgcaacattataaattacattttataatatgggagacttttatgaatttggtatcacataacctatcccactatttttcttctcattcaagggtcaaggaacatgttttgttttgtgttgttaatttttgttgataattttgttgaaaatttatatggtgctcccctagcctagaatcattttttgacttcacgccaaattgttttcgagataatttcaagtctttgtattgcccaaaagcaaatgttaaagctcacatagaaatttgtagcactgctacattcactaaggttctttttgaaagtgagttatgttatatatatataaatatatatatatatactagcaaaaaactacgtgcgaggcacgt

SEQ ID NO: 386738 - DNA, 946 bp, Cannabis indica
acacttgctttttatataaatgggtgatttaaatcaaataaactaagctgaaactattacttacagtagactaagaagatcaagccctgattgaaccactataattctcttgtcttttctataattcttctttcgttttgactatttcgtagtttatactttgagtattcgttattttaggtgagtacttacatgactgttaatgaggttttttttttttattattttgcttgaatactcgtatgatttagtgttgtctaaattcctctgacaatatcttattatttttggctttatgttttgtcttctttttctcacaaacaaatggaaaggcattgcaagcttttatcacattcggcttagcattgtcatagtactattgggcaaaggcaacatttaatttcaattggctgattgcaatttttaaaattgttagattttataaagcctttatacaaatatcgtcccttaatttttttttttttttttgtaaattaaccttttataaattacaaaaattaaatctcatagtcattatataacaaattttctagaattgttgacacctcgatcaaaccagatactttgttggcatacgtccaattagccacgtgatgggctacaaaattacaatactaaagaatcttaacaaaattacctcccaccaacaatttagaaaaagaaatccacctactaatatagctatcaatctcccatcttgataaacttcctctaagaacgttgatgatgatttctgaatacaacaaagaaccccaagtttttataaattaaataagctaccctctattaagtataaaggtaaaaataagtccctttaatcaaatatgatttttgaaaagaacaaaataccatctttgatgttattttctgtttactcaaaatttaaaaaaaaaaaccatttaataaaccttaataaatataaaaa

SEQ ID NO: 386739 - DNA, 1192 bp, Cannabis indica
gtattgagtgtcaataataacttttaaaggtattattggtgctcaataacgcccaatgttcaattttcaatacatgaacaagctttaattatataagtcaaactcaaatgggttagtagaatgagtctatctcttaaatcacaatccaataataatcaagttacgtagtcataaaaagacagaaaccaaaagatttgagttattgattgattttaccatgtcacgctcacttttactattcaaagttttaaccttttcttcttcacaagcacattacatcacatcatatcttcgtttttatttctttcttatccttatcatttgtttgttttcatttcttgccaaagtggtcggtcggtccaatcaaacactttcatttcatttaggtacttttttttgggtcatcaaaatttcaaaatttgaactttaatgcttctaaatataaattaataaacacatggtaaataataataaaagatctaaaaatagagaatatagaataattatataataataataataaaagaacaatcttttggggccaccatatgaccaaaatctatacaaaatataattcacattaaaatcttaggaaatacataacacaacacattccttttgttatgttttcacttggtgagattcaattatgtctacattttcaacaccatattattattattattatccacattttgttttaaattattattttctttgaagaagcaaaaagtgatgaagtgaaacaacatatgtgagcctatttacatcttacataataagtacccctaatacaaacctccccaccccaccttatttttgtacctaaaatcttacatcttctatacaagagatacaaaatccccacgtgcgtgacaaagtcaactcttaactttttttactacagcaaagaagtcaactcaatagtagtgactgttatattatttttaatataataatatgtagattaaaatgtggtaatatataatattatgtgaataatatatattaagtgtatggtaaataaatgtgtaacctataatttaacctacacttttgtaacctacatagtaacttggagaggagttacaatttgttgtcatttgtaactcttgtgttgatcacacattattagtgtaataaaagggttgttacacaatttggtttaaggatttcaaaattatgatgatat

SEQ ID NO: 386740 - DNA, 944 bp, Cannabis indica
tatgtaaatatctatgattttatttgctaactagggttacgctcttttatataaagggccttaactcaaccctagaaagctaagtcttatctaattctcatttaagcgtctaagtcattacctctcaactctaagtcccaaaccctagttttctcctctctttctcttctacacacacaaagggctttctctcttcctctcccacacacctccaaggccatatctccctctcattagagatctgcctactggttcatactttgtaaccttaaagagagctatatcatatcccacctatagtgtatgaatagtgttatctctcactatcaatacaacaaaaagggaagtaggtcatcacccgctaactaagggggccaaacctctataaaaatccttgtgttcttttactttatagttccaattatataactcgtggcaagcatcattgttaatacaactctgctgtcagttggcccctttttgcggtaaacagtttggtgctttcattgagagcaagttgatatcatatctaagcaaaagtaatggttaacacaaggagaactccggttgcaccatctgcatcatcgggtcttcttcaagaccctatgactgcatatcttggtgtccatgttccacccacgactggaatttccagaacattgctgatgtggtcaatcttgccattttagctagcaccacaaatcttgccaccacagcttgccagatggacacaaccatcccgatggatttgaacaataggcccatgtctcctagggaggacccgtcactggttccttccactaaatgaaagatccacgtggagcaacccctaggtgccataattgaatctagccccttgtattatgttgtagagatgagactaggagttggccagccaaccattggcaagccccatgtagacttgggagaagatctcgagttag

SEQ ID NO: 386741 - DNA, 1101 bp, Cannabis indica
acattgaactaagaaagaagcagaatggagtagcagctctccactaatttgcatcacaataattcaacaacatacatgcaattaattccacaacaattagctgacaatagagcaagcatacaaaacatagatattcaaaaactggttttacaaattacaaaccagccatcgtatcaagacatagcatatgaagatcacgaggcttgagaaataaataaccagtttctatcaatgtcaaacatattttaagtagctaacaatgttgttgattttataattaagaaaatagaaaaaaaaacacaagaagaaaagggaggaagaaaagaaagagataataacagatcataggatttttaaaattgaagaatgagagatttacaaagacaaaaagatattgaaatgtgcactatgcttttatgttatattgcacaacttccaattcaaaataaaaagatatgaaccaagggagtacttagttacatatattgatgataattgtaactggttactaagagcatcaaaatataagaatgcaacaacattcaaagtgaggaagtatgtccaggatcacaaatgctcattagatgtaatgggagaccagatgcaaccaaatatcaatatcattgaagaaatagtaagaaaaaaattgcatagaccagaagatatcgtaatggacatgctattgtgtcgatgggatatcaaaatggttggataacaaaaaaaaaatattagaattggcgagagggagactcaagattattcttatcaataactaccaatgtacctatacatgctgaaagtaggggtgttcgcggtgcgggtggtgcggtttttgactattttttcaaactaacccgcacatgcggttttttcaatttctcaaaccgcacccgcaccacgaaactaaaaaaccgcaaaaaccgcaccgcaaaaaatggtgtggtgcggtgcggtttatgcggttttgcggtttggactatcattaaataattaaactatcacaaatataacaaagtttgagcaacacttgcaaaaataccataaggcttgaaaataaatatgaaaaaaaaagtttcaagtttcaacaatgcaataattagt

SEQ ID NO: 386742 - DNA, 2262 bp, Cannabis indica
gtagtaataataagacatcctaaagggtgcacatgcattaggatatctagctcacccgccgtgttgtgttttttgttgttattattcatagtttaataaggggttctaaatactttaataagtaatattatatattaatcataatgctcataattagataaatattaagagaattatctcatataatttttcttaattttttttttcaaatttacgatttggatttctaaagtggttgcagtgtttattgcaatagggatttctatacgagtttttgttgcgatttaggttgcaatagagatttttatatagaattctgttaaaatgcaaaaaaaaaaaaaaaaaacaaaaaaaagaatttagaagtagtaaaaatagaaaaaagtcctaaatattatgtttatgtgtgtgtttcaaatttattaaaagataaattgtgtctattttgtcctatttgtgagatttatattacttacgaaatcttaatattgtaatagagttttaataattattaaataaatgatatatgatttaatcaatcaaccaaaaaaaaataactatttaaaataaaaaaacatatttaaaattatttaatcgacattagctcttgtgataataataatactctgtataggcaatgatttttttgaaattaatactagacttggtcaaaattgtgtcatatatgttagaatattttataagattttttttttgtgagtcagatacttttttttttttgaagaaaaagaaggaaacataatacacaacataggggaaaggccaaataagccatgaattggcatgataggcaactgaaggaaaaccttcatcccacaaaatagaatccttaacaagtaaggcactctaagcatatacaatgggccatcctattatatagtctaggaacatatttgaccccttaacatctactcgaagccagaccttccttaatgtcattgaccaaaaaaaagtagcattctcgcttactgtggtcctgctacttacagcaaaaatcgcattctagcaatcaaaatggatgtagaaatcgttaatacccgtatctctggcgatagagatggcttttttgattgcgccttcagctcagccacaaagggaaataaggaattatgtcaaaacttgtgatcggaacgcacgcacctgccaagatgatctcgaacaatacccatcttagtatttccattgtgactttggtactcatcaagaatgtttgtagccaattcaataacatctccatatttaggggagaagttattgtgtagcgacaagtttttacaataccaaagttgcgacgacaccatcacaaaaagatcgaagtctctgattgagatattttccttcatggtggagaagaaaatttgcaagtccaggttctcccatctcttgatattcttgtataattaatccacaatttttccatacttctttaacagtcgaacgcctccataaagcatggttaattgtttcttccattttcattcccctacagcgccaacaattttcattgacttccatacccctacaaaacaaaacactgttagttgggagcaacttgtgactaactttccacagaatttttttgacttttggtggaactctcaaggtcgagaggtgtttccaccatctctcactgctttttatgtctgagttttcatcgataattctttccttcatagctgtagtatacccactccgaacattatattccctattctttgaaaaattccatattacttcgtcctccatctctaaagagccgcattgaatctccaaaatgaggtctgcatcatcctcacaaaagattctcttgataaactttgcatcccattctccattagcaaggcgcaggtcagccaccttgatatcagtaggaatatcggggttgataagtgatttgaaacttaagggtctaggcagccacctatccttgacaatatatcaatactctcccatgacccaactctccatctagctcccttcacaatgatctctctaccccaaagaagagtcctccacaccgaggatgtcgttgacccgttcttagcattaaggatggtagaattaggaaaatagttgttctttatactacaagaataaatgggtattggcacaattaaattagtgccaatctttagattagcacatgtcgtgcccttttggtggtgccaatatgttcgtgccaaaatgttacaatcggcaccataattggtatcatgccaacaactagagatggaaatttat

SEQ ID NO: 386743 - DNA, 823 bp, Cannabis indica
gggataggctttacccctggcatggttgccgcagaagtcttcatccacttctatcattagccgttcaacttcggctttggtgacatacctaaggagaggcatagaaaagctttgtctatacattatcgtgtctaggatcgtgtacctagcaatttttcttctcaatttgtttgcttcatttttttgttctggaaaggctttagtttggaggtaagttgcgataggtgtcattcatgttggagtttcatcaaccatgttgacttcatctaggataataatgatgggttcctcttggaaccgcatgagcaccaatttttctttgccacaaatggtactggttgccatatgggcaagtgcatctgttgtagcgttctgctctctggggatctgcctgattgtgtagacttagagtttacataacaagtctttgatttttctaaattaggctaccattttttcacctcaagctatctattcacctaggacttgactcacaaccagttgagaatttctgaatattttaaggtggttagcacgtccttcatgtgccagcttgaggccagctattaaggcttcgtattcagcctcattgtttgaggctttgaagccaaatttaattgctctgtgcagttgctgtccccaagtgttgtaacggcaatgtctgcatcggacaattgggcattgtagcttccatcaacatggaatttccatgttagttctctaggattttgtttctactcttactcttgcttcttctctggatcttgcttttctcctgtgtctcgagtgatctcaagagttaagttgctgcactcagccacaa

SEQ ID NO: 386744 - DNA, 3391 bp, Cannabis indica
cctactagagaatcctccccctgcagcaaatgccacacttgcttacctagcaatgataagttgtagtctttgaggttacggaagccaagacccccgctacttttgtatcgacttaaacgactccatttgatccatgtaattcctcgagatcgttgggaggaagtcccccaccaatacttggacatcaatctttcaagcaaagtacaagtttcaataggtagaagaaaaacagacatatcataagacggtatggcttgaacaactgttttaagtaaaatctcacaaccagctttagatagaaatctgccctcccaacttaagattcttttttccatcttctcttgaaggaaattttgaatagcttttttccttctacacaaaatacacggcagccccaaatagacactttgatcacttgcaggaaccattcccatccttgcacaaagtctgtcacgaaggtcaaatggtgtattagcactaaagaaaatggatgatttggccctattaacttgttgacctgatgccatctcaaacatatgtaacaaccgaagcacattatcagcttcattctccgttgcccgacaataaacgtagctatcattggcaaaaagcatgtgagaaatagttggcacaccattagcaaccttacaccctctaatgtgaccactctgtttcaaacctctttatcaatgaagatagtccttccacacaaataagaaacaagtaggggataaagagtccccttcccgaattcccctactaggaatgattggaccaatctcatgcccaccatgaatgaccatgtactggactgtagaaacagtagtaagaatcaagtcaataaaccggttatgaaaacccattgttctcatcatagccctaaaaaaacccctctcaatacgatcataggctttactaagatcgagtttcaaagccatatagccagtcttccctttccgtttgcttttgaaatagtgtacgacttcataggaaaccatgatattatccgagattaatcggctcagaataaaagccaattgattttcagaaagatttgggggagcatagtcttcaatctattagccaacactttagaaataatcttatacaaaacattacataaagatattggcctcaaatcgcccatgatactaacattttttttctttggaataagaataatattagtgcaatttagattgtcaggtaacacacctgaatcaaagaagttcttgacttgtaacaccacatcatgaccaaccacatcccaacatttttggtagaacctggtgtcattccatcaggccctcgagacttatctgggtgcatttggaacaatgcactttttatctcctcttcaagaaccggactcaacaagtccctattttgagaattagaaatcgaaggagagataccagcaataacgacatcagtaagagaactagttgaagtgaataattcagagaaataagaaaggatggcatcttctaatccttaattccaatccacccagttacccaagtgattccgaagccttataatagcattgtttttcttacgcgatgtagccttggcgtggaagaacttactattcgaatctcttacacgaagccaaagttgtttcgaccgttgtttccaaaacacctcacgttgagtaagaacctcagccaatcttttttctgcaattttaaattctgccatagaagcatcatctcttaatctcttcaaccgcttaatatcacttttgcacctcttaatacggtctttgatgttccctgtgaattcatttccccaacttgtaagactatccccgcatcttttaatcttctttgtaattgaacctccagcattggcatcccatgaatcttgaatcacttgcacacacagacgctcctgaagccaagcgttctcgaatctaaactgacgaggagctgtagttacattctgattcaccaaatcgagcaacagaggacagtgatctgaacttgttatttctacattgataagctgggcagagttaaaaagattaatccaagaaggagtggccatagcacgatcaagacgaatttcgacccaattttcagacccacgaccccgttcccaagtaaaggatatccatgtagttctaaatcaacaggatggcaatcagagagagctttttggaacccttcaattaagccattaggataccagttacccccttttttatctgaatgagagacaatgttattcatatccccaattacacaccaaggaagtgaagattcatccgcaagcgtgcgaagcaaattccaggtcttatatctttgagaatggttaggttcactatacattcctgttaacctccatgtcttcttatctgcagtcgtaattctcacatcaatatgatagatagaataccccaacacttctaaatcattttggtttctccaaaggagactaacaccaccactatgacccctagcatccactgtaaacacaccttcaaaaccaagcatcacacgaattctttcaagagattcctttagacttattgtctcacaaaggaaaataaagttgggtttctttaaaaaattatttctatttgttatacactattttatcatattttatagaaaatgtatggtgtgttgctcctatacaattatccgactccagctaaatatatatatatatatatattcacactgatcaatatatatgactcacgtaaataccatgtcacaagatattacatatataatgtaagatctcggtttgatcgagtcaaaatcaaaagaaatatatatgtaaaaaaaaagcaaatagtcagacccttttccatcactcactcgccttcttcttcactcactctattttctctctcttcaaaacacaaaagaaaaacatacaaaccccatcaccggcagactctggcgacccatctccggccatcgcccagccccacgcaccgaacaaaacaaaactccaggtgtcggtgacttaaccccctaagcggcgccactccttttttagctgctagctcgggatcgcaagtcgaagtttggttgttcaaactttgaacagatttttcggtcacctccggtgtccgtttgatgggccgtcttcaccactaaactcagcttgacgaggagaacaaccaacactaaactatttcacctagctcgctagtttttctagtgatatttttgtagctctgcccctttctggcgacatcgtgtactgttttgacaaacggtcggcatgggtgtgatctactcgtcgaggtgattgttttgatatacactacccctattttcggcgatgttttcggtacaccaatttttaccgccaccgatagttaatgtacaccgcttaggtgaggctttggaattccaaattttaaatatag

SEQ ID NO: 386745 - DNA, 1990 bp, Cannabis indica
ctacccagaatagtttcacctaaccaaacagcttttgtcaagggccgaagcattatggagaacacaataattgcaagggaaatcgtttattcaatgaagaagaaacgaggatcgagaggctttatgatgataaagattgatatggaaaaggcctatgacaagttggattggaacttcatcatacaagttctctcttctctcggattccctcctccgttcttaacttggatcaaggcctacatcaccgttaaggagattaagctgcttcttaatggttcggtgatggggaaattcaaaccttcttgcgggttgtgacaaggggattcgctatccccctccttatttatcattgcggaagaaactctatcgagacttttcttcgaaatggaaaataagaatcggatcaagggattcaaaatgggaagacaaggtgactcggttacccatctcatgtttgcatacgatattattctgtttgggcaagctactttgaaggaggccaaagcctttatggactgcctcaatgagtattgtagttggtcaggccaatcaatcaacttcatgaaatcttctattaccttcactagagggattcctcgagctaggactcatgctatctcccaattccttgggatgaagagaatgttgcctaatgcttcctacttgggaattccgcttttcaggtcttctaaacgaaccaaagacgctgattttattgttgataaggtgctgaagcgggtccaaggttggaaagccaaattggtatcaagcgctgggaagtcttgcctcattaaatcagtaggctcagccatctcaaactatgtagttgcttcggatgtcattccaatatccacagcaaagaaagttgataaggctcttcgtgatttctggtggggtgaccagacagggagaggatcgctgcatacaattgcctgggaagttctgtgtcgccaaaaggtttgtggaggactggggtttcgctcaacggaatccatcaatgtcgcttttctcatgaaatgggcttggaaagctctaacggataacaatagcctttggagcagagttgtcaacgacaaatacattcagaatcatgattttatggatgtccaagctaatggtgcggactcgattctgtggaaagcaattttaaactcgagatgcctcttatccaaagggttgtgtcgcaaaattggtgatggtaagaccacttcaatctggttccatccgtgggttcccaatggtgttctccaaccccaaccccgtttggatgctacagaaggcataagcttagtgaaaaatttcatctgaaacaaccagtggcatgaagacttgatccggagatggtttgatcacgatgacgctaaaagaatacttaacatcacgctgcctagtatcccctctccagattcctggatttggctcctggagcgcaatggtaaattctttgttaaatctacttatcgggtggttaaaaacttggaggcttatgattctaacgatgcaaagtggagaattatctagggggccaacattcatagtagattgaagatgctgtggtggaagattctatccaacaatctcctcacacgaagcaagctaagctccatgctctacattcgcgacaccggatgtcctatgtgctccttagtgttggaggattcattgcatctcttttggaattgtcactatgcgagggccttatggtttggatgtaattggcatttgagaaccgatatcccaggtttcctagactgggattcttggttggcttggttcaagatggatgctaatcgcccaagtgaaatcaaattcaatgttttccttgaaggagctgcaatcatcttcgaaaaaatttggagatagcaaaacaatagaattcaccatgcaacagagaccattcatccaatgatatgttattgagaaaatatagaatgacaagaaatgatttatagaccattcatccaatgatatgttattgagctaattcgaa

SEQ ID NO: 386746 - DNA, 970 bp, Cannabis indica
atttaggtttgattgagttggcgggtcaatttttggtcaatcaaattccaccactttagtattggtggtaccttgttgtcaagactaagtggtgttactaccccacttaatgaaaatgtctcaactgctttgatgatcttgcaaattgtcatccaaacaagctcaagtcaaaatgattaattagaagaaaacacaaatattggaaattctaccttgcattctcaaaaagagtttatcgatacactttttgtattttcgacatcaaaatagttttaattttttttttcgtataaagtgtacaacacaataatttaaaacatcctacaaattttttgtagaaattaaaaaaaaagagagaaaaaaattaacacattaaaagtaaaatttaaacactttgttgcatgctatggttttttttttttttatttattttatactcgagtaaaatgaattgtttgaatcttgttttctatattataaattattttgaatttttttgaatcattatagatattaaaaaaggctttttttgggtatatactaaaatgacaaaaatattaggaaaattatagtaaatggccccaaatcataggactatgttagtttatgtcctcatttaaaaaaaaatatagcaaatgaccctaaatcataagactatgttagtaaatgtccttatttcaaaatcattagttttttttttttttattttttttagaattagaagcaaattatttaaacattatggtatatctatattagttttgttaaaatcttttttattttaaagttatgtcaatttttttaattttttatgagttgttttgggttgttggtatatagattttgttgtacggtatatttctattttgttgtatggtatattattattcttagatgatatttattttttattatgatatgtataatagtggtatataattttattagcataataaaaatattttaatgt

SEQ ID NO: 386747 - DNA, 2296 bp, Cannabis indica
aaaaaattatgactaatggtgcagaactatcatgttaaaattttaaataattaaataattagtaatgacaaaattaatacatcaagaacaacaatgagataaaataggggcaaacatagtatataaaactagaaacaataaatgcaaaaaataagaaatcaacaccaagaaatatattggtttaagtcctatagatcgatgtaatctatagctctactctaatcctgaaacaccattgaaatccttctttattgattgagtaataatatgtatcatacagtcgagacgagattctctattgagttctcactaagtgtttcaactctcacacttagacccaagaatcttcttcatctacagcagattcttcttactaactcaaacccaatctctctctcttttcactgcattctctacgtctcaatcttttctctcacaaagtctcaatcccaatatgaatcgtgtcttcaattttgtactctatctttcttttaaattaactagtcaatgtggaatttatagtcttaagatcaagatcctaaagtcagtagctgcatggagcaaggttgttaagttagttaaaaacaattaacttaaccaaacttctcattgagtgaagtctctacgtcagtttaagtatcaacgcctccgagaacatgtatgagcttccagactcacggactaagtacactcgttgatgatgcttatggataggatatagtctacaagagtcgactatccagatctaccattccgtgaaggacaactagccaatttgaactcctttctagagggaggctagctatcctgaagactgaacctgaagtggacatgattgacatctgaaaactcccttccggactcaactatcattttacaagactccttctcggattggcatccgtgagcgaacaactttctaggaatgacatttgtggagaccttttcatttgaaggaactataccacaaattctacgtagttacttcaaattaaaagaatgacaatgatgaagaaagaatgcaaccatcattggttggtgttctaggaatctcagtatactaacttctgagattgattaagtataagcaatgcttgaacttgtttaagattaagaccttagtcccaacatttatcttcagtactaaccttctgtaaatcaaccagtccttcttctatcttctctctgatccagtagaatcttatatatctatatatttgctcttttcatgataaatcgggttcttacatagatggatggatgattggctatctgaatacacagttaattcccctttgatttgttttaacatcataaagtagtccaaagtcataatgcttccttaaaagcttctctggttgccatgaactctgcttcagtggtgggaaaagtataaccatgtattgtaattgagccttccagcatatacagtttcgttgtcaagaaaacataggaagtgattgattttaccgtatctctattcgagtcatagtccacgtccacaaacccttttaactctaatcctccttttgctttttgataggttagaccatagtcccaagtgcccttcaaatatctcaataatcatttaagggctttccaatgttccatgcccggattggacatgaacctgcttaggatgcttacatcgtgagctatgtccggtctcgtgctcaccataacgtacattaagcatcctagaaccacatcataaggtacatcctgcatctcttctttctctttcatactattaggacatcgttcctttgacaaaacaaattgaccccctaacgaaacagatgtactctttgcatcttccatgataaacttctatataattttcttgatgtacctagattgctttaagttgatggtcccttcgttctgattccgtgagacttccataccaaattgaagtttaccctgaacagaagaacatttttaatttctgaattaaggggtcattttaaccaaattaaacgtgaaactaatcttcatattcacatcttagtagtacaaattttttgtgactagtggagaaaaatattccgagatgggtctaagccacatttcacaaaggggtaccactattagaaatgaattttttttactattttgattaaaatgattgttaatgtttaaaaactacttgttcactcaatgtgtccaatagaaaagtaatgcacaacagtcttagatatgtccttatgaaatttcacgattttttgagatgtgtagggtgacattttaaaagaacactaatgagttaagagtaaggaaaaaacttgttaaaatt

SEQ ID NO: 386748 - DNA, 650 bp, Cannabis indica
ttgttaatattttgttatttgtaagcacctaatattctcacattcttatatagctcgtttaacttttttttttttttatttttttttataaaactacctatttactttcttctccatcaatatcttctcatctttctcttgtaacttctgaaaacctctatcaactttttttttttcatttgcccatgttaatctctcatcttctccattatcacattgtctcaaaacttcaaacttccattgctaacaattcttaacccaaatgtttcctcttattttttactcagagttttcttacaaaatacaatttttaatttgtttgtgggtttcactaggtttggttccttctctccaactgtttaaaaattcttaaaattaccctaaaaaaatttgtcaaggtattttcaatagtatagaaatttgttcctaaacaacttatagaaaatccatcagtcataactctctcactattttaaagaggtagatgatggttgatactgtagagaagaggaaatccaaacatgtgttaagtctaaaaataaagttgtgcgatgaagggtgtataaatcgattcaatctaatggtaactgaccgtcaaacattggatatttaattgtgatcggatctgatgttatttttgaatatctaat

SEQ ID NO: 386749 - DNA, 785 bp, Cannabis indica
ttcaaatattatgaaatatagtttttacaattatattaatgctctatgagagaagagatggtgtgtttgaattctaagtatgatcacctaaacactatataaatgagtctaatgtgttcatttagaagagaaggtttctatataaaaaaaacacattgctagaaaacccatcaggcttgataattcccaaagttatttttatgagagttcctttgtacttagagatagggagaaatatgtttttagacaaaggtgtaataacttattcaagtcatactgatcccactaatctacactcatgagtgagtgtatatacatatatattcttcttttgttatatatattattatattatatgtgttatattgtttttcttctaccttttaaatatatatgcgatatatatagtgtatatatgtgtattgtaatatatatttaattaatctttgtattattttataataaaattataatatgtgttgattttcttgcattgtaataaaatctcaaaatattaaaattatactttccctaacattaaaaaagaaattcagcatggggttagaattataaggacactactacaaaaactcccctttagaggcggtttttaagccctttcagcgtcggttttcgcgaaattcgctaccgacgctgatcagggcgacgctaaagggtccatatgaaccgacgccataggtggcgtagcaaccgacggtaaaaggtctcgcgaatttcagtttttcgatttttttttaatttaaatatataattttaattacatt

SEQ ID NO: 386750 - DNA, 576 bp, Cannabis indica
tcagaagaggaggaaaaggaaaggctatttcaattctaatgggtactgataaaattaaattattgattttttattatacgttaaagagtcctcctctcctcgttaacaagataagcctctcaactccccaagtggcaagtagtgaaagattttttgcattgaatagtgaatacaactcaatgcctccactctgtccaacaactccaaactaattttaattaattataaccccaccatcataattcatagcgtcgcctagattgcccaagtaatgaattttacattcaaagacctgtctaccctctgattcggagtggatgtgcatattgttttctcagtaaaataagaccaagtccccttgttactaataatgagacaagacaacaagaaaagaaaagaaacgaccccatgatgttattttaacaattaattcccacccaacaaggtatcaaccaaaacaaaattactttacttaaatggaaaaaagaaaaaaaaaacaatctttcttcaatcttaagtttctcttctatttttttttacgacaaaatgtggcagtagtagtagtaaataatatta

SEQ ID NO: 386751 - DNA, 800 bp, Cannabis indica
agaagccaaggatgggaaggggggtccaagtaaacaaggccagaaatatgattacgagaagtagaaatacctctaaactaaagccatccttctaggtcaaaataatgcctccaatagcactaataggcggtacataaatattaaaataaaagtggagggatttaagtgtatgtaccagaggagttgcatcaacttttagttcggtcaggaagacaaaatcaggagagcgcgatctgattagggacttcaattccaaaattgtagaggtctaccttaaccctctacagttccaagcaatgcctctcatggctccaatggaggagatatggcattctcctccacaggtgtacaagagtgaacaaacacactagagccagaatcttcaatcaaaaaagagccaaccatcaggctcttcataacaccatcaatgcgactcagtgaaattgagtaatcatcagagggttcttcaatggcaaccttagactcgtgatgctactgttgggttttgtgccctaaataaaactcatttcaatataatcagatttacttattaatatagattagaaataatatttaatgttgcatagttcacatgatttatttcatgattatttacataatgtatgaattctattaaaacccagaacatatcaatttgttaatgattatagtgttgtcaacacagtggaatataaccttaattatatgttcgaaagtttattcctcatttgtcagttcactggatttagactgacatgataatcaacgataggtattcctactacattggataagtgtta

SEQ ID NO: 386752 - DNA, 1078 bp, Cannabis indica
agttgtcatctttttactattaaaattttcttttattagtttcaatatcatcgttaagggttaatacctttatcttttttgttttgtagatagtttctggagcattttgatatgttaataaggtggcgtgtagtgttcgatgctacgagttgaagctctagttattttggtatgctgtttgaaaatgttatagctttattgtctaaatttttggggcagtttgtctcatattgctcgcttacgtactttagcagttcatagtttgacaagcatacccttcggttagacgagctatcctggttcgaggaatttcttgcacggtttgcaaatatctgtcgtaaattcatgagtgattctaatcactacgccaaaaaaacaaattataataattatgaaaattcaataaaaaaatttcttttaatttacataactagactttggattcaataatgttacaaaagatattacaataattttttttccagaaatgacatgaaaagaagctaaaattctggtgagcacaaacaattatctgattgagcataaagcatctctaatcggtggccctaatcgtaattaaagatattatttttgtaacctatgcatacatgcaataaataataaaaatctcaatactatagaagacttaaattcaaaaagggggtggtgtgattgaattttcttcacaattaagtcattactgacaaatatatcttgtcataataattgaatatataagaacattgaaatgtaagagcaggtgtgaaaaataatatatggagtgtggagatgtgtggtgatttcttcctatcatatcataataatttaaatgtaagactgtgtttggtaaaaagagaagagtcgagtgtttggtaaaaagaaaagagaagagtcgaaagagagggatgaacgtaaagagaaggagggataggtcaatggttaaaccttttgacagaaagagaagaggaaaagaaaggaagggttaaaatttacaatccctcctaaaatggagagattagaaaagacaatatatataaggctaattaggatttttggcctcctgaactttgacatgtac

SEQ ID NO: 386753 - DNA, 2451 bp, Cannabis indica
ttttaaaaaattataaataattttcttaaataagttcaacaactaagatcatatatttaaaaatttgaactaaaattaaacattttttaattgccaaatgaaataatctactaacataaccattttagggttgtaatattgacctttatatatattttagatgtatatatatctttcttagctatatttgaggcatgcaaatgtggataattgaagtatatatctatacacaaaaataaaattataaatttttattattattacgaaagatattaactattagctgtttttttgtccttcattaattaagagccttcatttcataatttttattagttgaaagaaccctaataataattgtatatatatttgaaaatataaataattattgtacataagcagctgtaataagctgtacatcattaattgtcattgttaagcacaacacatccaaatagttttaggtggctcttgcctatgctacatatatatagggttttggtcatgtccaataatttatatttatcttatatatttatataatttatatatatatatatcatataaaattaatgcatgtgttaactacatgtgaccctactttttttatttattattattattattttattttgatgaatgacccacattcatttagtaagtgataaaattgtgttattatttttcaacttgtaattaaaccccaaattaatattcaaagctcaaacaatactcttcattttatttaacattactactactatttatcatgatttggaccacaataaatggcgtggaaggcaagtcaaaatttgaatatatttatatatattatttaatatttatacgtattttcttaatctaattcttgtattgattgataatttttctcgtgaaaaatgttaaataaatgcatttttgataatacgtgattgggattaacaaaaaaaccccaagaagtggacattttttaattaagttttagaagtcaaagcaactacaaaatatattataaatggtgttatttatttatttattttaaaaaagaattaatgtattaatttattaattttaaacacgactataataatctctaaataaactaatttgactaattaagaaaatgaaacttcttagttcttacttaatcagttagttgatcattaaataatatgtttacttttgtaattaataatcattagtaagagagtacacaagtttagttgacaaaaaacaaaagtttgggtgaaacttaatgtcacgcactaactaacaaaaaattagggctttaatgtgtgaaaagtactctaatcatcatcaatggtaattaatgataaaaattaagaaattatataagtaataattgttattgatataattaaatattgggtcctatataatttaaatataataatttttagaaattatcgttaatcaagatgacattcgcaaaccacacaggaatctccttgaatctggatagctcatcgtctaaccgaatgacatactttgtcaaaccataaacggctaaaatcaacaaataacatgagacaaaactgctcccaaaaatttagacaataaagtaatttaaattaaagagatttatttagattcacttttttcggtaatagctatcagtaaaagaaggtatttttttaatgagctgatagggtggtgtttgagaatattataactttatcatctaaatttttaggatagttttgttccatgtgacttttgataaaaatttatggtttgacaaaatatgtcattcggttagacgatgagttatcttagtttaaaaaaaattctaccccaattatgaattgcattactaatcatgaatgactctaatcactaagtcaacaaaaagtaattcaaattaactaaaaataattagtaaaaaaaaaaaacacaaatttcctccttcagaaaatatctattaattaattagaaaatgaaattttattattcaacatacatttttttattaaaaaaaaaacaaatcttcataataattacatttaattaccaaatcttgaaattttatcgcacataaatttaatatttatttggatattattttttttttaaaatgattttatatagtaataatactttaatcagtactgtaatattaacaaagatttagtattgttaccacaatttattaaaaaaatgatatgatagtactcaaaaactaattattatcaagatttgttattaaatgtattttgttactaatagtaaagatttgatatcgttaatttatagtaagttaaaattgtgttaatttagggtaattgtgttaccactagtatatttttttaatgactgtacactaattatatataaagtttaactgttttattgtatacataaacaattttttatacacatagtaaataattatttaaacttttttttaatattataaattatttaattttt

SEQ ID NO: 386754 - DNA, 1633 bp, Cannabis indica
tatgtgtttgtgtttattcctctaagaaataggaaatagcatttttggaggacctaaacatcatcatttttgccaggtgcctgggttgttttagtagctcacttataatatattctttgtcaactttccttttattagagttagtctcacattgttaatgtgtggaaataaattatcgtagataagattgggttactcctctcattgccaattagttttaagatggaacctcattcaccttatccaaaattctaacatgtatcagacccttttattaacctctatttgggatttttcaaccgatgtgttatacataagatgaatgaactactcctcttatttgaaatggaaccctcaattcaccttatgataaaaaagtatcgggttgcactcttcgagtcagtaccaaattccaataggaataaccctaattttcattcattttatttattgattgtctatttgtaaaatggctttacatacttatactaactaggtaatactaacaattattaaatagtccatatacctttcatgtaacactccctaacccttcaaaatcaccttgtccccaaggtggtaataataacaaattgaaactaagaacaagtacaaatataagaaagtaagaaactaatgacagcccaattattttctattaatatttggcctgagcccaagccaaaagactttagggtagttcttcttctctcacgtaatgtatcagtcgccgccttctccatttttttatagcttattcatcatttgacgtccatgcttgtttcttcaccaaggtaagtcatcgttcgcaccggtgagcttccacaatctggtgtgaccatgcttctcgccacccctctttgctttgatttagattatgcccgtgctcttccacaagtcgacatctgaaccaaactagtttagactcaaacaacattaaatgcgcattattgatgatggcaagtggatcagagggagtagcttttccacgatcaaaacacatgttcgccaccacaaataatggcagccacaacttcaccttcatacctgaggatgacatcattttcctcgcagaggtgatcgacggtaagcacgaacatcgcaaagtcaacacatccagctatgaggaacagtgagttgtctttgccttcgatccatggtgatgaaacttttgtgatctctctaaaagatccatgaaacaagtatagatggagaacagagccatcgggatctacatgaatcgaaacagatgggagcttcgctgccctcctggaagatgatgaaaggttcataagccatgtgaacaactctagctgaaatcaccaatggattctccactctctctagttcaattgccttatttggatgtggttgtcaagctccagagaagaaggtggtgcttgagatgtgggaaccgaaagtgtctccatagaaggaagatagtgatcaaacacgacacactatttgcttcctctaagcatcaaaatgttgttcgatacgcaactccatagatttcaccatggatctcatgaatttatgaaactcttcgtcagtcatggtgacgagctctcactagaatctttcgctatcgggttggagtcagtgccaaactccaataggaataatcctaatt

SEQ ID NO: 386755 - DNA, 797 bp, Cannabis indica
ttttagtttgattatttaggaaattaaattagataatatcatgtcatatgagtaaaataattgagaaaattgatagaatgtaattttttttttttgttaaaattgatagaatgtattaatgtagcataatactaattttcgattattgaataaagtttaagggatatatttaatactacaagaggcatgattttttagtgagaaagttcaaggataaaaataatcttttattcattttaaaatatttctgtttaattttcatgattttgcaatatatttatatatttataacttgggttccacgaaggttaatatagaatagaatattattagtgtgtgtattagaatatattcgacaacttggacataatcacacaatatgaccaaaaagtttgtggcccccaaaatcatccatgcaatacagtgaattatattattatataacaaaaaacaaaccaaaacttatattagtggattaagtaatctcactcactcaccctttttgcaaaatttgatgtgggtttcttttcggacacacaaaagaacaaacactaacaccatatttggcctaaaaacttactaatcatacaatttttttatctgattttgtgatgaacaaccataccatatacacctatccatagctaatgacaaattggtactatatatctaaaagggatatcctattttaagacccaatgatagcgtctttgactaactatcacttatttatcaccttttattttttatttttatttttctatgtttaaaggagaaaagataaaaaaagaaaaaaa

SEQ ID NO: 386756 - DNA, 1090 bp, Cannabis indica
tcatgtcacctcattttataacaatgttatatcttgttttagagcttagtttatagaaacttgaagtatatcgaaactttcttctgtaccacacttgagaaaatcaaggtgaagaaaagtgaaataaagaacaactaaaagaacattctaaaagatattgtcctgttttaagggcagtatgactgagaaccacaataagcatttctcataggattccccatgttatatattttgaaatgagtacagagatattttggtggtaattttcagtgtatacaaagttaattttttctttttgtgtgaccattcaaaatatgacatgtaactaaggttgctcttgctcatgatacttagtttgaagttgaaccaccacaatcacagcattttccaaaaaggaagagaatgctcttcactttagctttatggacaggaggaccttatcttaaatcatgatgtttgtttgtttggttattgtgaagctcttctccttttgcataagggaaaaaagaaaaacacatattttgactttcatattgaagaatagatatatttttggaaattatggctgaattatttcaactactccaaattgagatagcaaaggtaatagcaggagtcatagttattattattttaaaaattctgaatcattaactgcacacctacattttctagcaggaagggaaaaaaaaactaaaattatatatatatatatattttatatttttatggatttatataattttactgtattgtttttttacatattactttcatgtataaattagggttgcacttgcacataaacttttgtaacccgcttaaactaaattgaaaaaattcgataaaaaataaaaattgaaaaacttgtcaaaaatataacccgttcaatttttatattgggcgggttgaaaataatatcaatccgctcaattaacctgaactaacccgaccaacccaattaaaaatatttttgtatatatatatttaatattttatttttattatatatatttatatatcatataatataattttagtaaatttttacatgaaaaatccattttacacaatttattacaaaattact

SEQ ID NO: 386757 - DNA, 685 bp, Cannabis indica
ttcaaagattgatcgagtcttggctaatcaatcttttcaaagatactttcggatgtcgcaatctcataaggactttgtttcaaagctgaaaggtatatgggaaatccaatatagaggcacaatgatgtatcaactggtgtgcagattgaaggaaatgaagaaggtctgtagggagatcaataaggatggtttttctgatgttgcaactgatgctattagggcaaaggaatagctggaacattgccaaaatgcattgagaaatgtccctctaatttttgtttttacagagagaggagcttgaagcaaggcaactactagtacagaaacagcttaattaccaatcctttctccaacagaaagccaagataaattggatcaaagctggtgatgataatactgcaatctttcatgccagtatcaaagggagaagaaggcaaaatagaatcttgtccattgaagaaactgattgcactagagttcatgaacctggtaagatcactagtgctttcttggattattacactgatctgttgggttctagtatgcaaaacagaaagaatgtgtgtaacaccctaactattttaggcgtattacgtgatttttttaattaaacttataaaataataatacaaaagactcgggatcccgataataaaatcatttacaaaaagatttaactgtttaa

SEQ ID NO: 386758 - DNA, 972 bp, Cannabis indica
agatgagttatacatgttcaagccaaaatagaccacgaggtttgggtccaacaaagaattgtgtaaaaattccaattttgccacttagattagccagtaagaaatgacttgtaatagttaaaaaataaattttacgagatctcagttatgtaactttaagtattttggtttgaaataagtttgtaatattgcaagttatttatttaaatttagtttattattagttttaaatcacttggcttatggatcccgattaatgggattagttagctgtaatcacaacacatggtgttcctctaagtaggacattataggacggaccattcgagtaaggccacgcatcacctgactgtgcaaagagagaagccaaaaagtccctgtacgaccagaagtttccatgcagacttggggagtaaattttatcccaaaaattatcctggtgacgtggcatagaattacctgacacgtgtcaagtgtagtttaggttggatggatgtaagaccttcgagaagactgaggggagagccttgggcagagtataggcttgacaaagtcgtccagcatcaggcgtgtgctggacagaacatactgaccagcgctccaagtaaccaaaaaggcgtctcacagaagagacatctgaccaacgagttcacagaaggaaatgtcaaggttcatctcacctatttccatacaaataggtcaatcaacacacctataattgtgggatctcgagaatgatgaaaggattttgtgagattaatccaattaaacattaaatactttattttatgattaaatgcaaatatgttacatcctttttcctataaatagtggatttactatttaagggaccaaatttgtattctcaagagagccattacactgccaaattacttgtagctttcaaagatatcaagaaactgttggaaatattttaccaggatctagatttactaccaagtatgttttatt

SEQ ID NO: 386759 - DNA, 1542 bp, Cannabis indica
aaaacaacataaataaaataaaatttcttgaaagtatatataaaagagaaattatatatatttttgttttgtgacatggttatgtaagtttttctctcggtaattcttgttgttcttgtttgttctttgtttggttttcttggtggcctctagcagttatcaaatattggaagatgatgaggatggagtcagcggcgaagctagataaaaaagtcaggaaatgtggatatgcacttaaaattatatatcaaactataatataaaataagttattgcatagaaatcaagtacattatctattaaaagtatcttacatttacaaatgcatacgatgagtttttattgtttgaaatcgttgcataatagtctcatcatcaatgccatcaaaaattaattttttaataaaaataactaaacaatcattcatccattgatctcctatcttattgcataaacggtttttacaatttttattgcaaaaaatactctcgacaatatcagtagcaatatgtaaaagtaatgctagtgttaacaatcgataaactaataggtatatcaaatgttttttttgtttgcaccatctttcgtgcaagctcacaaattcctttcaactccttaaaatttgtactcatgcacatattagtaatgtaagattctaattgatctagttgcatcaactctattctagaaaaatctttgggataaaactcagtcaaattaatcaattttttcttgtcaaaagtagataacaattcacatggagaaaaacacgctacacacaggagcaacttagtgtttaccttattaaaacgatcattgagctcttgaagttgctgatcaatgacagagtaaaacaaatcaactcgaaaataatacaagtttgtcatttcatgagatttgtggcgtgatttacctgaagctttaaagatcccgtccattttaggaacttccaattcatgtatctcacaaaacaaagaaacctgagctagaaaagaatctgatccactatcgttcatcatctgcaatcgtgttttacatactttcattactgtcatggcatttacaatatcttgattatttctttgtagtgcctttgacacctaattggtaatttccaaaataattttcatcaaatgtaagttaaacacaaatttaaatgattgcatgaaactcaataagttttatgcttcacttttttgatcagaattggatccatcatcaacaatgatttcaaaaagtttaattacaaaagaaaatatattcatcacagttatcaacgtaccgtaatgtgagcctcatcgtgtaatgttcccgcttcaagcctctattaggcccctacacccatggaataatggctcttatacacgagtacgctactctggctacttcctggattgacgactgaccctacataccaacacgagtatttctagcgtgctttgtcctcactcgcacacttcctgggaaaacttcccaagaggtcacccatcctgaaattaccccaggtcaagcacgtttaactgtggagttctttcgtgatgg

SEQ ID NO: 386760 - DNA, 861 bp, Cannabis indica
tgtgtaggttatggaatctcgtataaaacggttgttacaaatgtcaaaagacttaaaatacacattgtggaatgtgtgttcagtatataatataaaatatacgctcaagtgtcaaatgataggttaagtgtgagtaggggtcaactgtttattataaaatatatgtatttgtatgtatctaaaggcacatagtaattttgtcttttatgtgtattgtataggctccagtttatctaccagataggaacttgcctccaccacctgcatatgtgatgaacaaccctgtgactgaaaccaatatttatcaacaccatccgccccagaaattaatggaagaatatccagaacggcctggccaacccgagtgcactttcttcttaaaaaccggggattgtaagttcaaatccaattgcaaatatcaccatccaaagaagactgctatgggagcttccccatgtacccttagcgacaagggcctgcctttgagaccggtaattttgttcactgagcagagtatatcatcactttaattgggaataaatgacacttgatcattttctctaatatttggttcgatttccaggatcagaatatctgcacatactacagtcgctacggaatatgcaaatttggacctgcttgtaagtacgatcatccagtacagcagacgccaaccatgtcaagtgtagaaaatcaacctcctctttacagtaacttggccggtgaaggagctaggagaagccgaaatgagactacaattcagcagttggtttagtttagtttagcattggcggaggggaaaggggttgtagtttctttcttttctcaacttgaattttcttaataaaccttttttctttt

SEQ ID NO: 386761 - DNA, 507 bp, Cannabis indica
aagatagcttcctctccacttggtaataagaaagagaaattacaaatggtagcttgtctggagactccatcccccatctttacgacctcatcccagttagctttagcagtggaagaagaaactggagcttgatcgaaaagctacttccatgaccccaaacaacaaaaacacacacacaaactcattgttaatcaagtaaactatataattacatacatatatagattatatgagaaagaaattgacctgaaaagtttcatggatgttattgagatgaagactgagaatctgaaaaaggcggtctctctcagttcttcccatctcttctctctttcgtcttcttaggccaactttctcagaactgtaatggaaactctactaggtattttttttatttgcatattagtcctcaatagtttttttttgcattttagtccttctttgtttttaacggccttaaaagttcatgggcatgatttagtattgtcaaagttcagaagacaaaaa

SEQ ID NO: 386762 - DNA, 3031 bp, Cannabis indica
gtttggggtattgtcatgttatctatcaatcaggatatttttagttttgattttaagtccttaggaagtgttttagcgtgtatctcatcaaaatttcaaatattgtaatatagggccctgtaaaacgtcgagctactgttgcactcaggctgaccagcacatctgaacacggaaacgaggtaagatagcataaagtatatatgtaaatgaatgcttgttattatttgtttacactactaatattgaaaagaggtagtttaaagggtgttagaacagtgtaggactttagggtagttaattgttaccaatacaagtaccacggggtacggagtgcatgtggtacaacactcagtaactcttgaaagtacagtgattgccctaccaataagagtactgagttggcactctagtgcatgtggtatagcggtcgtacttccgttaggaacattcttaaccacttggtgagcttaacaattggctcagaacgacttaatcataaagtcggtatcgcattatttatatatgtttatgcatatcttactgagtcggtcgactcatcagcttgctatatttgtgcaggtaagaagggtaaagctaagcaagcagaggagcagtgagacgggcttagcaggaattgtacatatcgcggcagtgcaacctggagggtcccgatcttactacattttgaattatttttggtgttgcattttgtaaaaataaaataatatttatgtaactatatatattctatgtaattttcaacaatggttttaaactcaagatcttgacctgcgaggtttataaatataataaaataagtttaatctcaaattaggaaatttttaaataagggctttacaattttggtatcaaagccactaggttgttcactaaaggtcgtcaagatatgtacaatcaaggctagtatcgtgctcaactcaggattccgtaagcttttatcttttagaaaactgtttaagttatattgcctttacgtgagaaatgttaattaaaccctaaatgtggtcttggaaatatattgaccactgtctaacctaaatgccttgtgggttcgcaggctaagtcctaaataatggacgcctaacaaaacgtaagaggacagggtgaaatggttgagactggaggtggtcgggttagtagaaattcccaaaacccctatggatgcggcagaggtcgcactcgttctaatagaggtggccaagagaatctaccccaggctccttttgattgggagccaagatttgttgagatgcaggcccgaatcactcaataagaggaagagattcagagacttagacagcaggatgctcctattaagcctcccccacaaccacatgctgttagggtgcctatggtgccggcagaacaagcacctctagtatttttgcgaggtcccaatgttcttaaggcagagtagtggttgactgtgattgagagaatactgaatttcatgggagtgaccgaaaatgacagggtggcatgtgccacgtttcagttccaggaagacgccctggtgtggtcggagatggtgtccctcacacgggacgtcactagaataacctcggaagaattcgaagatttgtttaatgctaaatattacaatgaggcagttcgcagtgcaaagcggaaagagtttgttgagctagtacagggtgagaatatgtcagtgatcaagtatatgaccaagtttgaccgcttggccaagttggcctccaggattgtgcctacggacttcaataaaaaggaaaagtacttggtggggttgaacgccaagattaggcatgatctcgttattaccaccaatgatactacgacctatgctaaaatggttgacaaggctcttcgagctgaaggagcggtaaagtttttgcaagaaactcgagaggctcctagtcctggtgggaccactactctccctatccctggtcttggcaaggagagcggtgatttcattattgaaccatagaagagaattttcccaactacagggagctcgggtgaaagtaagaaattttgcaggaattagggtaaagggggacgtcagacttactcctaccctgagtgcccgtgctgcaagaagcaccaccctgaggcatgtaactggtgggcttgttttcagtgtcgatcagttgggaaccttaagaaggattgtccctagctgaagaaggaagaacctaagccagaagctaagcctgcaccagtgcgagtatttgctattactcaggcggatgttactgccattccttcaatggtcacaggttagctctttatcaacgactttacttatactgttttatttgactctagagctacatgctcatatgtagcgacgagggtacttaatcaacttggtaggcgtagtgatgtttttgacatgaggttcggaaccctgttgcctaatggggaattaattatctcgagaaaatagatttgatctgtgctaattagaattgagggtatggaactaagtgccgatttagtggagtttcttttggccgaatttgatatcatactcggaatggactttctgtcgaaatattccgccagtattgattacaaaagaaaaatggtaacttttcaaccggagaatgaggaaccatttgtttttgtttgatcggttcaaggttcccgtgtcccaagaattttagcattaaaggctagggatttactacgcagtgggtgtgtaggatttctagttgttgtaattgattcctgtaaacctgtggtactcggacccaaagaggtcagtgtagttaaagaattcttggacgtatttcctgaggaatactagagctaccacctcaacaggagatagatttcactattgatctagtacctagggctgagcctgtttcaaaggcaccctatcgtatggctccaacagaattgaaagagctgaagatacaactccagtggatgctggatctagggttttcccgacctagcgtatggccctggggagcttcggctttatttgtaaagaagaaagatgggactcttcggatgtgta

SEQ ID NO: 386763 - DNA, 896 bp, Cannabis indica
ttcgtatgatcataccttcacacacaatactaaataagaaaagaataaaaaaacttaacactttacctaaactaatatttacgtgcctcggcacgtaactcctacctagtatatatatatatatccattcatatgttttagttggtgtgtttactttttggttttttgtttgtttgtttgttttttttttttttttgaaagataataggttagttttggttaaaaaatacctacttttaagatttaattgaattcaaaattatagaactatattgtaaaactcagaggacaaaactcgttttttttttagaaaaagaaagaccccaaagaaaccatttttcaagcaagaagtttatacaaaaagaaatgggacactaagtgcatgtttagcatcataattaaaaaactgtttttgtttttaaaaacaaaaaattgttttctattgtttcagaaaacaaagttacaaaaaataagaattttgaaaacaacaaaatgttgttttctattttaaaaaccaattcacttttagtcaatattgtttttaaaaaacactaaccaaacataacttgtttttaaaaacttcaaaaactattttttgttctcatttctaaaaataatttttaaaaacaaaaaacaataccaaacatgctcaattcattgatcaaaggtgtcttgataattttcgaccagacatatttagtataaaagtattaattgattggaagattagcaaaataaaaaactaagaagctatgaaaacaattaaaattaggcccaaagaggaggccaaggtgacttggttgttaaatgagataatttcacaaaaaaaaaaaaaaaaaaaaaaaaaacaaaaaaaaaaacctaacaaaaataaacaaaaaataaataacaaaaaa

SEQ ID NO: 386764 - DNA, 772 bp, Cannabis indica
tattataataagagttaaaattgtagtattgtgtattatgaaaaagtgaaggagttgtttcaagaaggggaacatagtcagggctcagaagaatatgtatggagagatcatacaattgagatttgagagaagcttctccttcacctggtttcgtgtacatttttcttatgccttgtttattttatgatgtaatcacacaccaaaagtgaaaatatgtactgcccatcccctgcctacattatcgtatctttgcttccgtaaatttagaaaatataggttgtccttactattattagttattacacactttcacaaataaattaataatattattattattagaaatatttatgacatttataaccatatttttgtatattttgtgtttgggtagtaatatttcttaaaaattattaaattaaactatatgagactctatacttaattgaactaatatcgatattaataaatatgagagtgttaagcaccactggcgccttttaacattctctttctgttttatacacttatataccatttttttcacaaattaaataccaaatattacatttggttacttcgtttacttccactctgtaagtgatcgtttggtatgcaggtttcatttaatggaaatatcactacaagaaaaggagatataggcacggtaaaattattgccaacaaatgcaaattttagtgcccatagttatttttccacgacttgtcgtgcctaggggtgttcgcggtgcgggtggtgcggtttttaacca

SEQ ID NO: 386765 - DNA, 1180 bp, Cannabis indica
tcttgttatttatagttattttccctcgttttctgctcttgcagcttttgttgaagctatggcgaaaacaaggtcaaaaaggggggaaaattgaaatctgagaccaaaaaatcgaggaagaaggaatccaaacctagtctgagtgaatcgcaagtcagtacaatggaagatatagctgatatagagccgcttgaactgactgaaagtgaagaagatgaaatcggagagatgtaagggagaaggagattggaatcgattcaggatcaggaggatctttttcaaccaccactgtctcctcgaagctcattacgggaaatctagagacgagaagatgctcaacaagacttcataagctttatcaatgccaacgagcaatgtaacagtagtctttcaaaaggtatgcaccctactccacctattctgcgatctgcaactgtcgtacggaatttagaaaactcttttaagagttctcaacagagtaggaaagtgaagataaacctagaagacattgaagaagaggtgaattattggaaacctttactggtgtgttatgtccttggatccaatccaccattacacacccttgaaggatttgccaaaagaatttggaatgagaaagttgacaaagtgaaaatgatgtcctatggtatcttcattattagatttaactcaattgatagcagggattctgtgttgaatgggggttacatcttcttcaatagaagaccagtcataatgaaaccatgaaaaggaagatgtgaagaatgtgccaatttagattcatcttgaggacttagatctcaagtattggggtcagaaatctttattcaaaattgttggacaaataggtaatccaataatggtaggtgctgtcactaatgaaagagaaaggctaagttatcctagcgtactaatagaggttagcttcgaccaagaattgcctggactagtggaatttgagagcgaatatggaatgaatacacatgttgttgttcagtatgaatggaagtccaatctgtgtaaacactgctttggtatgggtcacacgacagaggaatgcaagaaaaaaactcagacaaagcaggaaagggtaattaaagctgataaaaggaatgataaagctaaagaccagctggatgctgatggatttaaggcagtcactaatgggaaaagaaccaga

SEQ ID NO: 386766 - DNA, 993 bp, Cannabis indica
ccagctagtagatgccacagctaaccatgaaatcctaagttttgtggacacaaattcaggctaaaaccagataaagatgcaacaaccagatcaggagcatataggctacacgatagacttaggcttatactactacaaagtcacgccctttgagctgaagattgtaggggtaacatatcataggcttgtcaacaaaatgttcaaagatcttatcagccccatcatggaggtatatgtggatgacatgcttttttcaaaggttgggggcatgtggaggatctggacgaatgcttcaaaaattttctgcaacaataacttgaagattaaccccgtcaaatattctttttgggtaggctcaagaaaattccttagcttcatatagttaatgctaggagaatagaagcaaacccagaaaagatccaagcccttttagacataaagtcgtccacaactatcaaggaagtacaaagcctaacagaacgcattgctgcattaagcagatttatgtccaagtctatagacaaatgtgtacccttcttcaacattctcagaggcaacaaaaaattcgagtagatagaagaatgcaaaactgcattccaagagcgaaagaaacagtaggctcaaccccttgtgttttcaaaacccctagacaacgaagagctaggcgtgtacctagtaatcacagagcatgttgtgagtgttgttctcacaagagaagaagaagtgtgaaaaaccctatatactacatttgtaggagactaatcgacgccgaaagtctatacccactcattgaaaagctagcttatagcttgctcttggcctatagaaagctaagaccatactttcagggacaccctataaaggtctacaacgatcaactgttgcgacaggttttaaagaaacctggagcatcagactgactactcaagtgggccattgagcttggccagttcgacatcacttatcagccaagaaaatgttgggttttatgcc

SEQ ID NO: 386767 - DNA, 1075 bp, Cannabis indica
taattttattagaaaaaaaaatgtgtgtatggtttgtgctacaatactcattcatatgaatttgtttatattacttctatgaatgatttgtgctatccaagagcattgatattagttacattaaagtatctaatattatactgatgcgacgcgttataaatgattagtagttttttatattacttattaaattaaaatatgtgagattaaatattaaattataccaataataacatgtcacctcttataatactttatactttgagtattattctttattatcattgcattatatattgatgaagatgtatttttcttttagaataagatgtgatgtttgagatgagggaccaaaaaaatagaaatatgtcaatatataactaattctgatctctattttagtctttgttttctctttcacttctatttgtttaataagattgaaaaggttcatcgatcaaataacatcaaaagttttttaaaaaaaaaactagtagtgaagcaatttcaaaaaaatcatcacccctcacaacaaacatttagtggaaaaaaaaacgaaaatgtgttggcgaagaagtttttgtctttgctaatgttggcaaaaacaataattttagtaagagtactatttatgtgtttataatttaatctattttatgtaaatttttatgtttatatttttattctacttaggagtgttcattaaatctaatccgtactattttgctcatagtgcatccgattcgaactaagtgcggcgatttcattttttagatccaatacaatccgcacaatagctcaaatccaatccaatccaattcgcaaaagtgcggattgaatcggctactttggattgattactttttaatattaaattatttaatatttatgaaaaaaaatatttttttcacataactagcaacaaaataaaacaaattatagtcattttatgtctccaataacacattaaaataaataaaataacaaataataaattcaaaggaagaaaaaaaaattaatgtataaaaaatatttaattttattttaaatggtaaaaaatatatataagaataga

SEQ ID NO: 386768 - DNA, 812 bp, Cannabis indica
gattcatcaattaaggagatttttttcttcgctgccaaattcatggtgatgtcgctcttctatgattgaaagttggcagcgttaaggacggtggagacaagaactaagccagggtgatcacttgaactgaaaaagaaagggttggatatatcattgttggcattgtgatcgagataagatcgtcgagtttgagttgctatttgctcgtcaattcttggagattgatgatcaacatcgttagtgtggtctaagatctggatcctaaaggattggttcgtcaagctgctgccaaagaactgacaagtggagctaaagtaacatcaggaggaacatctaatgagatattttcattcatagatggaggaacatcatcttgagatcttgttgaaggtctttccatggaagttgtgggcaaattttcttctgataccatatgagagaaacacagtacgagctgagagatcactatgtctcattcaattgaattaaaaggtctgaatacaagggccatatatataggcatttacaatagttggttaaagaagaaaccaacataacaacctaactgaaaaagagaagtcctaatagaaaaagactaactgataactaactgtaagactaactggtaactaactctaataatatttagttcattttttgacacattcttacgatgatacgattttttcgttttttaattgacacgatgagcagtagtagatttcggcatattaattatgtattatccattacacaaaaataaaaaaaaatttacaaaaataccattgcacaaaatttaaatatttttataa

SEQ ID NO: 386769 - DNA, 4479 bp, Cannabis indica
catataaaaagatggggctctaaatcaccgacttggcaccctggaatcaagtgatgtatggcttttttggcaaagcatcacactagtcgagtatatcagattacccctcatagttggagaaaatccaaccacaaaaactttgatggcgcactttgtcgtaattaacattcgatcgcccttcaacaccatgataggccgaccaaccctcaataacctgaaggcagtaacatccatctaccacctatgcctcaaatttccaacaaggcatggggtacgatgcgtgaggggagaccaacactctgccaattactgttacaacgtggctctagccagtgctaagaaagagaagatgcttgctaagagctctgaagaagagcccaataaaaagcaatgaagtccagcccaaagtgaggccataaacatagatcctcgatttgaggatcctgcaggaagctttggacatgtagaagagtttgaagaagtggaggttgatcccactttctaaacaagaagactgaagattaaaaaaggtttagtcctaaagattaaatcaatactgacaagatttcttatggtgaacctagacctttttgcatggtcacatgtagacattgttagaattgacccatccattatgacccatgcactcaacatcgatcaaaatatttgatctattcaacaaaaaaggaggttgttggacaaggagcacgcccaagctctcaaagatgaggtcgagaggctacaagccaacaacttaacacagaggcattatatccactctgggtgtccaacccagtactggtgcccaaacccaagaaaaagtggagagtatgcactgaattcatcaagctgaaaaaagcatgtcaaaaggactgctttccacttaccagattgaccaacttgtagatgccacagttggccatgaaatcctaagtttcatggacacgtattcatgttacaatcaaataaagatgcaagatgcatccaccagattagtagcaaactaccttcatgacaaacttaggcatgtactgctagaaagtcatgccgcccttcgggctaaaaaaatgcaggggccacgtattagaggctagtgaacatgatgttcaaaaatctcattagccataatatggaggtgtatgtggacaacatgcttgtcatgtccaaaaaggttgggggtatgtggaggacctagacgaatgctttaaaatccttcacagatacaacatgaagcttaaactccttaaatactcttctggtgtagactttgcaaaattccttggcttcatagtcaatgccagggaaatagaagcaaacccagacaagatccaagtctttttggaaatgaagcggcccacaattatgaaggaagtacaaagcctaacaggacacattgttgtattaagtagatttgtgaacaagtatacagacaaatgtgtacccttctttaacattctcagaggcaatagaaaatttgagtggatagaggaatgtgaaacacattctaggagctgaataaacaattggctcaacaacctgtattttccaaacccctagacaatgaagagctacacgtgtacctagaagtcacaaaacatgttgtgagtgctgtcctcataagagaagaagatggtgtacgacatcctatatactacatcatcaaaagactaatcgacactagtcgatactcacttataggaagttgacttacagcttgctcttggcttccagaaagctaagaccctacatctaggcacaccccataaaggtgtagactgattaaccattgcagcaagttttacagaaactgtaagcatcaggtcgactactcaaatgggccattgagcttggctagtttgagatcacatatcaaccaacaatagccataaagggtcaagcccttgccaacttcgtggcttagtgcacaaaatcatctcttgaaatatctcaagattcaagagaaaagtacgagccagagaagaagcgagagcaagagcagcagcaacaacttgaactaacatggaaactccatgttgatggaagttgcactgaccaattgttcggtgcaggcatttcctttagaacacttgggagcagcaacttcatggagcaatcaaatttgacttcagggcctcaaataatgaggtttaatacgaagtgttgatagtcaacctcaagctggcacatgaagtacgagctgaacacctggcatattcagcgattctcaactagttgtgaatcatattttaggtgaatacacaactcgaggagaaaaaatggtgccctacttaagcaaaatcattggcttactaagttagctcaaagaaaacacaatcaggaagatccctatagagcaaatggtatagcaaatgcacttgcctgtctagcaagtagcaccattaccaacaagatcaaatttgtgacaatacagttcctagaagaacccaacattaccatcccaaaaaaggtcaacatgttggatgacactctaacatggatgacacctattgccgcatacctccaatccgaagccttgctagaagacaagaatgaagcaagaaagataagatgaaaagttgctatgtatctaatcctagaaagagtaatgtactgacggaacttttccatgctgctcttaaggtgtgtcatcaactaactttgagcggttaatgatagaagtacatgaaggattctatggcaaccatgtcggggggaaaaactatccaagaagatactttgataggggtacttctggccaacaatgatcgaggactcgatcgactacgtcaaaagatgtgagaagtgctagagattcttgaaaaattccaagggatacacccaatgagctcacgatgatgtagtctccttcgccctttgcagtttgggcaaactccattttctctagcttatggctatgaggcgatgttgcttgtagaggtagtgccaccatctcacaggaaaacaacttatgaccgaaaaacaaacaacatcatgctggcagaatcccttaatgaagtagaagaaagaatagatccagctaacctaaagatgcaggcctaccaacaaaaggtagcaagacacttcaacaagcaagtcaaggacatgaaattcttcataggagacttggtgctccgaagagtgttcctgaaaactaaagattcaacggcaggagtgtccagacctaactagaaaggcccctatttaagttatagagataacttgtaagggagccttcaagcttggaaggtacaacgagaacatgtagctcgttctcctaccaagatattcgaatggagagcacctttgcaaatactatcagtaaccaccttacaaacactaaaccaaagtaacagttctacatattcaacattatagtgcaaaagatctagtaatcacgaccctttgggtgaggtgtctcactgttcttcaatggtggcctctgctatgcaaggaaagcagaggtagccacttgatatctagaagcaaaaatgtgtaatgtaagcttgtagattaaatttatataagttgcatagaaataaagaccaattaatgaataaaattatctttaagttcaatttattgtgtctaaaccacttgctaacaagattaacttctcaaagttattcttttttcagttccacatgcatacaacaggcagcaccccaagacaagtcccatgcaaggtttaagaaacatggtgaattataagtgaccaagagactgtaagtctgcatattcacttggggggcacccacaccttataatgcatcaaactagcataaaaaacttatgctgagaaattttaacgcttagaataagctactaaatctgcctctaagtgaagtgcaggcatactttagcttaacataaagaaaagtaaatctagatacttacatgttaaggccataagaagatagcaaggattaaacactgtctggtcagtcacaaaattcatgataaaaaagcaacaaggccaaataatagtagtgttcaaaaaacaaagggcctataggcaaaagatacaaacattaaggccctggggctgaaaataagtaatgttctaaaagtaaaaggctagaggtcgtacagaacatgaaaatattatctatattatacaaccgtaattctgaatactattaatgaaaatactgtctatatgtgtataggggtaggtggacctgagtctgaagctacaagatttggatcgcaagagactaggctggccatagcatccatagtttggctggcctggtggtcaaaatcctggctggccacctatttagcaagtgggtcgaccagcaacttatcatggttccccaaggatgacccctcttgattattggatattattttaccaggatcttagatctacacacaagtatgttgtttaacaccctaaatatgaactttctaaaacgataaattaaacacgtataaagttaagaaaaccttacattgatgcagcggaattaatgtctc

SEQ ID NO: 386770 - DNA, 1028 bp, Cannabis indica
tgtaagccttaaaattgtaaataaaacataaaagaaatgtattttttaaaattttctccttttttttgtcaaactccaacacactacaagaatcatgccctttaatgagaatgaattttggtcagtaaaagatgtttatttcgtcagtattgattatcaacggcgacatgtcattggtaaaaagtcattggtgatacctcatcggtgataggtactattactgacgatatttaaagtcgttggtaaaaagagaattaccaatgactttgtcatgagcaataatatgcattcttttttatttttttattccgaaaatatattaatgatgactttttcgtcattgataatgttgtcaatgacaaaaaagtcaccattcatatatttaattttttaaaaaaaattatttatattaaatattaatttgtttactaatcaatttatattaaatatttttaaaattaaacaatatacaaaataatcaaaattaaaagtaaaatgtaacaacaaactaaataattttatatcaaatatcaaaagacaaatataacaatatcgttaaaacaaaaataatacttactaaaagtaaatgttcataaaacataaatacacataaaactaattgttcatataactaaactaaaaatactaaaagaaattcgtagcgtcatcatcattagcatctctcagaatttgttgttgaggaacatccgacatctgttggtcgtatggagacatctgcgaactcatcatcatctgagaagtctgttgcccatgtggtgtcggcattgtaatgttttctgcccatattgttgcccttgtggtaacgacatcatctcaaaagtctgcgacatctatgatatttgttgtgtcagcatcatttgtggtatccgagattgtcagacttgagacgtctcaggcgactgcatcattacttgtggcctatttggcgacgacgactgtgacatcttttgaaaataattttaccaggatctagatttactaacaagtatgtttcattaacaccctaa

SEQ ID NO: 386771 - DNA, 716 bp, Cannabis indica
atcccttctgtcctctgtccggtttgttgctctgtaatcgaaactcaccatcatctgtctgttagttgttgcttcacccagaaagtaatccaggaagtaactaattggtgtggcattggccaagtaacatcaaagagtggctcttaagatcctcgaacaacctgcaagagaaggtgctaaatgttgttgttttggtgaccttatactttgtttggactaatcgaaattgctgtatatatgagatgaaatgtaattctacagcttatgttagcagagagattagattggctattaaacttagattactaagctgtagcagtgggggaaaagggaaatttgataactatataattaatgtaatccatagttggtagtgtgggctggttggttttttgttgttggagtttatacttgcttccttacttgtttgaataaagatctttttcttgtgaaaaaaaaatatttatttagtttatttaataattattttttgaaaaacaatttttaaaaaaatattagaatttcgaaatttaaaatttgaaaaacttaaattaaagttgaacattaaaattcttaattgattttagatcaactcaaattaagtaattttaattaatgattacgctaaataaatagattaaaactatattatagttagaaaaccaacacttaatttatgaaaataaattctagataattaatttctaagtaaacta

SEQ ID NO: 386772 - DNA, 2070 bp, Cannabis indica
cacaaactcgcatgtcttacgttgtcaacacagaatgtctgactatgcgatcaaaggtgaatgcagacattcaaacaaaatagacccaaaggctcatcctgcgagtacaacaccgtagagcctgcgagctcgagtgttggaatatgaatggacaaattatgacttatcaagttgcatatgttgttgtaattaaaccaagaatggataaaattgttcttcatttattctttaaactattattttggtttaatattgatatttattgtaaaaaaggttcaaactaagcagttatgtaatcttaaatgacacttactttctatataaagaggtgatccagatcaaataaaccaagctgaaatcattataaaaagcggactaagactaaactctgactaaaccactataattctcttatcttctctttatttctacttttgttcttgtctatttagtagcatatactttgagtactcactattctaagtgagtactcgcataactactattgaatattcaattttttttttttgaatattcacaatatttggtgttgtctaaattctttcgacaacatttagcgttatttgtgggaaagaaatatttctggaattttggaggagaattgaaatggctataggtcagacaaacacgaacaacaacaatgaaaccttcaacactggcactattaatgttcctatttctggtggaggaacaacccttgttgatgtcgttataggaggagtaggacgtaccaatgactccccttaacctattttctcaattctcaggtcatgctggagaaacctcgacaccagcggctatcatgggacaatttccaccaatcacgcccgtgctcgccttcgagggaatcatccaactaacaacctcacaatacatagctatgcaggaacaaatgtgcgcattataagtagagatcgcatgaagagaccaaatgcaagctcaacgtccatcacgagtcctaaaccaatgttgcactaataataaggtaactaatgatactaggcatcataataaacattctaacgtgactcgtaattgcatggaatgttcaggtgagaatgaccatgttggactcgacctgaatcaacctattcgcgaccccgtatgcagtagaggtcgtgttgttcctaatataaactgatagcctatttagaaggtggagagaccgtaagaagaggaagatcctaaatgatgcaactcgcatagtcgtgcacaactacaaacagagggaaacaacgtagaatctcattcctcttcctcgaggactaatagtcgctcccacagtgtttacaccaggtcgggaacggtgttcacaagactatggggaaggtaccatgtacagagaggcaacctgcgaccatctcaacgaagtgtttcacacacgttcctagacctcaaggaatcacaatatagaagaggaatcacatgatctccttttggtcgatcaaggtatccccctgcaaatacaaacaacgcaataaatggcgttaacccaccgcttgcaccagttgtgcccaacgatgtggtagtacccgcgaatatagcagtagtggcttctccaccaacaggaaaccagatcgcacctgctaacagccccttactgccaggatggggtgaaaatcctttgcgagcattgacgatgatcaagaagcagagaaagcccatttataagctacatggaatgtcgcccttcatcgaagaagtgcgacaagcaaggctccccaaaggctttagactttctgagtcacttaaatataaaggtaccaccaatcctatagattatcttgataaatttaacgctattatggaagttgatcaagtacctcaactaactaagtgtcgtatccttgccataacttctgaggataatgcacacaactagttcagcttaggggtgagcataaaatctaaaaaactgaaaaatctgttcaaaccaacctaccgaacaccgttggaaccaaaactgacgaaaactgaaaaccgaaaaaaacagctaacagttaaaatcgccattgagcggcgttttttttttttggataataaaccgac

SEQ ID NO: 386773 - DNA, 1152 bp, Cannabis indica
ttttattaatttgctaaattagctaaaagacaaaacgataattcagtaagaatatctctcccactgaaaactcgattggaaaagaatttggcgctctagcaaaactgtgcgctgtcatattagcatattgtttaatgaaaagcaaagaaacattgtttaaaatactaaattagtgattgtgactaaaactaaattagtgacaacttgtgtcttaatactacgttttaggcataaggaatttttcgttgttactaaaaatcacatttagttacaaaaaattatgctgtgactaaaaagttatcactaaatgtagttgttgtttgtagtgtttctaaaatggtttccaatgatttattgagtttaattttggtcaattttagccagtttctaatttctgatgcaaaaaatataattagtttagtcatagatacacatttcgttcagactattattaaattttattttaataaaaattgagtactattatatatatactatatattttgaaaaataaaatttgtcaattaacataatatggagttcgatcaaaaaaaattttatccaattaattatattataatcttattcttttgttgatggaaaatagtgagtagttagttgataactatatagaagctcatgtataattttatgtaaaccggccttaattatacaaattaaaaaataataattaattacatatgcagtactatgtctgtgatatcactaaattgtattaattaattagtgatttagttttagtacgtaattgatatcactcttatatattattaattaaacttatttatatatatttcagaattatttatatttatgcagtggtggacaatttaataattaattaaatatatatgcatgctttcactaaaagattattcaaagataataataagcttagtttcaaagctagatgactttattatatggaaatgagtactgtgtttatattataataaagagattattcaaataaattttaataaaatatatatgatccgtaccgatcagctaggtcataaaaaattgataggggtttaaataatatgataattgttattaggacgtccaagtattcaatactacaaaatgaaagacttagtgcatgtttgtcattataactaaaaaactgtt

SEQ ID NO: 386774 - DNA, 1141 bp, Cannabis indica
aaaagctctttttgtagtagtgaagagaaattagaaagggtaacacataaaaaaaggaaaaaatagaaaaaattgaaagatttgtggatcttgcaattcgaattaaggattggaggattagaccagttgtaactccatttttgatagtgcatactttgagcttctctgaggtgagatcaccaacaatgtaacccggattttgagtgaactgttgataaatccaccctatgccaacctatccaaaacagtttaatagtaaattaattcccaacaactattctaaccgaattccagctcagacaaatcagttagaagtcgttacctcaaaccccttgaccccagcagtatttaaagtgctcccaaaagccagatcaaatagagttcgaagttagttcacctcgcagagaagaaaatacacagattgagtgagagagaaagagaagaagctttgagagaaaaacaagctactgagagttgtgagaagagagatctttgagagaaacaaatataaagagattaccttctgagatgtggttggaatcgatgaactctgatgtaatcttggcttgagtaataagattgactgagcaattcttctggcgagctcgacagaggacataccctagaatttttgggcgaacctctataatatgtttgttcttcttgatcttctctctattttttttaattgtgttgcaaatctctgttgattcttcttcttgcttgaatgttttgaaaaaaccctattgcttttcattttgtgtttgatattgggttaaattcgaagatggttctgaaacatgtgaaatcaaaacaatattagtaaagtagattgtgtgtgtatgtggtgtttgaactggtaacatgtgtggttgtgtgtccaatatgtggttcaacaaaagacaaagatagttaaccttaattcttgtctaaattggtattgtgagttggtgtaggtgtgtgtgtgtgtgaacgtgtcaattcctacatgaaccttgtaaaatctggttgtgtctttgtttactctcatttttctttgattatttctctctctctctctctgtgattgaatgtgtgtgtgtgttgggaatcatggggttctaactcaaaaccaattggcaatgagtggagtagcccatgt

SEQ ID NO: 386775 - DNA, 572 bp, Cannabis indica
attaatggatttacattagtggtttcgagggtgttggtgaggacccggaccacctcatcctggtgagccacgtcttttacttgcttaggtcgactagtaacaacgaaattgaaattaaaaaccaaaaaaaaaaaaacgaaaatttacaaaatgaagatgaaagagagtgtactatttctcgacccatggctgagagctttgcatcaatgtagccatcttcttcttttttctctgtaagttgatctctacttgagtagccttctgcagccagcacgctttataggatttccgtttattatttcccgctctatttgttctgcgctacccaagcaagtttttcccttttttttaaaccctaaaaattaaagaaatgttaatggacatttatggtgcttagtacttttgtgaggtgtaatattattattggtgtaatttaatatcgaatatcacctattttactttggaaaatttaaaattctatacttacatatatctaatatttttctctaaactaatatttttctacattaaaaatatatgaccacttttccaaaaccccaaaaatactcctc

SEQ ID NO: 386776 - DNA, 500 bp, Cannabis indica
actttcatgtgcatgtaatatataagcaaataatcccatgtgcttacttgtcccaccattgatccttttatttttgtatacatatatgaatcaaaaccagctacatgtatgcatatgtgtacatatctatatataataataataataatatgacgacccctttacaaaaggttaacctaacaaacaaataaaatgactatcctccggcctagttgtttcttgttatgtagttttgaagcaacatttttattaatcatctcactaacttattaactacctttatatatataattaagtatattaactactctcatttaccaaccttgcttcatggtataaattatacatggtaaatactattttggaccttctattttacaaaagttaccaattgaaccttgtgttttgttaaatgacaaaatggaccctgtattttctaaatagtacaaataggaccctgaattaattttttgtcaaaataaagtttaattataatccga

SEQ ID NO: 386777 - DNA, 1056 bp, Cannabis indica
tttatattattttataataatttctacatattttgtaaatttagtattcaatttttgaataaaaaatcaaaattattttttagtaaaaacaaatgtaatgtttttttaggagtattagtcaattttcaccttcgaaattacatattacattttttttttcacaacagtattcgttataattacatatcatcaatataaaaaaaaaaatgatatcaatttaccacgcatgttcaaaaaaacttcagacttattttcgccattgtaaattattcgaaattttttcaaaatttacaggaatgatgttgtgagttgttgtgggtataacgaatattgttatgaaaaaaaatatatatatatttcaacatgtattttcaaatacaaaagttgactttaaaatcttcacttggcgagctctccaagatgcactaccagttgctacttcccttgttcgaagaaaaattatcacggatgcaacttgttctctatgtcatcgggcttgggaatcaataggccatgctttctttggctgtaaatatgcccgtgcagtttggcgatatgcaggttttaatcttgattggcaatcttcctcaacaatgcataaaggcgattactaggtacacctttcaaccatatatgctaaaccagaaatggaactcataatttgcattttatggtgtatttggactgagcgtaatcgtgttgtgcactatcacaacgccaaatcggcaagaactgtgggttcctttgctgccaattatttgcagcaatttgctacagcccaaacaaaatttcatcatcacaactcagcaccacagcagccatctggatcagcagcacatcaccagcaacatcaacaaaacgcctttgtagctgctcctccatggcagccccctcctccatttgctttaaagctaaggttatgtttggtaggaaggaaggagagttggatagatggagaattgataaaggatggagaatataagggagggagaggagattaataatctttttatattgtttggtaggaaggattgagtgattgaatgatagataatt

SEQ ID NO: 386778 - DNA, 1625 bp, Cannabis indica
ttcaaatgcatcctgataagtcaccggggcctgatggtatgaccccaacgttttatcagaagcactggagtattgtctgtcaggatgtggttcaattcgttcgtgatttctttgataccagtaagttcccggattcaattaatgatacacacattgttttaattccaaaaaagaagaacccatctcaaatgagtgatatgaggccaatctcactgtgtaatgtcctctaaaaattgcctcgaaggtcattactaatcgtatgaagggagttcttgattatgctatttgcgaaacccaaagtgcatttgtatctggaagattgatttctaataatgtcatggtggcctttgaagtaatgcatcacttgaaaaggaagactaatggaaggaaaggttatatggcgcttaagctagacaagagtaaagcttatgaccgagtcgagtggaggttcttggaagccattcttcgggcaatggggtttagtgatcgttggattggcttaacgatggggtgtgttaacttagtttgttatcacgttataaatagtggcatgaagatggggccaatcattcctacaagatgtattcggcaaggctgtcctctatctccgtatctgtttattgtgtgtgctgaaggactgtcctctttgattaaacattatgaagccaaccgtcttctcacgggatgtaaggttgctaggagtgcgccttctatctcccactcgctctttgcggatgatagctacgtgtattgccaagcaacggaggaagaagctaatcgtgtcctctcgctactacatatatttgaagaagtttcaggccaaaaagtcaatctcaataaatcctcagctttctttagctccaacacccaaacggaaattagaagtcggatttgtggtttgatgaacattcaagaagcaggggttgatagtatgtacctggccttccaagcattgttggccgaaacaaaaatgttgtgttgggatttcttaaggagagaaagaggacgagaataaatggttgggagggtaaatttctctcgcgagctggaaaagaagtgcttattaagtctgtggtccaatcgcttccgtcttatgctatgaatgtcttcctttttccaattggtacatgcaaagaaatagagagaatgatggcaagtttctggtggaaatctaataattctaatggtaatgggagtggtatcgtttggatgaattgggacaggatgactaaacacaaagcggaaggtggtatggggtttcacaatctgagggattttagccttgcaatgttgggtaaacaaggatggaggctgctttttagacatgaatctttagctagtaaagtcttcaaagctagatattacccgaatggtacctacttgctgctgagctggggtctaacccgagctttatctggagtagtatctatgctgctaaggacactgttaaactcggccttaggaagtgaattggggctggttcgactgtgcagattacttcagactcgtggctacctgtcatggatagaacttctctttctctgattgttcctgggcttaaaaactgttggaattattttaccaggatctagatttactaccaagtatgtttgattaacatccta

SEQ ID NO: 386779 - DNA, 1482 bp, Cannabis indica
aaaacatatagacttgatgaatatatctatttaacagacccatgaacaacaactataatcttgttattttcatggagtatcctgttaaagttgcatttctcaaagaataaaatactattttacagattaaaacgaaaatctctttgagaaaacaaagccaaaagagatttcatacaattagattttttacttttgagatttttttttgaaaaatacttttgagattaaatccacttatgagaataaaaacaggactcattttaaactaacataattaaaatctaatgaatcactaaaatgaatcaaatgaatctaaaaattagtaaaatcaaatcaaaatgatatattgaaaagaataaaaccagaactattaacttggaaactagccctgacagtgcagacatcaatgttttacatgtggcaagaaagatgacatcttagagttgagtagtcctgagtcatagcatgttgacctgggaggggtccttagccttgtgccaagttgacttcgagaactccagaataaaagttcagacatcaataacttgaatctgacccattatctttcagtattcaataccataaagacatggagcaacctattacaaggtctaggagctaaaattacatgaacctgcaatccataagccaacttgggcacctagggtttcacctggcgcccaagttgatatcctcaacaaggatttcagttttgggaccatcttagtgaaaattagacaaaaattgcattaagacatcaactagacataccacagacatgtttgaggcatcagaatcaaattcagagtaagttggtttttgagcacccagggctcaggttgacaatttcttaatctaggccacaaaaaatggagttttcccagaattcattcaaacatcatatccatcttcaaaaaatattgagaattaactagttctgtggaccgaacggaactttaaaggggcagaagggtgacccaacacctaggttgacacttgggactggccctgcgctcaggttgacaatctggtctgcttccaaattagttcagcaaaaaatgctcttgatatcttcaccgtcttcaaaaataacaaagattgaagtaaattcaagaagaaaagatcaaacccatgtccgtggaaacagggaagaacgcccaggttgacctggtgttgggcctagcacccaagttaacaatcaacctgggaagttgtcgttaaatgcttgaatggaaacattgatgcaactattaactccaacatggtcagaaatggggggagataccccgtcctcatgttcagaatccttgaaagtgtaacaccttactagtttaggcgtgttaacatgatttttaaattaactgtgcagcttgttgctaatcaacgagtttattgaaaattgtgattaattaaaaatttactttattaattatcaacactaaaataatatacttatattaaaccaggatcccgttttacaaa

SEQ ID NO: 386780 - DNA, 724 bp, Cannabis indica
ccttttacaaatagttaacagtatgacatctagatgtagattttaaaaacacttttggtatcttttaacattaattcctcgtaatattaaattaggcaattcttatacttttcagcatagcataggagtattgagtttgaaccactcaaagtttttagatgttattgttggtctcttatgtcaccattcatcgtgaagaggttaaatttttcccataatttctggtgtgcttttgttgaattgaagatcatttacatgttttgtgcttacactacactaatacaaaatatggtttttctcgtcgatcaatacgcttgttaatttcgtgattataggccgacacaaatgaggttagggccaatttcccttatcacaaatacactcaattgtatcgacacaaatgttcgagcaaataggtctcctaaatatccgttggttttattaaagtgacacaaatggctattgtgtttgctttttacggacccaaatggacaatattatagtaacatcaattaaaattttaccattcaagttaacatgtaataatatttttaagaaaaaagaaaagcaaatctgtatataaaaaataaagagtaatttgcatcataaatacctaagtttaactctcattagtaaataaatacctaagtttaatttttgcggtaataatacttaagttataatttttgaagttctatagatacctggttaaataaattgtcac

SEQ ID NO: 386781 - DNA, 687 bp, Cannabis indica
agaaagtacaaaatgaagcttaatcctacaagtgctcttttggagtttcatcaggaaaattcatgggatttatagttaatgtgagaggaatagaagcaaatcttgagaagataaaagcattgctcgaaatgccatcactaaaaaatgccaaaagaagtacagtggttaatcgagaaaataattgcacttaatagatttatttttaaatcaactgataattgcctaccatttttaatgtgtttagaggcaataagaagttttaatggatagaagaatgcgagcaagattttcaaaacaataaagaaaatttgtcaaattttattgtattattaaagtcgataacgggagagactttgttcctctatttagcagtttcaaaaaatgctataagtgaaaccctggtctaagaagaagggaaagtcaaacacccagtatattatttcaaagaaaggttaccgagggcagagacgagatacccaccacttgaaaagcttgcattaagattaatccacgcctcaagaaaactgtgaccatattttcaagtgcatcacgtaagagtcctaaccaaccaaccattaagaaatgtactcttaaaactcgatgcctcgggacgattaataaaatagttgattgagctaggataatttgagaattcataacatccccgtgttaggaatattttaccag

SEQ ID NO: 386782 - DNA, 949 bp, Cannabis indica
atttattcatttgcatgtgcatgaaaataacttttcttccttttttctttctttctcatcgccacgggacaacggaaagcggtttttcgacctttaattaattattgattcttctaactactatctacttctgaatttcatagtaaatgacaaggaaagttgggttgtaaggttttttattgatatcaacttcataaataatgaatagttggcatgttgttatttggacctcttagcagtttatttctttttatcaagtttgatttttatttgtaattttgtttttgggttttttcagaaatatggaaaatgtggtagagtttacttttatatggtataaataaattgtcctgctttaaaacaaataatacaaaaaaatagaattaaaaaataattaaagtttaaatatgaaaaaaaaacaataaataaatttaataaaatttgtaataataagtttcgccgaaaaagtcatcggcactggaaaggtcgccagtgttgaaaaatttattatcacagaaaaagtcaccatcaccagaaaggttactggaaaagtcactggaaaagtcgcaagaagtagatgtctcactataaataaaaatagaaccggttctataacataatgaataaaaacaaataactcaaattgattataattaaattacatataactgattctataacataatgaataaaaacaaattaaaaaaataacttaaactagttataattaaaataaaaccggttctataataatgttataatgaataaaaataaataacacgaaataactcaaactggttataactaaaatagaaccagttatataacatagtgaatacaaacaagtaacaagcaataactcaaaccgattacaattaaaaaaaaaaagagagaaaatcagttcctaaaacactgaaacataaatgaaaaataaaactagttccacaac

SEQ ID NO: 386783 - DNA, 2155 bp, Cannabis indica
ttttttgcgttggtttggaaatgacgttgcatggcgtctttttaaaaatttcacaaaagcacaatatgtcattttttaccgatgcaactctgcgccaattccaaaataacgaaaaaatctcaatgtaatttttttacgttgttttaaggcattgaatgacgtgttaatcgacacaaaaagaccattttgtagtagggaaatgtctattatagaaaagaaaaattccaatttaaaaatgcaactattgaagataataaacaagttatgaataaattatattacttctatttaaaaaaagaaaaggaaagacaataataagtgatattagatcagaaaggaaatagagagtaaatgaattgataaatctcagctcgaattgtgctgagtaaatgcattgccttttatagaaggattttacaattagtggccactgattagaagacaaatggcagtgtacaattaagcaataattaacagaaatatcagcatggggatttgtgcaatgatttcacaaatcccgggtacaagaccgttaagggaatattcaggaattgctgagctgtcttctgatgtacagggttgagatactctggtgctgcactacacacaagctgctgtggagactcaagtcttaacaccacctctcaaacgcaggggtgaaggtgtcactccaagtttggatgtcagcagctggaatcttgatggagaaagagctttagtaaggaaatcggcaatttgatctgatgagggaatgtatctaacttcaagttccttcttcaatatcatgtcacgaacaaagtaaatgtcgatctcaatatgtttagtgcggggatggtacactggaatcgaggctagtgcactagaactcacattttcacaccatgttatagatgttttcaggagaggaaactttatttccttcagcagtgattctatccatgtgatttctgctgtaacctgagaaagtgccctgtatccagactcggtgcttgatctggatacaacagattgtttcttcaaagacgatgagataagggtgtccccaagataaacagaatagcctccaacagatcttctatcatcaatacaacatccccaatcagcatcagaataacccgtgattgaaagtctgtcgctgtaaccgatgtgtagaccatggttcattgtaccctttaggtatctgagtattcgttttgcagcaccccagtggacagatgtgggagctttgagaaattggctcaatttgttgattgcaaaactgatatcgggtcttgtgtgacaaaggtattgaagggcaccaatgaggcttctatagatcgtggattgtgaagtggttcaccatccgttaatgatatgaacctaccagttacaataggggtaggacatggcttcaaattggccatgtcatgctttctcaatagttcctcaacatatttcttttgattcaaatagatgccagtatcatctctgatcacttcaattcctaaaaaatagtgtaaggcacccaagtttttgagagaaaacagtttgttgagcttggcaatgaattcactgagcttggcttcattattaccggtgacaataatatcatctacatatatgagaacaaatataatgagcttgtcatctttgtagaagaagagagatgtatcggctttggaattttgaaagttccagctcagtaatgtgttcttcagcttgtcgaaccaagctcttggggcttgcttcaagccgtataaggatttgagcagtttacacacatggttgggtttgtttggatcctcaaatccttctagttgaagcatgtatacatctttttctaaatggccattgagaaaggcattatttatgtcgagttgctgaatactccagcccttgttcactgctatagttaggataattcgaacagtagaggcctttataacagggctgaaagtttccccaaagtcaagaccaagtcgttaatgaaacccttaagccacaagtctagctttgcatctctgaaatgagccatcagcattaaatttctccctgaatatccacttccagcccacaagattataagtagcagaatatgggaccatgatccaagttttgttgcgtttgagagcaacaatgtaacaccctaactaccataggcgtattacgtgatttt

SEQ ID NO: 386784 - DNA, 667 bp, Cannabis indica
ttttatttttattctattttattcatcttaatcaaacatagtgtattttttttttcaaggctaaatctcattgatttggtcactcttaactttgtcctttgtatatatgtgacagctgtccaagtgtacacaaataacaaaaccattcattgtgctcattcatgttcactagccgaaagtgcattatttatttatttatttatttcctttgtttaaaacaacctaaaaaataacaaacaataccaaaagaggaaacaaaattttattaaaataaattaattagttaaatatgtgtctccattattcttgactgcaacaacaaatctcgggcctcaccatattttcattatttcccatatctaaattaactaaaataattaatagtttttttttaagaaaaataaaataaataaaacataattttaatctataatttataaatgttaattaatttcatagtacaaaaactttagacaattttccaattaataatattctcattttcataaaaacaatttatgtagtacacttctttcaagtgttattctgaccagctctttatttatttttgacatttaaaaaagttttttaatttaatattttcttttaataattatttactttataattatttaagattatttgtaaattttttaaaaaatttaaa

SEQ ID NO: 386785 - DNA, 932 bp, Cannabis indica
gatttagggtttacctgactcagtgaatcgccctgaggagcttcatttttatttgtgaaatagaaggatgtttccctccgaaggtgtattgattaacgggaattaaataagttgacgatcaagaacaagtatccatttcctaggattgatgatttgttcaaccaacttcaggggaaggctatcttttcaaagattgatttgcgatctggttatcatcagctgagaatttgggaagcaaatattttgatgactacatttcgaactcgatatggtcattacaagtttttcttaatgtcattcggattcaaaaatgctccagtagcttttatggatctcatgaacagagtatttaaggatttccttgataattgtgtcatagtgtttatcgatgatattcttgtatactctcagatagaagaggatcatgagaaacatctttaaatggtattacaacaactcaaggatcataagttgtatgccaaatttaaaaagtgtgagttctggttgtcagaagtatcctttcgagggcacattatcggaaaagatggaatcatggttgacccgtggaagatcgagtcagtgaaaaattggccgaggccaagaacaatgataaaagtgagaagttttctcgggttagcaaggtattattggctttttgtcaaaggcttctccaagatttctatgccactaaccaagttaactaaatagaatcaacagtatgtttggtctgacaagtgtgaaccgagttttcaggagttaaagtagtggttaataacagcaccggtgttatctttgccaatagatcaagaaaagtttgtcatttattgtgatgcattcagacagggttactcaatgcatgatttagagtgtgatgctatagtttttgctcttaaaatatggtaaaactgttgggaattattttaccaggatct

SEQ ID NO: 386786 - DNA, 554 bp, Cannabis indica
tatattttgaatatcatttgtagtgtctactaggacagtaaataaatgaacatgtatatcatattctcgtagcaacatagtctcgaatttataatatttcttgtaagaacatatgattcactccatcaaaaaatgatagtcagtggtcaatttggtcccaaaaggaaatgctcaaatatgtagcaaattaatgaagataatgaggatagagtgaggtaactaattaaagctggcggcaaagatgttaaagagaaacttgtcaaggtagaataaataagcaaacaaagaagtcttgacagattcaaacaaacaaaaatgaaaacacaatttgaacgcaacaacatttctaagataaagaaaactaaaatgaaagaaacatgtaacgttacaagtcacttgaggaggagctgatgtcgtcgcgatcgctttcactaccagtgtaattaacccatggtctttcatctggggtaagacagtccttgaaccatgcatcatcaaacatttcagctgggaggcccacacctacttttcttaaatttggaacaacatcatca

SEQ ID NO: 386787 - DNA, 889 bp, Cannabis indica
ttaaaaaaataataataattgaaggttagaaattgcagtggcgatcaatcttagtcaacatgagaaagcacaaattcatttttaatcttagattactaacaagtaaactaagtaaaattattttgcaaaatatgatgttttgctactaaaaagtgaagtaatatgaaagagtaactaaaaactttagtagattactttcaacattggtaactcattgagttgctcgaattcccctagtttgattatttgattaacatttttgtaagaatgacactaaagaaccaacttatatttccctctttcaaaaatgctatattttcaaaaacattattcgaaatttactaatccaatttctttgtttgtataatattatctttttctgtccacatcatattccaccctttttctcttcccaaactaatcacctggtaagagtttcacaaagaacaaaagaggaagtgttccttttaggttgtgaagcttcctagtcaatataagtagtttcaaataacgaagcttcacatgctatttaggttgttcaaacaagaaataccctatttaaaagggataattacatatatcacacttttttaaaaaaaaaaaattatattgttacgtttaaatatattttttttcagatttttacaataatactgaattttaggtaaaattttacaattttactatcatacgacattttttataaaacaactgtaaacaataaaacagaacaattaaaacaacagtggaacaactgtgaaaacttaatacagtacacagtataaaacttacattgtattttagaaaaaaattccgccccataataaatctcaaaataaaggaaaacttacaaaaatactggaatttgggataagttttacaaaaatac

SEQ ID NO: 386788 - DNA, 2030 bp, Cannabis indica
ctaaatcttataagcttgatgtaaaaatagagtgtagtatatgtctttatctttgtaaatagatcttgtagtttgtgtccagcatcaaacttctctatttccaaaacttataaacaattttattcattttggggattgaaaatctctactattgggttacaatatatgtgttaccttttggtgacaatagtaattattccttgacgtgaacaaattcaaaatcagcatctgaatctttataagtcttaataatcttctagttgcactaagcaacactattatttagacaaactaatggagtttagaactttcaatgatagattttgtaatatcccgataagcctaatggtaaataattagggtttatattaatattatgggttaatcaggtaataagtgggattatgatcctactaatttatttcagcaaaaaatttaaattttgttataagtgagtaaataagcgtaatttgttaattacggacatttatttgaaatacgtggatataatatgagttatttgtgaaataaaaatattttcaggttcgacaactctggaaacctgattggaggccaaaaatgccacaacggttttagttagaaatattgatgggattattgggataagttaattttaaaaatactcgggtattttggggtacttagaattggccaaatacctttaaagtaaaagtttattaatggttaagaaataataagataactattaataataaagttgttattaatattatattgttataatattattattattattattaatatattattataatattatttttatatatataaaagttaacgtttaagtttatatatatattaagttataacagtgaaacagaaagaatgatcgaacgaaattctccttctccctccttcgataaaacattctccccttatatctatttttctttgattttcaatccgaaacctatcgatctaagctccggtagtagcaggatagaaaatctttgaaaaagaaaagcttaaggtatggtttaatttcgttttaagtttgaaaacaattagtttcgtataagggttttataaattagaatagttatgaaggttctgaccttataggattattcttgggtagtcatgtgactagttctgatgtttacttgttgaattgattttgagttagaaatcgagttttgaacttttgaaagcttagttcgaacattaatggcgtttttcatataaggggtcgatttttatttatgttacgtgaggatggtaatatttatggtatatatgcgccctgtgaagtttggactgatttggataagttttggtagtgtttcggtgagtgcaaaaattgggatttttgagttatatagtttttagaaattcctaagagatcagaaattgtatttttgtcataacttttgatacgagtgtccgtgttggacattctatataccgtttcaaaacttgcgacgagctctacaaaatggtgtatgttttagagccaaaatataagtggtattttagtgtgtttataccacatgatttggtagaaaatcctagattgtcttatgtgagtataagtagtgttttgggataaacacttattggtttatcgttgttgtgacatagggctgagatcatcgaggatagttctccacttgggttggccgaaatatatgaacctggattaaaggtaagaaaaatatattgtacggcatactacgttatatggaatacaattagtattgcaatgaattgattaacattgagatatagttaatattgttatataatgaaaagattgattagttgagtttcgataatgtgatgatattatgcatgtgatatatgggctcacctgtttaggtgatgcgatttcctagcaacgtactgggcgtaagtacgggcgtcagtgatatatgatgagtactgagcgtaggtacaagctcacctttttaggtgatgtgatttcttggcgatgtactggatgtaagtacgggcgttagtgatatatgatgagtaccgagtgt

SEQ ID NO: 386789 - DNA, 1480 bp, Cannabis indica
tgattagaagaatagattacaacgattacagcaaattcaaagagggaatttttatttgtataagttaatttggttttgtaatcacttgagatttatctaataaatttcattctctgggcgtggcctcgtggactaagagtaatttgaaagaattattgttgatattacttataaattgttgtgtcattttattttttgcatttttactttttgcagtatatttctgttttgtcatattttgtgtctaatagaacagaaataaattctgttcaaacaatttattacagtaccgcattattcaacttgtttaatacttttacttgtaattataaaaataaaattttgtataataccacctctaattacttttatggttttctttatttatatatattcttaatggtatatatatatagattacacacaattctaattatataacagcttttcaaatgcactctaaatagtgcaatgatagtacgtcgagtgctacatgctatcttattcctagttatattaaagatatagtatgaaatagtatgagtatatacctgctatatataccattgaatagtggcataactctgtacctttatacataatacagctagctagatagataccattcaattatgtatctaatcaatgtggagtccacatgggtcaatgatgtaccttcgctgtctaatggtcatgaaagaactcttgtccccctctctaaaaaaatctcttcattataactatactaaactcataccaaatacataataaacttcattatagatttaagttatcatagtaccaaaagcataggaggcactctcattggagaaggacttggcaaatccaacaaaaaacctcaattttcgtttatttaattatgttaattatttattagagagattctctaacactctctctgactaaatgatggtgttattgataagttggattgacatatatggtcggccaaattccctttgaatctttgcacttatattactttgtctctaatcaagtagctagtgttaattaaatttcacattaaaagaaaaagttatgtcatatttaaatcataaaccaattaataaatttattaaaaatccttgtcctttaataatacattttgcagtgctccaaaaactagtgcatattctttacataatttactcaacagcaatgatgacacattacaaatgattaacttgtataccaatttaagctccaattaaaattatacttccatattggtacattgaccatatatcatcaactttatgtaaaataattttttacaatattttgttgaaacagtaaaaaggagaacgcggtttcaatgtcttttgaattttagttctatatataatactactttcatgctccttgctaagcaaatgggggacaaagttaccattttgtaaagaataattatcttttttacttcctgtacttatgacactatactattatgccccttaat

SEQ ID NO: 386790 - DNA, 1104 bp, Cannabis indica
tcaagcaatgactttgcttaaaatgactttgcttaaaatgaccaaagggtgaaacatcactgggtgtgtgatagacttcaagcagtctctcttctgggaaggagggttgaagacgtgtcgtacccctagtgatcttccgtgcactaaaaataacttgcatgcaagagtcacatttaacttttatgaagcaaactttgacttccgtgagggaaggctaaagttgcataaaaatccaatcgatgacttttctttaaaagaccaaagggtgaaacatcactgggcgtgtgacagacttagggcagtccttctcttcccggaaggagggttgaagacgtgtcataccccaatgatctttcatgcataaaaaacatcatggaatcaccatccatgatgtgggaaggtcttgggatgcgcatgacccaatatgcactaggatctctagggtagtttatttcttctgataaatttcaaggcgcatagtagctttcgaggcaaagactcgaacctacagcaggatgaacgttactccagtagagattccctcacgagtttttaattactcgagtcatttctacaatgtaactctggagttatagttacatcgtgatgacataagtccctatcaaaaaacattgtcaaaaattgtttaccttaacaacacacttccaaccaataataacataaccaggcctgacaaaacccagtgggcgtaggtgatactaatggtctccttttagctatcgtcagtacgcgatcttacaacgtcagtctttgatcaacttcttgacacagtgaaaaggtagggaaagtagccgttggcaattgatctcacccttgcatcaacatcggcaccgaattcgcgagctagatagtgttgggttttgtgccctaaataaaacccatttcaatataatcagatttactaattaataaagattagaaatcgcaaattatgttgcatggttcacatgatttatttcatgattatattcaatgtataaattctattaagtccggaacatatgtatttgttcatgattatagtgttgtcagcacaatggaatataattgtgattatatgttcaaaagtttaatccctgattt

SEQ ID NO: 386791 - DNA, 850 bp, Cannabis indica
ggtaaccaaatagtatctatatatacatgattattgctctatagtaacttttatatgtaattataattattaatttcttaaatatacttacaattaacttgcaaagttgtttaagacaaaataatctagatatatgttaaataagtaaccaacttcatgagttactaaatgatatatatagaacaagtttatttaatagagttgttttaatatattttttaaaaaataacaaagtaaccaaatagcattttaaacattgtacaattagttatactatgaaaattattatttttatagttgtactcataaattatgtggtaaacacttatactttattgtatctcattaaattattaaatatgtttgaaaggtaatgaaaatgttgctacaatacaaatataaaaagcaacataaacttattttaaataagacaaaaatttacttaaaacaaagttttaataatgcaattaattttaagatatttaagatactatttagtttctttaggtaataaaatgtatataagataatattattgtaaagtaacacttattaaagtaaaactaattagtatcttactatcttactttttaactacatatagtaacttttaaatataaaataaataaaagatttttataaaatattgaattttgtttgagtttaaaattgggttaattgttttcttaaaaaactaatttaaattatgtaaaagatttttaaaaaatacctttaagtctaagtattttatattgtaagagtgaaaatataaatatatatatatataaggcaattcttggtttaacgtttcttggtttaacagaatatacttaaaaataaaagaatattc

SEQ ID NO: 386792 - DNA, 1143 bp, Cannabis indica
catcctagggagaatgcctcaaaatttactactttctcagtcttaatagatgatatagaaataatgtatgcaactacccagtctatggtgccatacaagaaaccctctcccatgaaaaaggacatgagcaaaagagacacaaccaagttttgtcattttcttgcggactacggccatgacacaaatgaatgtaacaatttgaagtgggagatcgagttcctgatcagaaaaaataacccacacttacaaaaatatgtcaaggtcgaccaagaacaaagggctgcccaggcagataaataaccaaatccaactaatgcctccaccagtagacgggcatcttcaggttatcattgggggcccataccttgctggagactcgggcaaagatagaaaaaagtatgcccagtccttgcagtatgaacaaaatgatgcaattcttggtcgtggaggagagaaaacctaatgtaccaggtgttggagaaccaataataacattcaccgaaatagatgctagccatgtcatttttccacataatgaccctttggtcattaaggtgcagattgcgaaaaaatggcagcatggactatggtaaaccacagagcttcctgaaatattctattcaagacaacatataaaaaaatgggactctagcttaaagacttgattccttgcacccaactagtctacgagttctacggccagagtttagcgccactaggacaaattcgcttaccacttatagtaggacaagctttgaagagcataacgataatggcacaataattggtgatcgatgtcccttcagctcttaacgtcatcttaggctgaccagctctatatgacttgaaagttgtcacatcagtattccacttttgcattaagttcccaactaaaagtggagtgggttgtctatagggaaatttaaggattgcacaggaatgttataaccttgctctatctaaagtcaaaaaggaaaatacttctctccagagttcagagaaagggaaaggcattgcccaataggaattcacccaaggcggggaggaagatatggatccctgacatggggaataaaatgcaaatgttgtgctagtagaagagttagaagaagtggagatcgatccaaccatcttgactaggaa

SEQ ID NO: 386793 - DNA, 908 bp, Cannabis indica
gcttgttagatatttctttttcttcttttttattttgattggctaagcatggaatttcgtaaggttgtctgacataggtcatgctactaaaaaaatcaactacaacaatataaaaagtaaatagaattatcaggattcacaacttaacatagaatgttaatacttaatatagtaattattgaaaatttagggttaaattgatattaaaacaaattaaagggtttcaaatgaaaattaagattagtgtgggtaggggtaaaatgttgtttttaggtgagaattatatgaagagaagaggggttatcttacttttgttaagaaaagcattgataatataagttttgccaacccataccatacattaccataatgacataaattagctgtttggtgaggaggggcttagttggaattatcacttttatatttattatgattattattatttaattaatttttttatgtgtcggctctttttttaataaataaaataagtaacacttttcctcttttaacagatacataaaaatttaaaaaactcatatatagggaataggaatagaacaaagaaagaatacatttttgggaaaggggcaaaattgtaatttcagtcatatattagtacttctactttttttttttgaaaataagcgtgttcatatcattaaaataaactagacctgttggtcattacataataggttcacagggaccgaattaatcggaatattaccgtacaacttgttaatgaaagcccaattagccacattatgggcagtaaaattacaagttctactagcataaataaaattacaacaagaaaaatagggagaggatttaacacaaaaagagacatagttctcaatcgcccagtgagactccgtcccattgatagcgttgataactat

SEQ ID NO: 386794 - DNA, 531 bp, Cannabis indica
tctttatcataaactcgaccccgaccccaacccccgatctggccctaacacccatcctcatacctcaaccctggactcgggttcgggtctagggtctcgagtccgaggtctgggatctgaagttcgggttcgaatttgagtccaagtttgggttccgggtcaagagtctcgagttcgaggtccgagtctagggctgggtttggggtctaagttcgagatttgagtcttagatcaaggtctacgccttgatctccaaacctagaccctttctaaatattataatacaagctaatacgtatcatttgttatgtattaaataatacgagttatattatattaaaagttatagtcgtaataattaatgcaatacaaaattttatccaaacataatattatttgttattcaatacaatccaaccaatcatacagaccctttaggatgagagtagtgagtaataaattagaaaaaataatacaaaaaaagtgggactcgttcaaaaaaaaggaaaaaaaatattattatattttaat

SEQ ID NO: 386795 - DNA, 2749 bp, Cannabis indica
ttatccaatactcaaataaaagcatactttgtagcagaagttgaagctcttttcttgctttagagttaccaatcgagaagactgataaagagatcaatcttgttgtagctgaatcagaagcagattctaaaactctgtcgcgactcaaaaaaaattcttgctcacttcaacagaaatttaaaaaaattaggagcacaaaaggttctattccaattacccaaaattttatccttctaatcctttagtttccatgctaattgaggcttgtatcttgacaatttaccacgaggtggatcttcaacttacaactctagaagaggtattaccaatagagctagaggtggaaaatgtcctctcactcagaatagaccccaatgtcaactttgccacaagattgtccatactttaatcgattgtttctattgatttgataagagcttcacaggtatttttccagcttcaaatcctccttcaatgcaggctaatctggctcaaaacactcaaggagatgatggggattggtatcctgattttggtgctacaaatcattgtacacctgacctgcaaatctcataaccaatgatgactacaatggttcaaatcacatctacgttggtaatggaccaggtctgtcaatccaacacattggccaaactctcattgcatgatctaatagctctaataaacctttgatccttaataattttcttcatgtcccataaattactaagaatttgttaaatatcttaaattttactcttaataataataataataatgtatttgttgagtttcgtgctaatctttattatgttaaggaccaggtaaccaagaccattcttctaactgggacacactacaatggcatgtatacttttaatccatgtcagttaaaggtgttgccattctctcaatccttattcagtcaagctatcaactcctcagatctagaaacaactttcactgtcaccaataactcaagtaattcagagtcaagttccatgtctactcattataataaatctcttattttagattttgaattatggcacaataggcttggccatccatctgaaaaggtggttcaagttgctttgagtacatgtaatatttcttgtaataaaatttatagtttgtcaagcatgttgcttaagcaaaattcataaatttctatttccaaagttttttactactatttaatctgaacatttatagtttattgtctatgatttatggggtccctctcatattcaatcctgtgatggctataaatattacatgagttttgctaatgcctttagcaagtttacatggatttatctacttaagaaaaaattagaggctcttaagactttccaaacattcaaagaagaaactaaacttcaattagaaagaaaattaaggtgttagagactgactggggtggagagtatagaactttttctgaacctcttaaacaagtagggataggtcataggcatctttatcctacaacctattaactaaatgggttatgtaatgctctaacaattaggcacgctatgattttacaataaacataacctaatcccgctaaatcgggattactagaaataagagcagagtttaaactttaaattatttaaggaatgaaaatatcacttgtaactatttaaattttacaaaccattctaaaatattgcacatgttccgagatcccgtaaaacaatttacaaaatattacaagtcattttaacatgttgacctaagcaacaaaccgagaatacagatacataagctggtagacccaacacacgtggtatagtgtggcccgaacatgtataatccatcgccaagccctcgaactcatggttcatcacaaactgatttaccctttcgtgcacagtagagcacacgtgagccaagcccagcaagatagtataaataacaatatgccatatattcacaattcaaataatattgatgccaccgcatctagtgtctatttagcatagacctatgtgttgctctcacacgtctatttataattcaaatactattgatgccaccgcatctactgtctatttaacatagacatgtgtgttgctctcatacgtctattacaataaggccttagattaatttatctcggttttgattatcaagtctaacctaattatgccttatccgcataattctttatctcaacatatatagcatgacattgcattcaaaatcattcaaacactagagtaataaccctagaccatataaccgctcactttagggtaataaccataatcccagtttctcacttaatcatagcataataccagacatgagcaccacaacgcttaactctatgtgctaacaactgtcttacctaatatcataagtatgtggagattctaaacctccgggtgttcctgagcaagtgccagtaatcttagtcacaattcttagaatttcacatatggggttaattccaaaattcacttcacataatcacataatttgcattccaattacagataagcacatagagctccaaacgagttttccaataatataaagaacgttccaaacgaagtcccaagtcaaaaattatggcaaaaacaaaaactcaaaaattccaaaaaaaatagggcctcaccgcggcgagcaactacaggttacaggtcttgtacgaattagaaagtacaattattcataccaataataataatttatttatttttgaaaatcaagaataataatctttatataaata

SEQ ID NO: 386796 - DNA, 564 bp, Cannabis indica
aatcaagagttgcatcgtcaatgaccaacactttcagaagctttagattttgaaacaaagccatcaaaaaatacttaccattccactgctcatcgtcattgaagttcttaagaaagatcgagcgaacggttgtgcattgttgaattgtttttataacagtttttggtatgcttctgtggattgacaagcggcgaggtttgttttcctcaaattccaatttgtttttgttcaaaatttgacaaaaacataaatcctttacctttaataggatgaactcatgcatcaaatcatgaactttgcaccctttccctcttccacgcctcatctcaatcgaaactaaacttctctcggcaagctcattcaagtatctttcagcttcttcttttaatgattttccttctcttactttaacaaaaccctcagaaatccataggtgacataatcttcctttcggaagtgaataatcttctggaaaaattccaaaatacaataagcaagatttgaggtggaaaggcaaatcaacatagctgagagagagaatttcaaaaattcctacgagttgag

SEQ ID NO: 386797 - DNA, 1509 bp, Cannabis indica
tataattgacatgtggctcgggataaagttcaattcacttaacttgggacgaacaacatttttcttatttatttcattaaaagtgaattaagggccaggcttttctaaattagaaaagttagatacaattggtaaggtttaatagaaaaataaattttttattattgtaattttattatatttccaattgtatttttattttattctgatataatatttatttttttattgatttgatcagatcttgtatgaagaaaattgaagtaacattttctttcgttataaaaagaaagtcacatttactgctcacaattctataggtacagaataaaaatttctgaactgattgaagatcttttttaagaaaattttttgtgagttgtggtcttattatttagaccgtgtatgagttgtatataagatgtatattgactatatataaatacacgttatagtagctaggtttagtatctctttcacatctttgtaatactctcatattttgtaagaaagagagtctttgttttgtaaaggggagggcgctcgtctcttcatttgtgttatatatgtatactgtattgtcttgaatttataatcaagtctacaaatgaagaagaaagacagtgctacaccttcgagaaaaggttctacaagctttcaggccatagcttgtcaagtcttgtctcgagaggaagcaaacactcttcaagaatatcaaagggagtttgagcacttgaaagttttagcatgattcagttaaaagacggaatacatcaaacttgcagcagacaataagagagagtttataatgtataagttaattactttgtatcttttagacatatctaataaatcttatttctgggtgtggtcccgtgggctaataacaatctgcaaagagtattgataccacgtacaaaaaccttgtgtatttttatttttctacactgtttatttttggtttattctgtagttatagagttgttccgtagctacagaataactgtgcttcagtatcaatattattattatgtaattaattaaatcaaataataaattggtaattataaaacacgaaatttcaattgatatcagataaagtcactaaactcttagtgagatcttgagattattttattccatttaatttattttatgtaagatgttgtctttgtagtatgaaattttatctctcgaccacctctatgttagggtttatgccctaaaaagcctgtaaaaatacgttggcaaatgtaacgaggtactttttattgctttagttcttgacccttcatgtacctcaaacattcttttagtacttttcattaggggtgttcatcaaaccgcccaaaccgttcaaaccacccgtaccacaccgcaccccaaaaaagatgcagtttaaaattctttacggtgcggtcgcggtttgaattttttctaaaccgcgcggtgcggtgcgatttgcggttttgaattgttattatgcggttcaaactgcaccgcaccgca

SEQ ID NO: 386798 - DNA, 1035 bp, Cannabis indica
taagcatgcaattttcattgtatttatagagcaaaaatagtgatccacgtgccccataaattgatggctatgattgcacccaagaaaatacaagatacatctaatagtctaaaaaatttgtcagttttgcgttttatgcattgcttggaactaagatattcaaatgattatatttgcctcaggaaactcgctgacatgatcaactatcattttacaaatccatgttgcacactccttttcaataagtgtaaccttcatgagccaaagatatgatgccacatgtcatttcatttcaaaaagcgataggcagtcaaccctaacttgtctacttggaatttaaaaaggttttcaccatttaagcatttacttgtcctcatgccatctggaaggaaaaagtcaagccttcgaaaccccaaagttctgaaagcttagggggtaaatgttatctatgtttatggaaggaggacacatgtaattctaagactaattagttcaacttatacaagcccaagggtaggcctaacatagataatggaccagatctattagcgaagttaagccattcagatgatgaacagatggctcgtccaggaaagataaatatctagcacagtaggcctctaaatagcatcaagcagcgattttagaagagtaattaatgagccttctgatgttgagcatagtatctcactcatttattattaaattctacaatatcaaggctttatttttaagattgtgttcgagaatcagatattccaaataaggaaatgaagtaattatcaatcaagaatttatgtgtctttattatccgcaaagtaggatacgatttgacaactatcagcatgacatagcatccacgtgagcagaagatcaatgcatcatgggccgggcttcactagatggacccaaagtcaatatgttatttgtatttaccccatgagtgggcaaggtttaagacaagaaccctaagtgtaatacccggaattaagaaaaggatgagcaaaacccactagataattatgtataattgag

SEQ ID NO: 386799 - DNA, 1723 bp, Cannabis indica
ctttcctaactataattgagttagttttaaaatataaaataagattctaaaaaatatattttaaaaaaatgatagttgttgtagatattcttgtatggctttgagggcacatggctaacacaaagtacttctttacgtaggctcaaattcgtatgagtcacctagtcttcaggaatagcccctacaagttggtcatattggtcacgttgatcatatttgtcgaccatgttaattatgttggtcatattggtcatgtaattaggtccttgataaggtttttagcaagttatttacctgtttttacgtaaatgtgacataaggtctttgtttagcgagtgatatttctattcaggttgaccggaacacttgaattcaaaaacgaggtaagaatagattaagatgtatatatgtatatgtgtgaacgtgatatacatatttatgttgctagaatatatgaattggtatcatagcggtgcaaactatagtgtcgggtcagcagtgcgagtatattgctagttttgactaatatttaattccataaagtactaattgatgttgtcatagctgtacaaactatagtacctggtcaacagtacgagtatagtactggttaagagtgatattatggtcaatggtacttttaggtatagaacgatgctatcatagaagtacaattatcgtgctgggtttgcagcgcaaccatgctagtagtggctaatattatgatcaatcttaccaaaggcaagaacgttcttgatttatctgttaagtctttgtagataggtgtatgggcgcctagacacaagtcggtaatatatttatatgttttatgcttttcttactgagtttgttaactgatagatatgtttacatgtgtaggtaagagaaaggcaaaggctgagcagtagcgagtctagagcttgcaggtgattgtacatatcagaattgttaggcctagagtgttcagttttgggacgacatgaacttttatttgtttttactaggccacactttgtgaaacgtattttgatattgtttaaattttaaatgggatcccaaaattatgtaaagttatgtatcattaagtaagtttatttaagtttatattgcatttcaagaatttgattagcaaaggcgtgcacaataattaaaaaaaaatcaattgtatagtgcctaagcaagtatggcgttataatttggcatcagagctgccaggttgtttaccgaagactgtcaagatatatacaatcatcctcagagataagctcgactcatagttcagtaagtctttacttgtttagtaatttatttgattagaaaagcaagataagaagcatgttagtaatatgctagatgaatagtgcattgcctaaaattctatgtatgcggtagttggattgtatttgatcattatctgacctacctgacttataggttcacaggctagtcctataatatagacacctgacgaaacatgatacgtcttggtaatatggttgagatagaaggcggtcagggaggtcaaaatcatcctcatctctgtgaatgtggcagaggttgtggtagattaaatagaggtggttatgaaaatccgttacaagttcctcaggactggaagcaaagctttgcagagatgcaagcccgaattatccaacaagatgaagagatccagagattaaggcaagtgtcaagactaggagcaaaggtttgtgactaaagtatt

SEQ ID NO: 386800 - DNA, 1515 bp, Cannabis indica
gcaacaattagaatttatagattgttgtgataagtattttatgtataatacttgatttggattgattcgggaactcgagggctatttcttgcaggtctacatcataagaatatataaaatgaattcaccatgattagttttcttgaattaaataattttcagggatgagttttacgtttcaagatgattcttgtgtggatattattaggaaggcttggaatagcttcggtgatagcaggtgttttaaaggcctagggaagagattgaagaaaacaaagattgctctccagggatggaacaaacgggtttgtggggatagcaaagcaaagttgaaattgctagaagagaaactgtgttggattcaatatcaagatgttaatgatgatttggtggaagaataacgtaaaatccaatggcagatctctaaagaatagacgagaaaggaactgatatggaagcagagttcgagagaattgtggatgacctaaggcgataagaacagtaaattcttttagacttcgattttggtttgaatgaaacagaatcatacatggttcttgaaagataagaacggtagatttaaatattagaagaaagataaggggtcttatagtgtctatgatctcgcaggaagttaatgattttctaggggatatacctacaattactgagattaagaggcatatcattgtgaagcactcattgaaggcaccaagccctgatgggatgtttggtattttctttcgaaaatgttaggatacggtaggggatcatgtgattcagtgcatacaagatttcttctgaaatggggttctttatcctgagttcaatttgaattatatttgcctcattccaaaaggtaacaatgtggatgaggtggagatgttttgacctatcagtctatgcaattttgtttataaagtgatttctcgtttattgttccaacgtttaagatggattatggatcaaattgtatcgccgtttcaatccactttcattccaggatggtggatagttgatgctactgtttgactcatgaagtggtgaataccatcaagaagtatagaagcaaaggtggtttgatggctgtgaaaatagatatgcataaagcttatttctcttgtgtaatcatgttttgtctcggctgattcaaaggcacaagatgagggtaagattcatggaattaaagttagtaggaatgcaatcccaatatctcatcttgtgttcacggatgacacaatcttgtttgcttgagctactcaacaaaatgctagtgttattggggagtgcttcaaaaagtatgaagagtggtcgggccaattgtgtagtaagcataagtcaagtattcttttttctaagaattgctcgaaagagaaaaggctcaagattgaaggcctactggaaaataaaacaattgttcaggttgggcatgttgggttttatgccctaaataaaactcatttcaatataatcagacttacttattaatatagatcagaaataacatttaatgtt

SEQ ID NO: 386801 - DNA, 709 bp, Cannabis indica
tattgtatcattatcttgtagtcagaattacgttaattcaaaattgttgtcattaccgtatctcactatgattgtcattatattctgagttattattgtcattaccgtatatcacttcaccatttataaataggttacataggtcatatttagattttattttttgacacaatattaaacgggttgtgttcagtatatatttgtaatacatgtgtcgacacgaacatgacctatgaacacaaattgccacccttttaatgagaccagactatcctcaacctatttgcatcattatttatgttggtaaaaaaagaatactttatgacaaaaaaaaaagagaaatattttttttgaaaagttgagtttaggagaataaaaaaagttacaaacaaatatgaaatagtatgaaattattagaggtatacttatttttatttatttttatcttaattttagagatagacttaattagagagatttttaaaattcaaattataatatattttttattgctataaaataatataaaatagatgagaataaagaagaagaaaatgaagagagaaagagaaagtgaatgagaatttctcagttgtttattcaatggggtgaacccctatttatacaaatacaagagtcaaatattaagaaactaagaaaaaatgaatgttaattacaattaatggtaataaataaaagatttggacat

SEQ ID NO: 386802 - DNA, 2099 bp, Cannabis indica
agagagagagagactcttgttcaaaactcaatttcatggcatgccacgccacactataaaatagtgacatgtcaaaatagtgagagtgagagcaagaaatcattattccaacttatcatttatagattttgtaaaaaaaaaaaaactcatttttatgtataaatatataggtatgggtccaaatttgtatattgcggataaatttcatttagcttgttcgatttgtgattagtttgataagtacataattcataagtttagtggaaagtcctgtctgcattatctgaaaagtttttataatttggtgtgaaaataaattttaaatttaatcctttttttttttttaaagaagtgtacaattaattatattaagttttgccttgcagcaagtgctacaagcagttcctaccgctgtgatggacgaaaggaaccactctctgctgcagccatttactgtcaaagaagtgtcagatgctctacgctcaatgagcaccgatacaagcccaaataatgatggaatgtctgcaatgttttatcaacattactgagatcatattagaacagatgttacttcagtggtccttggagtgttgaatgaaggtcatgacatgattagattgaacaaatcaattattactctaatccctaaaattaagaagccgaaagcaatgggagattatagaccaattagcctttgcaatgtgatttgcaagctgatatctaaagtgattgtactacggtttaaagacgttctaccattggtgatatccgaaacccaaagtgcttttcttccgaaccgccttatcactgacaatattctcgtggcttttgaacttgttcatcatctcaaacacaagatgcaaggaagcaagggttactcggcactcaaacttgacatgagcaaagcatttgatagagttgaatgggattaccaattggcagtgatgataaagatggggtttgctccacaatggacctctctcattatgcagtgtctctcgtccaatagtttctcttttcatctaaatggagagatttttggtaatgtttggccaactagaggtcttcggcaaggcgaccccttgtcgccatatctcttcttaatttgttcggaaggactttcaaggcttctacaccatgaagagcaattgggtaatttgctgggtctaaaactcactaggcgtgccccgtcggtatctcatctattattcattgatgatagcctcttattttgtcaagcgaataatagctctgccttggccatcaaagagtcctcgcagtctaccatcaagcttcaatacagttcctcaatactcaaaaatccattatgtctttctctctgaatacttcaagtgatgcaaagaacttcttcagtcaaactttggggatgccaatatgtgaatgccatgaaacatatatgggtctccctgcctattctagtcataacaagaaggagttattcagcaatgtaaaggaaaaaatttggaagctcctacatgcttggaatgaaaaattattttccattggaggtaaaaaactgcttttgaaaacggtggtccaatctattcatacatatgatatgagttgctttcgtttaccaatggatttctataatcaaattgaatctatgatgacaaatttttggtggggtacaaacaaagacgggtccaagattcattgaaaaagatagaaattgctatgtaaatcaaagtttgaagggggtatgggctttcgttcttttgttgatttcaatcaagctatgtttgcaaaacaagcctggaggttgtttgagaattcgaactcactgttagcaagacttctgaagcatagatatttcccaagaaactctaatttggaagctcaccttggacactccccttcattaacatggcaaggaatacattagggaagggaactacttcttaagggacatagatataagattggtaatgggtttcaagttagaagtgggttggatccttggattccaggacatgacgaattcaagccaatatgttatacttgtaacaccctaactaacttaggcgtattacgtgatttttaaacgtactgtgcagctcgttgctaatcaacgtggt

SEQ ID NO: 386803 - DNA, 2218 bp, Cannabis indica
tatggacgaggttgttgaaagaagagaatgagcctatgatttggactccatttggtggaatgatgagtaagatttcggaaacagaaattccataccctcatagaaagggaattcttttcatgattcagtatttgagtacctgggaagatgaagaagattcagaaagacatgttgattggattagggagttgtatgagtacatgactccttatgttaccaactctccaagactagcttatgtcaattacagagatcttgatttggggattaacgagaaaaacaccaacttgttaactttgacaagtagtgatcattggggtattaagtattacaaaaaggataactttaagagattggtgcaagtgaagagccaagttgaccctgataacttcttcaggcatgaacaaagtattccacctttaaattactagtacatttgcttataacttttacttttatgtatttaaagctggacggaatagatgattatgtaattgcatctcacatgtaagtatgctgtgtaaggacctattattaggctagtatggtgggctagcatatattaaataaaaggttatttgagtttttgtattgggggtagtgtttaggagagaatacaatagtatatgtaggtgactaagagagtagagagagtatgtaatgtattgagtaaatcactttttctattgaacgggcctaggggctcccactaattgtaattgctctactcaaacatataatacatacatttttagtgtttggctactattttgctactgttctcttgttattattgctgttatttttagttgcatgctattgttttattgtgtgtttgggtttagagttcttaggtcttatcaattggtatcagagccaagttctttggatgccgataataagaatggaggaaaaattagaggaacaatggaaatcggagtcttattattatcaatctaaatttaatatactggaggaccttgcttcccttttggatcaagtaattctcaggaaagtaaggttactccgcctttctcgcgatctccgaagtcgtgtcgcaacaatatcagaggacaacgatctcaatgagtggatccaccaggctgtgcaatcagtatgggttcgcaaccaagagggaattcagagtcgcaacgcgccgattctaacttctggacctccttcaacactagagacggatgttgaaagtgatgaagagatggaaatggcaataagagaacacaaacgagcctttgctagacttgatagctttagagaaatcgtcactagttctctaacctacagctagtgagttcagggagtagcaccaccgattctaggtgtgacacaatgggtatcagatgttgatggtgatgaggcagttatacaatcggagttcttaaatgatagcgacgctgaggttaatgagattgcagttcaatcggagccatcatttgttcgctcatgttcatccgtgattgagctccttgaggaggtccagcaggtatacagaaaggaaatagaagtagaagattcccttccatcagtgtcgttgcctgagaagaacactgcggagatcatctctaacggagaagaagacaaatggccaaagaagaaaatgggctaaatacgatgtcagagaaaaaccagttgaggaaaacgtcgctggccaagaaatatctgcaggatttgatagcgaaggagttggcgttggaggagaaaagatcgctagaggcagttccatcaccagcgtcgaatgggatgagttagaaatcgtcaaggtcagaccccacagttcacgcaaaagagatggtgcctgcgagagatgactttggtgaaacaaacttctcaaagccttatcatacaaggtctaattcattaactctttgttcgtatccaaacccactaaacttggcccacctaaacaaaacccttacctccactcatcatttcaatgggcaggtccaatgggtatcctagtatagcccatttaaccaatatttcttcacataaaaggcccaaacaatacatcattaaagagcatgtgccatttaatgaaaggtcacctcgcattcttctcttccacaaatggcccaacttatttcaatttgtttcaaatctagcccactacaacacgtcttcacttaatttttccaagggaaatttttataaatatgagaattgagggtataatttatttttttatggcataaataagtaa

SEQ ID NO: 386804 - DNA, 1172 bp, Cannabis indica
atgtcaaagttcagggggcaaaactcctaattagccttaatttatactgggggaaaagcccgtatcgaaagctccatatcggatggtacttgtggagctgaaagtgttgaaggttcagttacaaggaatgttgaactttaaatccactaaaccaagtacctcactttggggtgcaccggttttgtttgtaaagaagagggacgcaacattgagaatgtatattaactactgggagttgaataagctgacagtaaagaacaagtatcctttgccaatgataaatgatctgttcgatcaattgtagggaaagaccgtcttctctaagatcgatctttgatctggttatcaccagttgaggattcgagaggaggatattcctaagataactttttgtacctgatatggacactatgaattcttggtaatgtcttttggagtaacaaatgctttgacattattcatggacttaatgaaccgagtctttaaggaatttttagaggattttgtgattgtcttcatcgatgacattctgatcttctctgattcagaagtggcacatgagaaacatctttggatggtattgtaatgtctccaagagaataagctttatgctaaattcaagaaatgtaaatttttgctgcctcaagtaagctttttagggtatgttgtaaacaaagatggtatcttggaggacccagtaaagattgaagcagttcaagatttgtcacaacccaagtctataaccgaaattagaagtttctagggattagcgggatactacaaaaggttcattgagccttaaaagaattaactcgaaagaattgtaagtttatttgggctgacaagtgcgaaagtattttccaagaattaaagcagaggttaattactgcactggtgttaaccttgctagttagtaatgagaaatttgtgatttattgtgactcttctaaataaggattaggttgcattttgatgcagtccgagaaagttatttcctttgcatctaggcaactaaaggagtatgaacaaaaatatcccacccatgatcttgaattagcaacagtagtttttgctttgaaagtttagcaccattacctgtatgggcaaaagtgcaaaatgtacacagatcacaaaagcctcaaatactttttcactcagaaagatttgaatat

SEQ ID NO: 386805 - DNA, 1440 bp, Cannabis indica
atttttttattttatttttggctaactttggtagtaacattcatataattcgatagaaactctcaaaatacttactattttagattcagttactaaatgcactttttattttgttaagttatacaataaatcagtattttttaaaatagtataaataataagtaaactaattttttttatcaaaataaaattaaataataatttgatttaaaagtattaaagataaaacaaattatatctttttataaaaaattatttttcaattaattatattgaaatcaaattattgaaaattgaactaaatttctatttttacaaatttaaaaaagataggtcttataattaattttttccacgtgttacatacccaaatattgggagaataaaaatagatatttatatattttctctttctctcctactttccgagaaaatcctccaagaaaataaaacttaattagtctttctttctttattttatgattaattcttaattaattttttcctttctgtttaacggccatggaagcagccgccatattcaagaatttttcaggtacggactgttcatcaccggattcatcgccgctaaactcaatctcaaatcctaattcttactatctctcactcgaccgatttaactcaccggagtacatggagatggtaggcagaaggaccggacactccgtcgtggagtacacgagcttgaaggaccttatccaaacgtcgtcgtatccggcggcggttatgtctccgactccgagtacaatctggaacgaaattccgataaagaatcctctggttaagcacgcggctatggcgtatcttcaaccgatgaagattaagccggagattgggagccaaggactaaacgggaagttgaaggagaagtgcggcggcgcgtggggttggggttgcttagagggagtgtgcgacgtcgttttggaggctttaaaagacgttttggggtttccaattggtgaagttgaagatgatgagagagaaacaatgagcaagttcactgagaatagaggggcatttttggaaatttaaattggattttgactggtagataatttcaatattcaattaaaaaaaaatagatgaaaaagaaggtaaatagtaattttttgggggggttgatttagttaaattgtataggaatttttattcttttatttttagtggagaaattttattttattatcattattatttgggaaattgctatgtatacatatattttatttttataaaattagtttttagtttgaggttatattaattttattttgaagttatattgttttaatattataaaattttataaaaattgtttctattttaagattatattattttattttgagattttattatttttattttttataaataaataaaaaaaaattaattttaaaagtataaatgaaaaaactc

SEQ ID NO: 386806 - DNA, 1611 bp, Cannabis indica
gatctgttggtgatagaagcttgaattacaaataagagagtgtccagagttctcatggataatgggagttttgtcaccattctcttcaactcaacttttcaagctataaaccaacctaacatcttcccagttcaactccaaggcttcaacggagatacattgcttccaatggaaaaaatacagcttctagttacactaaatggaaaaaaatttggaagtaacgtaatatcaacctacaaatactgtacttttatggtagtggactgtcccactacttataatgttatcctaggacgacctttcttagtagattttggagctgtaacttttattcgccatctgtgtataaagtacccaagtaaaattggaagcattggaacaatcaggggtaatcaaaaaaatgtgtgagaaactgctgcaatgtctcaaccaaaaatattgttctcatggtctaggaagaatatccagttgaactagaaacacccgctcagtcaacactgggggtaggctgggaagaagatgaattagatgcatgcgtcagggtggagaaaatcatcgagccaatggaggaggtagaagaattgtgcatcaacgatgaagatcctacaaaagttattaaagtagaaaagaatctacctccgataattaaagagaaaatcgtatcaaccgtgaagaagaacaacgatgtgttagcatggagccattctgatatgactgaaatcagtcctcatgtaatctccaggctttaaacgtggacccaaaggtagatctagtccgtcagaagagaaggtcgtttgatccatctcgaacgaaagcagtaaaagcaaaagtggaaagttaatcaatatagagtttctccgggaagctctatacccaacctagcttgccaatccagtattggttctaaagcctaatggaacatggagaatgttcattaatttcataaatttaaataaagcttgtgcaaaagattgcttccactttcccgaatagattagatggttgacgccacatctggatacaaatttctcaattttatggatgtataatctggttacaaccatatcaagatgtatgtgtgaattaagagcatactagcttccacagatacaagggcatttattgttatatggtcatgccattttaatgtcttggaaaagaacatggatatgtatgttgacgatatgcttgtaaaattaaaaacccttatagatcatagtgaagacctagaagaagctttttccatcattttaaaatacagaatgatgagaataatgactttacatattttacactaattcaattttaatttttttttttcgtatcacgtatgttatcatacttgccacgccactctatcaaaatttgagtaaacactataaatttcacatttctaacatgctatagacaaataaaactctaacaccagtatctaagataataataataataataataataataataataagattcaacattttggaaaggaatatctttgagctaactgtggatggaagtaatagaaatgtttgcattcaatgggttaaagctataactaccatatgtctatttactttttcattcatttaattcactaacctttccact

SEQ ID NO: 386807 - DNA, 1717 bp, Cannabis indica
gtgggagagggtcccagtcccagccgacgaggaggaccaatattatgttgctcgcatccattatctcaagaaagtaacccttcagaagctgaagaagaagcatcccgaggtaatcaatgtggatggtcacctaccgtacttaggacagaatgcacctcgctagtaacattttaggattgccaatataatttttacacatgggacgatttttgtacagatcacataacccataagtttgatagttggtacccacgattccatgtccaacttagttgcactagttcctactacagaattaccgaggtagtatattaccaacttggatagggcgagccatccagattcaaattgggatttatattcaataaaatcttgtgatatatacatgatcacagggtctagggagtttagtaattactatagttcttcctcttcatcatttgatgattatggtaactttctttaagtgggagtttattccccacctttctattatatatttttgagcaagtgttgatgtatcttttttctttgcctcgcagatatggatctcaatttggaagacatgctcaacagccctactcttgtaaacaaaagatccaaaaaacgtccagctcaggcgaatgaagcctcgggttctctactaaaaaacccaaaagaacgaagcagctgcaaataagaagcgatcttctaaccaactcaccacggagcttgcgaaatctctagaaaaggttgctcctgctgtggcgagggccaatgaacaaccccttgggtctgtacaccaggtgaaattctttgcttctcgcccagagatagttttcctcgagccctcctgccccttgcccattaaagctggcacagaaggctcacaactctgctcgctacatgctaccaacaattggcagtgctatcaaacctttgaatctagcgactgtgaattactcaataaagggagttttgaaaacttggtgcagaggagttatgatcttatgcagcaggttagtcttttctttgtgtttttttctttcactcccattgttgttatactctcttaatttctggtttcattcctcgcaggcatctttcttgtcctttgctgctcaacacatggggcttcaacgagttaagatgctcgagacagaacttcgtcagaccagagagcatcgtgatgtcatcgccaagaagtggaatgattcagagtctaagctaactcgtgttagaaaggaagccaaagagaaacaaaggacttttaaaactgaccttgagaatgcccataagaaaataaaagagctcgaggatgctaacaaggctgtccatgctgaggctgacagaaaacttgaggaggctaaggttgacaccaaaaatagggtcaacaaaattgccaagcggtctatctatcaagcttgtttagccaatcctgagatggattttagctttctaggcaaagggactgaagagatgctcgcatactgcaagaagaccaagaaggaagaggctggagatgcaaatgaggttgaagaagattaagaagagccaactaaatcccctactatgtagtcttggtctttttattatttttatttatataggaaaatggccctttggccgagacaatggttgcccctagtggcattattttttgtaagaaattttgcattgttagatggccaactttgctttttttttttttttattgcatttatctttacttttaatg

SEQ ID NO: 386808 - DNA, 1457 bp, Cannabis indica
  modified_base (1431)..(1431): a, c, t, g, unknown or other
ttttttttaaaaaaaactaatgtatggtgtactgtagtatgatgtgaaataaaaaattttgaaggacagagtagagaagctgatgagagtgatctaatgtaaaaatttgatgtaaaatgaagaaaatagaacgtttttgtaatgtattataaagaataaagtagagcgtttaatgtgcatactcagaagctatagaaagttatttctatgactatgactcaaactttgaatcttcaataaaaaactatttttgcccctttaactttgtcactaaaaaatcatgctccctatacttatatgaaattagtattatgctacatttttttttatttttctcaattatcttgcgaatgtgatattatattgtttaatttaaatttttacctaagtaaacaaaataaaaataaattttacaaaattttattttgatttaatctttaatatattttatgttttaaccttttttttctttagtaatcaaattagtttcaagtttttttttttataagtttagtttataaatgtaatttttccattaaaatgagattttcattataaattagtttgaaattagtttgattgtaccttttaataaacattatttactttttttattttttaagtcgctaaacaattacaaaaatttaatacaagtcttgatttttttaattgataaagttaaagaatcattcttaacaataccaatattatgagagacacaatcatataaatgacaaaatttaaggagtaaaataattttattctttaacaaaaattttaatttttactgacggataaagttaagggggcatttttgacaatactaatactatcggagtacaatcatataagtgacaaaatttgggaaaaaaatagttttggatactttaacaatgcacccctaaaaggggtctaccgatacacccctatctatttcggcatatgagagaatttttgagtctaatttttttttcatagtagtctatattgttgttaattaaagcatcctgcaaaattttaaaagattcaaaaaaaaaaaaaataattaacaagccaaaatgtaagattcttttaatttatacgtttatgaaatagcatgtcaaattttttaaatttttcaaaattttaacgaatgtcttaaataactataacctagacaccatgacaagaaattgatattatctcaaataccaaaatagataggggtgcactaaaattttattattgtatgtttgccaacttaaagtctggtctgactgtaagctgatgttttacacaatagggagctttgttttagagactctggcactgtgattggtgctatcaaaatctattgttggttcatccattgtattaatttctgacatacttggagaggcgctaatggagcagctcattttaatttcatgaaatttttacaccaaaaaaatntaaaaaatggaaatttttatttacac

SEQ ID NO: 386809 - DNA, 3074 bp, Cannabis indica
taattaacactccttattattttatatgtgaccccgaatactacgcattttaatattccttaattagttccttatccttagttaattattctctaaacctttctctcccactaaaaactacttttcagagcaaattaatatatactgacccatctgagatgcttatgtctgtcctttttttgttttttcttctttattctaggatttatatgtatctatatatttatataatacaatgtgttttgcgttttagggataattaaagtgggttttaaggattaaattaaattaaacacacaccgactttcttacttgagttgagccgaaacaagtaaagaaaatccagccttttacatcctgtataagggcctcattgtctgcataatttgtagcctccaacatgggcaagttttcttaatgttcttagatctttgatgctcatttaagtttttgcactagaccaaaatttttgcttccattttgtcttttttgacctaaaaagatacttgttgcctatccattttaaaaattatttagagccaaacaaacctatacatattacacacatatatatatatatatatgcatgttaggttatttaaaattttgtgtcgttataatcatatatatattattttattaatttatagcttaaaaaaattaaaaaattatgtttaagcaagaatataatttagtatagatctatttatattgaaactaaaatcatcagtcgtcttgtttaaatgtaagttcatgtaatttgttctactattattactaataaacaaagtttttttaaaaaaaaaattaacaaaagtataatggaaaaaaaaaagaataacaatacaaaaaagattaatatcatatgtatgctcgtatagtctttagaactattatatatttactaatagtgcggtgtatatttatatttgttaccccaaaaactttttatggtgacgtgtggacatcaatgtttgacacatggcatgaaggatgacatcatggaattgagtagacccgagtcatagtaatcaagctgggaagggaccctagccctacgcccaagctaactccgggatctgtaggatggaagtttggactttaataacttgaatccaacctagtatctttcagtattctgtaccatgaagacatggagcaacctaatacaaggttcggcagctgaaattacacgaacttgcaactcgaaaactaatctaggcacctagggtttcgccccaccgcccaagttgacatcctcaactagggtttcagtttccaagaccgtattagtgcaaagtggccaaaacttgcattgggacatcgacttgacatatcacacacatgtttgaggcatataaatcatattcggagcaacttgatttttaagcacccggggctgagccctgagcacccaacacccagattgacaatttgacaattttggtgccttccaagtgttcgatcaaagatccaacttttgctttaaatctatcttcatcaagaacggggaaataggtcctttttgaggaaaaacaacagctcctaggcataaaaaacaaaggtctggcacccaagttgacacctggttctggccttgcgcctaggttaaaaatttgccaacttggaccacaaacaatggagttttcccagaatgctttcgagcatcatctccgtcttcagaaaatattgagaatcaactatttcagggaaccaaacagaacatgcgaaggggcagaagaggggtcagcacctaggttgaaacttggaaaattctttctttgtacttttttctcctatttttgtgggtctcattcacttataaaaggagagctcctttagctcattttgaccattcagaaaaccacccataaggtcaaagcttctctctctagaatttgaagcttttaatacttaaacacttcctgtaattaccatctcgtgagaaataaaatctcgaagtacacgtagccccattactatcgcgatataggggataaactactataaattgttgtgtctctcattaattatttcacaaactttctattcttgccaatctagcaagcaagtgtggcttaaaaatatagtctagatttttaagtcaatatttttgtgctttcattgagagccacaacttaagaaagtgtataaacaagatggttgcactacgttctacaagtgttgacagacagactcttgtagttggccaaacaactgaggggcacgccagttgaaggagttggaactgggactaattatgcgccccaggcgccaggagtaggccttagaaccagctcctcaactcgtcctccaaggccaccaacagcaactcccagtactggcatcaatgataagatcccacctggggagccacgtgtggagatagaagaccctgaggagaccgatcctcatgtagctcagctcagccaaattgtggctcacttacagcaacaactacgagactctcttgataagcaacatgaacgggttccacattagttcgtggaaaatcagaagaacattgagagttaacacgttgagcaagaatagtggagagctaacctgtctcaacagattagagaagcttatcgcactaatcatggaactgcttcccgtagatgtattttcgagttggtgagaaagacaccccgttgaccaactggtcacgtgggaactagtgtccaagggaaaaccttgaatactcagaacaccaccactacacctggtaactgagtaggaactaggtaaacaccaagagtggagaactcttgaagggaaagtaccttcgatctaaagctcgaaaggactcaagctcaaggcaccaaccaataggtcctccacctgatgtttaacgacctcgtaacaacgagagaaccgacaagactcctccaccaagtccttctcaacgttctcatgaacccaggcctcgagaccctataaggggaaaaggaccttttgttcaacctaaaagaagtagcaggagatgctgcttcaaaattagaggctacaaaattcgacgagtaaggaccaatcagccgcttcatacttggaagtactttcgagatgaaaga

SEQ ID NO: 386810 - DNA, 989 bp, Cannabis indica
caacttaattccatgtacacctaaatagatagtagatctttttttttgagatgtgtttaattaaaagatctatatataatattaaggtcgaaaattgtcttaattatattttacttataatattgttaatataattcaaaagatataaatagcttgaaaacttatatagataaaaatatagttgagagagaacggggcaacgggctcaataattttgcatgtagagacaccaataaactagctagtgtgatagattgctgaacaactaacttttcatttatcagttagctagctagctagctatatagctctaattgaatcataagtttttatttcattttaatgtatatgctgacaaaaatgaatttgaactcaaaacgaaaatgtcaattaatggagtccttaaaggaaattgatatatatgggtaggttagaattggttgaggagctagcttttatatatatgtatctatatatagctatagataggctagctgtatttatatacttgggccatattatatacacacatatagacggcttaacatcgcttgtcgtcactttttacccaatattgggttagcttagcgtgatagataaactatatatacactagtaataagtagttagcagttaaatgtgcccatacatacataattattttcaaacgtttgcaaaaacaccaaaataattcacataatcagcagaaacggatacaggcacaattgatacgaaatagttgcagaaaaataaataacttgacacaagactgacgtaaatgacagtggtattcattgttctcacgaacactcctagtccacggggccacgcccagagaatgaaatcaattaataaaggtatcaaaattacaaagacaattgacttaaacaagtttagactccctctaaagtattgccgcaatcctttgtaatccactttatgaatctgacttcttgaaacaccttcaagcccgaactcccttcgtcttt

SEQ ID NO: 386811 - DNA, 1107 bp, Cannabis indica
tgctctgttttcgtcccgaccattttcctggttcatttttggtgttccatggcgtccaacagtcacatgaaggagattgaggatcgttggcagaatatccaacttgaggaagaagaggaagatgaagttttctatggtgacaatactggggaggacgatgacgaacaagccattgatacaaggtggtgtctcgttggtcgtttactcacgggaaagatttcagattttcaggtgtttcaaaatgttatggctgatctgtggaaacccgggagaggtatgtacatcaaacaacttgatcaaaatcgatttttatttcagttttaccacgaagtggacattcaatgggttataacaggcagcccttggacttacgatcgaaaataaatcgttttttctcggctgaaagatggtgacaatcccaagactctcagtttaaacacaatcgatctgtgggttcaaattcacgagctgcaatctgggttttttacgatgaaggtggtacgcgatgctggtaattacatgggtacgttcattgaatctgacccaaacaattttgtcagagtttggcgcgaatatctcagggtgcgggttactttatcgcttgataaacctttaaagcgaagaatgaaattccgaaaacgtgacggagaaagcttctacgctgtcttcaaatatgaatatgttcctgtcttttgtttcatctgtggtcttatgggacactctgaaaggttctgtcctcggttgttcgacacaccagcaagctctatcgtcaagccttatgggatcggtatgaaggcaacgccccgacggcaccaacaagtttctgcatcaccatttctccggcctggcagatccatggattccccacaatcagctacacatcccacaaatcgtggagatatccctgccactaaatcagccacgaattcaatgggaaatccaccagctaatcgtgcgagatcaaatcccaaacaaaaagagattgtcatttatgacagccaggaagaagatgaggagttgacaaattctgaatttgctagttgataaaactcatgctgttaccaatgattccttattgcattggaaatgagtctaatgataagtaat

SEQ ID NO: 386812 - DNA, 695 bp, Cannabis indica
ttttttttttactattttttaagaagaaaaagaatcagaaagattcatgatgggttttggttgttagcgagagaatttgattgtccaattgttaataaatgagaattcaataagaagcttttaaaccgttcacgttcctggcctgaggggcctaatgggaccgggtatttaggctttatacgcaaatcctcccgaatttacacgaaaggaatatttttggcaaaaaaaattcaactttataatttttatttttttaattgtaattttagggtgtcctatatcaaaataatatataaaaacagcatacaaatattaaaaaaaacaacaaaattagaataaaaaaaaaaatagagaaatactaattacaaccttctattacaaactcttagtcaatctccacgtctgaaatcacatgccgaaatatttttcttaaatttttttttatagcagtattcgttatagttacagtatcatccctgtaaatttttgaaaaattccaaataatttacagtaccgaaacagagttcctgatattccagtttaccatgcgtgttcaaaaaaattcaaacatattttcagcactgtaaactattcagaaatttttaaaaatttacatggataatattgtaagtgttgaccaaggttttcggcaactaataaaatattataaagttagagagctgtaagaaaattag

SEQ ID NO: 386813 - DNA, 3499 bp, Cannabis indica
tcgcaagataaaacaaaaatgaagataatcacagtacaaaaacgagaaaacccaaaccttggattcattatgacaatgtctgcaatcaaatatttcatcacaacaaggtgctctaatcttacacctcctcctgtaatgtgagcacctacattttttttttttttttaatttataataatgagtcacaaatttagcacaaaaaaaagaaaaactcaattttcgcataaattctaagatactaagaaaaagaagaaataaatgtagaaaatgtaaaatcaatacatacccaaaattttcagattcaagctccattaaagactggtcttttacatgagaactctcaatggccatttggttcttcaaatcactctctattttctttcttttacaaagccttatttggtattctacaaaatttcaaagacaacctgaaatcccataaagattaacaatcaaatcaaacccataatcctaacctgaacaggagaaatgattttaaaattatcccacaagaaaagggaaggagagacgtagtactctattaatagaaaatttaaccacccaaattctaagaaagttataataaaggctggacctttgttttcttcaggatgaaaaaggaggacaactctttaatagcataactctaaaccaatttttttaattagaaaaaataaaaataaaaggcttccaaaaaagggctttttatatatttttttttaagaaaaatatatatataattttgaatatataaaaaagataatgacgatgacgaggcgaaacgccagcaatacttatggccgaccaagtaataattacaaatggatagaaaaaaggttgatggtatggtttaattaatttataagtgatactgacaaggaacccctagattcgcattctaggatttacaatgatacatagattagatattatccaaacactgttcagatcaaaacgacatcgttaaaggccttcaagaacttggagtagatttttttttttttttgataaccaacttggagtagaaacttaaaatgaaaataaatttttgtaaaaaataataagagggtaacgtggagaaaggaggaaaggaagtaaggaaggagggagttgttctttacgtaccatatggaaaattctgtggttttggaagctgaagcgaagcctgaaggtgggttcgtttcttaaagggaagaaaaggcccaagatactgtgaattaatctgcaactgggttcttttcctgtgaggttcaatagtttcggaaatggtcaatattgtgggctaggactcctccttattatgtattataatacatatacataaaggaagcaactcatattgatcggggtgtcacttttatccaatctgattgggagtctgaaaaatttatgatctccatttcaaaaaaaaataaataaataaattacaattattcacagttttgaattgtccatttgcctatggtctggccacatcgaataagctcttcatgattccgtgttggtttaagaagttggtgaagtgataactgtcaaattgattttcgctatctgagacaatcttatgtggaagtccaaagcagcacacaatgtttttgatgacaaagtccaaggccttcttgaaggtgactgtattcatgggttccgcctctacccatttggtgaagtagttatcgcgtacttcacccctctttttccagtgagaagggatcctactaagtcaatttcccaaatagcaaagggccatgggctcctcatgagtgtgatttctattggtggtgctcgtggaaccttgacgtatctttaacactgttcgcacttctagacatactctgtacaatcctttttcattgtgggccaggagtaaccctgtcgaaggatcgttttggataggcttggtctggaagtatgatctccatgaaaacctcaatgaacctcatgtatatgatggtacttattttggtctcggctacgcaccttaagtatggcacaaataacctcctacagtaaagtttcccatctagtatcacatattggggagcctgatattaaaccttgtgagaagaagttttgtccgtcagaagctctcctgagtttaggaactagtagatgggccatatctaagagttgaaatgatcagcgatggcatttaccccctgtgtttcaatacttgaagcttctaagtgggccacaggcaccactccgtgttggatgactctgagtttgtgacgagttttgctagcatattcgtgaatgaattttggtctaggggacctagcgaatattatagcctttaaccccttgcaacagttcctaggacatcatcacataggcaaccatcctttcacctttggtctgttattccccaaatatttgatttaccaccaatttagagtcgctatggactttgttatgttgggctccgacttccttagccaatcatagtccctttagtatggcatcgtgcttagcttcattattggaagcaagaaattgaaaatagagagtgctttggagctgatgtccttgtagagatattaatatgattcctgctccatctccatttgcattcgatgctccatcatcatagactttctaggtagaggtgacttcaggactagctcatctgggaggtcacttaatccagaacactcaaccacaaagtcagctaaggtttgacctttgattgacacatgtggttgatactagatgtcaaattggctaagttccattgcccattttagtaacccgtcggatgcctctgggttttgaagcacttggcggagaggataattagtcagtaccttgatggcgtgggcttgaaagtagggtctgatatttctagaggcaattagtaagtaaaaggtcaatttttctatcaagggatatttggattctacacccagtaatcttttggtgacatattacaccggtagttggaccattccttcatcttgcactaatgcgacacttatggcttgtttagacactgccaaatataggtacaactcacccaccaccgactttgataagataggagctttggtcaaatgctcctttagtttctagaaggcctcttcacattcctcggtctattcaaacttcttgtttcctcacaacatgttaaagaatgggatgcacttgtctgtggattttaagatgaacctactgagggtcgcgattcttctagtaacactttgcacatctttgtgctttttaggatatggcatgtcaacaaaggccttatcttctctgggttttctttaattccctaggagctgacgataaaacctaggaaattcccggaggagaaaccaaatgtacattacttgggattgagcttcattccgtaccttgggagagccgagaaggcttccttaaggtctgtattgtgctctgtagatgtcttagatttcaacagcatgtcatcgacataaacctccatatttcttccaactagttcttaaacatctgttgaccattctctagtaggttgctc

SEQ ID NO: 386814 - DNA, 2166 bp, Cannabis indica
tcataccgatatgatcatttatcgatatcaaatacaactaaatgtatatcaatactgctatttcaacgtaatctagctggcttcataaacatgcacgttaaacatgtaatcacatatatcattatactaattttacctcgttccgaattcaagtgtgtcgatcaacctgagtggaactgctacttgatgactaacatgcccttaagtcacaatattcgtaagtgacacgctaaatcactttttgaggttttaaaatttaaactaaaaatttccctatcgatggataacatgacaataccttaaatatcgtaaaaaggggaaagtttagggtgccctaaactgccccaacctgtagaccgattcccaatcagaaaaacagttttgaggggtctacctagggatgaaccgaaattccagttcttataggtccatactgaaccgaccgaccaattcagtagaggaatccccaaaaaccacaaaaatacctcaattcaaccccaaaacgtaccaaaacttccaaaccacctaataaggccacaataaacttaatccaagcaataaaaccacacaatttcctctgcaacataatccaccattgaagaggaaagtatgagctctaaagctcaaaccttgctcatccacaacaccatgcaacaaagataacctaacttagcttaaataacttataattaacctcagaagtcaaaactaaacttgaattacacctacagtaccgtaacctcaaatttgcatgaacacttaaacttaaaattacaaaattcaaaggaagagaagataacttgcttaccaagagttgttgcttcctatccctaaggattttctcaccaataaccttttgaattgctgaagaaaagcaagaaattactccaagcttctatggcttctaggtgaccgaccccaagagagaggaagaacttgagtttttattttgttctaagacaattcataaatgatttcctatttcaccatatactaaactaaagaattacaaaattaatttcttttccacgaaagaaaaattgtggtaaattattattttaccccttaacttcaccaagaagcaaacttgccatcaaagggcatttcggtcaaacttgcaatcctaaatacggaaagtgactctatcggccaactgtggcgtgccactgctatcggacataaaatacggaacacaaaattttatatatatcatgaataacacactcagaatttaaatatatctccataaattcataaattataattaaaggtctaattttaaattaaaccttaattgtctactaattctcatactaaaattaagcggtctttacaaatatgtacacatatccccacacaaaaataattattaaaatctaaaataattaataaaatatgtttagagcaatgaatagtgttctatacatgtaagacataaatagtgtattttaaaaaaaactttaaaatgaatgagtttatagcatctaatgcagcgtgtttttagtacggtatcttaaattttttaaagtttctctattttagagaagctattgtgagtgctctaatgtaaagtagtacaattgggttggggtttttggcatggcacgaaactggcatgagcacgtgtgacgcgagtacgacacgacacgtaaaaatatgtgcttggacccaacacgacacgaataaatatgggcccagacatgacacgaaaaatatggacatgagcacgacaagacacgataagtacgaaagtacaacacaaaattacaaattttttagcacaaaaatacgacatgtaagcacgaaataaaacatgaattaaaattcataaagtaattttatttaaaaatttatctatttttttgtataaaaatactttacttaaatattttaagactatacatattttctaaagttaaattatgttaatgtatatgatatatatttttaacatatcctttcttagagaagattctaaattatgttggcacattttatgaatcagcgacaataatatgcacaatttgatatatttaatttttttttctaaagagattatgttgaatattattgacagctttatgtgaaaatttattaatggactatcattatatcattatagtgatattattttggctattaaacatgtaattgtagttatatttt

SEQ ID NO: 386815 - DNA, 871 bp, Cannabis indica
gaaagatcattatccaaaattacaacaaagattatctcaagatggattaaaattattagtatttatggattagggtacgcttccgctatttgaattcttctctttgaatcaacaaagatattttttagatttatgtttatgcgcttataataatatatgtatatctataaaatttagtcatgttcttgcatattttatgagagataaataattagaacaagtggtaccagagccacctttgattgattctttgagatgttaggttcatatttaagaaatttgggaactttctaaaaacttggtgtttacgataactattaataataggaaggtatttttttaatgtgatgtggtgctatttgaaaatattatagctttatctactgtttgggggcaattttgtctcatgtagcttgtgataagaattatgtagctcatggtttggcaaaacatgccctttggttagacgatgagctatcctggttcgatgggttctaccgctgattgtaatttgctgcattgttaatcatgtgtgattttgttcaccacgtcaaaaaaaacataatcataagtaagatattaaaaagaaaaaagtgtaaaaataattagaacgatgtctattaaactatcaatactattattgggaaaaataattcctaaaagagtaatttgcagcataaatacctaagttttacaccgagtagcagataaatacctaagtcctatttttggcggtaaaaataccttctgttagggtcttagaacttccgtaggtatctggacgttaagtgccaggtcacgatccacttgtcactcgttcattggtccatatcattaattttttatttattatttaaataattatttaaat

SEQ ID NO: 386816 - DNA, 1126 bp, Cannabis indica
gaataataaattattaagggtacatgtgctgtttagtactttcttatgtattaatattattattgaatttgatacaattaagtatcaagtcccttataatttaatataataatttttaggaagtatcgctaactaatcacaacacgacatgtcgcaaaagtactagacaccactaatacctaatagcaatgctcttaattattattattattattattatgttaaattcaggtgaatagatactggtaattataattaacaaatgtgtgtattttagaaagggatctttaactctagtttcaagagatttttgtagtgggaattaattgtatcttttttaattgatgggattgagaagattgatttgttctataaacttgaaaaaaaaaatgataaactattcaagcggactttgctgatgtacatataataaaaaattatataagtattttactataagcttatgtattaatgatatttatgcatttgaagaataaaatgaataatttgttcaacaaaaatgaagaataaaatgaataatgaaaaaatgccttcgtaatcatcccctgcataccacttaagtttccaaacactaaaacttccatagttgttgtgatgtaaaacttgctaatatatacaaaataaggcaaacaagaaagatcaaccaaactgtcaacagccaaacaacaactattatgtaaattgctaatcatatgaaacaaaaataataaaacttagaagtctggtaaaggtagtaatgtcttgtaaaataagtcatatattaaaataatttttataaaataacaaattaaatattttatttgatttgatttataaaatataattaattaaaatattttaattgtggtcagatttaattataaaatattttagttatcctttaattttttaaattaattatcaaaatattttgacaattaatgtggtagagactttgatggaaggtcttacttatataaatatagggtctcggtcgacgattactcactgtaaatccatctaaaaagagtagagagagcttggaagtctgattacccacactaatcagtttccttttcttttgcagatccaaggctcgtatggaattgaagctcaaaaaatcaat

SEQ ID NO: 386817 - DNA, 718 bp, Cannabis indica
agaatttggtccaagatgacttcatcagattctaagaagcttacctttgaggagtggcccagcataactataagaaagattgttggattataatttctggaaaggtcagatctcagtttgtttctttaatttcttatggtatatggatgtatatctctatgaatagcgggcttatgaattgatattatttctaagcacaattgatcgattgctttctgattgtctctattcattttcatatagaattcttttttaagtccttttgttggtaacatgtgctataactctttccttttatgtgtagtttttgttgccattgttaacgcttaaagttgaaatcttgtacacaaaaattataaaaaaaaaattgtgtacatgtatagtggatgtgatagagacttggattattagtaaaggtattgttattgagtgattctagcatgagaaaagatatcaaacctacagtgatttttaatattttctgcatggctggtagtgtcaacagttattacagaagaaatgagttgtgatggctcttgtattggctgctctgtttgttgttctgtgtgagaaattatgatagcaatctttcttatcatttttctctgtattgaataattaatatttaaaaattacaataattccaataatatagataaaaagtgttgactaaattattttgtctacagtggtatgcaaaaagctctgtttacaagtt

SEQ ID NO: 386818 - DNA, 747 bp, Cannabis indica
acgaattcggttttctatatttttttttattatttttccaattttttcatttttaaatgtttccaacacttactgcttcttcctcttccaccgccaccattttactaaggcgaacaccaccatatgccggagattaggtaatttttttttttcgaatctctatactcttatatatttttttttcttttcattctttattcttttcaaaaaaatatttattttttttcttgcttgaatggatgttgaagcactaatttgaagtggtttagaaattctacaacgttggagcatcaactataaagtcaatattttatttgtatattcttttgatctgttttaatatggattagtatattatttgattttgtatattcatatatatgtgcttttgaattttttagaatctgtatattttttaagtttatgtatattataatgaatatatctatataaataattttaggtgaatatatattttttatgcttaattttaatttgtttataatgcattttttaattatttttggattttgaaatgagatttttacacctcatgtcaaaattgacaccttttttacatttttatccttacacggttttttaaacatttttaacttttacatttttcaattttacttttcaaaaagtttaataattacaattttaccttttcccttcttccttacacacgtacacgcacgccacctcataaatcctttctttttttttttttgaatttttcatcta

SEQ ID NO: 386819 - DNA, 1663 bp, Cannabis indica
taaacctaacctttatctaatcatgtacattaaaacataaaacataacttaaaattaaccttctaagtcactaaaagacagagttaacccaagataaaaaaaaaaaaaaaactaatttttccccttgcttcaccaagaagcaactttgccacctaggggcatttgggtcaaatctaaaaccacaagtattcctgatatttccaatatctatctaaattgccccgctattacaaattactaaaccatatgaaaatgtgactctatcggccaaacgtcgcgttccactattaccggacataaaatatgaaaaacatgaaatttcatatataacataaatgacacacgtagaattcaaatatatctccataaattcataaatcataattgaaagtataattctaaattaaacaataattattagctaattctcatactaaaattaagcggtctttacaagcatcataagtgtatgcttataaaccttcttatccattgatatactatcttaagaaatttcttaatgaaaaagttataggggaatttttaagagaaacttcgattaaaataagagtccaacgatggcccgtttaggcaagagtaaaatttactcttattttattagttctctattatttcagcactataaacactagtctaagttgtcatctactgggaatcaagtagattttgcacttgcaatcacttgtcacctggtgaaaaagcaacagtgactggaagtaaaaaaaatgtgcctcactaagggaatatcgactaagttggagggttcaggtcaagccacttcttgcagataatggtgtctgccctcaataacctcttgtaagaatcacatattacatcgagaggtttcatctttactagatttaacgagatgatctctaattttctcatcatttatttcaagaatggtttggggtctacgagttttgggtctaaattctatagcagaaatttgaggacaaactaatttcaaggattcagaaattgtgaattctggaataaattgggacatgattataactaataatgtcctaattcctggaaaaacagaacacatataaaactcataaatctacgaatcgtataaccttaaattttctagccctagagttattcaaacactcaaaaccaaaatacccaaatagcaaaacaatgcagataagaaaaatgcttactaaaaaattgaaattgaaagcacagaggaaaaatcagtagaaaagagtgtcattgctttgatgagaaattttgggcagagacgaacttcgcgattgaaattccaaagatcgaagaactaagttttgatgatttttgggaggaggaatgtaatcagaagaaactcgcaggaagaatgtaaaagactgagagggcatgcaaatctgaaaaagagagtggttgagattatgtcgaaagctcaaaggtttgaaggctgaaaatggcataaataatgcacatattcaaatttatacctaaaaggtggccaccgttcgatcaagggaaatctaatctaacagatgggaaccttacaagaaaagaacagtcggaccattaaattagaaatgatgtacctcgaagttttgaatcgccaaattctaagcatgcaaattttaaacgaaaaatatgattatacccttgaagacatttaaaa

SEQ ID NO: 386820 - DNA, 1178 bp, Cannabis indica
ggaggaggcctccaagtcccctcaatcaaagaaatatataattagcatttttgttttgtgaattttcatcgaattttacctataaaattaatttacaattttttttttggtaagagtagtgttaattacaattttttactcaatttttacgtttaaaatatttttttcatagcgatattcgttataattacattatcattcctataaattttagaaaaattttgtgtggtttacagtatcaaaaacatagttcctgatattctcttcaatccaaaattcatctatttttttcaatctctgttgctatgaattcacttaataattaccattgatgatgaggatgacgattagaatgttgcttctgctagggattatgtctttgtagctcaaattattaccactaagcatgtttatcttccattttgcagaagcaaatgaaggacctttggaatgggaggttccattccaagattgctgaaaaaatcacttgatatgtttgtactcacatttagctgtgaacagggccggtcctaaggtatatggggcctaaggcaaaatcaaattttggggcccctatatatagtttaactattataaatatgatagttctagtgcttagtgtaatggtaaaatttttaaaaacgcttaagaggtcaaatgttcaatccctcataactacacattaaatattttttaaaaaaattaaaaagtagaagttgggaattgatcccatgacctcttacttttaagtaagaccttttacaactacactaaacaatttttgttatattttcttcttatttaacattttatctatgtattaatttttttttttttacaatttcggggccctgagcgttcgggggctcgaggcgcacgcctagcccgcctaccctcagggccggccctggctgtgaagggggtaagagcatagtgctccttagggagccttttcattttcaaaactatcatattgttttatacacgccatgtgctcgacagaatgtctcaagtgcagatctcatttacatcatttttttgagcccaatattataggcttccttagtaagtctaggctttggctaaagcacttggagatattgttggaaattattttaccaggatcttagatctactcacaagtatgtttattagcatcctaaatatgaactttctaa

SEQ ID NO: 386821 - DNA, 1597 bp, Cannabis indica
cttttcttttctcttttgggtattatagtagttatatatatataaacaattcaatattttgagattcttctgtttgttttgtccccagggcttatatatatatactgatcagaaatggaagaaaaggggtcctttggaggtgtggagccatattggaaaaataaaagaccattggaactcgaactcgaaggtaatcaaaaaaatgatgatgatgagctaagcaacactttgataatgaatgagggtattattagttcattaccattgtggaaaaaagcacacttgatggactactttggtggtggtagtagtagcaatattggagcccccagcaaggcttttaatactactaccactattaataatagtagtactaatacccttttctcagccctaattaatgaaaatcaagggccaagagctgatgagtttccaagcttttgtaatactaaggaaagtttggacaatagggctaatgatatccagttcagatatggtcataacatagaccctaacatggacccaaggaaaatcaaacggtaaacacaccaagttatattatttcattattctatatgttgttaattttgttaattttctttatttcatttttcctagatctgatttcgtttgaagaaaataacttgacatatatgttttattacctttatatatatttgtattataattcatttatatatatttaggataatttccaatcgagcttctgcacaaagatctagatggaagaagattcaatatatctctgacatggaaaacacagtgagggctttgaaggtgtgacaaatattctacattatttatatatccttgtatatttaatctaactagcaacattggcgtactaattaacacatttaagtacctttcaaaaaaaattaacacatttaaatacatttttgaggtaattttttttaatatttttcttatattaaatgtggtcatttaacaaaaattgttagtttaacagtttattttactaattaaagttagtagtaaaactaacaccgttaaatcaacaattaattatcttttttcataaaaacaaaattaattttaaatatttaaatttaattttaaagcatcgacaaaattaaataattattttgttatttataagttttaatttaaatttgaattagacactaattcaattaaataattatatcttgtaacgaatttattagttatattatttaaagtatctaaatttattttttttattttattgtttaataaaattagttaaatatattttttataaataaatttaaaattagattaaattttatatatttaaaaaatataattgaattgtattatatttaatttattattatcatttaaatgaataattaaatgatatcaagtttgatacaaatttaagcaatagatatatgttactaatacttaatttatatgtatatatatatatagatttgaatggacatttacatacaccttatttatttatatacgttagggttgttcattgaaatcgaaaaattacgatttaaattgagactgcaacaatctaaaccactgtagaccgtaatcggagaaactgtttttggtg

SEQ ID NO: 386822 - DNA, 1560 bp, Cannabis indica
aaaagattgttgggcatgcaatccagatactcgatgattgaaaatatttcctatttcttgttaattgctttcaagaagttaagattgcaattttaggcccatgcaataaaggtacatacgaatcacccccctttggcaagttctccaaaagtcgaaatctttaaggagactactgaagtgggatatggaacttagctagtttgatatacaataccagtctttcaactggaagggcttccctgacaaaaaggtgtctgacttcatcaagcagtgtgagaagtattttggtgaaaacactctcaagaaaattgacttcactataaatggtggtgaactggtggtcggggagacttcaggagttgaaggctacaaccttgagcatccagacttccctcctcctactagtgatgcgcctcttgcagagagtgaggacaggtaggaagttgttgttgacataatagacttcaaggaccttctttgagtccatttttttttatagcatttagctttactgtgttagttggttgttcctaagtggcatttcgatgtggataagccttagtaaaatattattaaaattttgttttaattaaattagaaacgatttctaacttaataaaacttttattccaaaacttatttttttttattttattttattcgttaccgcttgactatttaacacttgcacagtacaccatgtcttaaaaaactcaattattgggagtaatgtcactacttcttaaagttatctttaccatgagagtacttacatagatgtgcaacaaaaaaattttgaatgctcgtgtaacatatggctcttgtataccataacaaaacatatgtaccccccaagtgatcaaggaagttccttcactggtcacttgccataccgaatcttcctaggccttcttaatcatgactcttgagtggtgttacatgtgtgagcactcgccacttatttgaggattcgtgggtggcagtgttgatcacttaagaaacaatcagagttatctcaagaccaaatcacaagctttactcaggactttgagtgtcgtcaggtctgtgagttgtgactgattaatttagatgaagtaccaaaaaaaatttgttcaacaccttttctcatcaaattaaatacaattacattactatgagataagttgaaagaaaaaagtacactttgagatagtaattgtagatttccttcttcatccaaccttagctgaagtgatcctcactatactaatgacctgttagactttttagtataggattcataccttagcgatggacctcttaacttagggacaacttcgtcgcatcctgtcagtttaagaagtgatcaattcatttgcatgaggcaaagcgaatcttactatgaagcgagatattttgaagatagctacctttattagtagtactgtcatagatgcaccatgttcccataccttggtactggtactggatttaacttatagaaatagcgtgccaagtataagttttgggttcaagcgcttcaactatgacatatgatccttcccaattaggcctaagtac

SEQ ID NO: 386823 - DNA, 1105 bp, Cannabis indica
ttattcgtgttagtctttcttatctactatttctattagaattttacttcgaattttaatcccatgtctttatataatttattttgagcaaaaataaaaataaaatctcaaggcaaggtaatatattattatattgtgataataatagcgaaaattcgagctcgaactaggttttgcttccttcttggattcttcttttttcaattagggaaagtctcttttgaaatgcccccataatatcacactagaatatatttttacactcacttagatgatgttttttgtagactgagcattctgcatatatgtaacggtctttgggaccactgatgaccaaccaaatcataattccctcgaaacctcttattctgactcgagccaccagatgccacgggagtcttccttttttgatcataaaataagtcactaccacccttaccgaaacttaaagtatggggagtagtaactccactgtcactctagactcttgtgtaaactctactgcaccctcgactcggagagtcttttccaccatttgagcataagtggtggcatcatccgttatgatcattaggtcttgcctaatcttggcattgagccctacaaagtacttttttttttacttaagtttgttggcactatgcccgaggctagcttatcaagcctatcaaactttatcgtatactcagtcaccgacatagacatttccttaactaactgagtaaactgcttcctcttggcactgcgtactacctcattatagtacttggcattgaaaaaaatcctaaaactcattccaagacatagtttccacattacggttgagagataccatctctcatcatactaaggcatcctcttggaactgaaatgtagcgcaagttactcggtcattaccggtaactcccatgaagttcataattctattaatagtagttagccactgctcgactttcatcacatctagacctcccagaaaaattaaagatccctacttctggaacctttcatacagtggttccattcggttacgagtggcaggtttcccaactagctgttaggttttatgccctaaataaaactctttacaatctgattagttatc

SEQ ID NO: 386824 - DNA, 1754 bp, Cannabis indica
aaaaaatatataatgttcaaaagagaacagagaaaaaaaaatctatagacagaattacaacagtaaatattggattattttacctatggcaccatggaacatgaaattataagaaatcccaacataagatagattttgtagaacaacaaatacttctattaaagttaaaaggtacgtgaaaaaacacaatcagaacactttaaaaaatgacaccctttaacacacataaaacagagaaatgatcagaaaccaataatcccattcccaactaagcaagaacttaatttattattaataactgctaactagctaacttgagttgaatgggaagaaaaatttaaaagtactatgcataattaaaatgagagagatacaaagacttgatatcatatggaaaagctgcaattagaaagtgtaacataaaaagtaagcaaaaagatttactcaactgggaaaaaaatgatgaacaaacagagcagaaacagctgcacacttcaactttattaacaaggattattttattattacattacttttctcatttctgaattgtaactataaaacggttctttcaataagagaaaagttcttacactttcaaatattttttcttgttctttccataaaattaaaataaaaagaaaaaaatattggtggcagtttaatattgatccacgtggcataactttgatccgttccaatcgaatttctgttagcataacgttatattaaatccactttcgtagtaaaagtgccgtactattagccctcccccaccggttcgcatcactagcgtgtttacccaaatgacctcataatcagctttcacttgcctaaacccagtctcaacttgagaataaacaagggtattttcgtcatttcctagtgacatgtttccatccatccggataaagtggagaggtttcgattcctttttgacttttttctttttaagaaaattcactttattttatataataaaaatcatttccagtgttctcttctagttacctatttaaccctttccattataagcccatgcacagctattttcaacatcaagtcccgtcgtggtcgtcagggttatttcagtaatttaatattcaaaagcgttatttgtatgttccttgaataggaagaagaatgtgatatttattatttcctatttttattaggtgaaaaaaagaatccgaacttttaatattgaattaagtctatttatttcctctttaagactgtatattaatctataaatatctatcaaaataaagaaaaacatttataaggaatatgttattactgacatatatatagttaaaatacttaacatcgtaaataaaggacgagaaagaaaaggaagatattatgttaatctttatcactttaagagtgcttaaacttttcaaaatcatccgattctcgtaatgttatcctgaagctttgaaccaacttacctgcctatacactccgaacagtaaatgaaagatgggtcgtcttcattcttgttggaatttgatgactgcccattttcgatcaaggaaacacccgcaaagggttccaatatccaagtttcaaacttttgtcgacaattagaagaatggagacgagaagccatgatagcaagttgaatgtctcgatcctcattgtactggttgactgaaatggggttggagtttgttatattattttataatataataataaagtagattaaaatgtgataaatatatgtgaataatatatattaagtgtat

SEQ ID NO: 386825 - DNA, 1673 bp, Cannabis indica
aaaacacctcaaataaaacaatactaactatacctctcaatttaactaacacttattctattaccgtcgtgtcatacttcgcccaacagttgagtttctacggttgccgaatccaaaaatattttattttaaaaatagtatatactatacccatatatatcaataaaatctccgtatttaataaattatgcttgtttaattattttctcaaaagtccctaattattccataattaactttagtaagattataatcttactctaatatttacaaaactacatatttaataaaatatgtctaataaaatataattatattttcaagatattacatagttagtagacacaattaaagttaactggatactccatcctgatgggtacaagaacaaacatctttaatgttacagagttagtgattccataccggagaccaccacctattaagaaagatgtgaagaagagggacataaccaagttttgcagattccataatgactattgacatgatattgaaaagtgaaataacttgaaggaggaaattgagctcttcattcaaaagaacaagatatggccacaaagttaagtaagagactcttgaggatgtgcttccaatagaggaaatgccaagcaagcatactcattttgaatgcaagccatttaagtttggggaggaagattctagtcaccttttgcacccccaaaatgacccattaattgtggaggtgcaaatagcaaacatgatggtagcctgaacaatgattgatagtggagcatcagtgagtatcttgttcagttgctttctagaaggcacgtgactaacaatcaaggacctagaaccatgtgagaacctactgtatggattctctagggaaggagtggccccatgtgaaagtataaagctgcctctaaatgcccaagggtcgaaacatgttgactcagcttgttgtaattgacatacatgctccctataattgcatgatagggaggccaacattgtatgaactctgtgtaatcacatccatattccacctgcaactgaagttcctaaatcctatcaggataggatgtttgaaaggaaataaaaggatggcacgagagggctataacatgtcaattactaccacaaagaaaacagtgggcaaggtcctagtggaggtgataaagatgatcgatgaggggaccctagtcatgaactcctctcaaaaatagggatctacccaagacaaggatagttgttggaaaattattttagtaggatcttatttactattcatgtatgtagaattaaggctaatataatatcctaacattgataccctaaaataataaaataaacacataagggatttaagaaaactttacattgattgcagcagaataaattgtctctttgcgttcagttctttaacccttgttccttttgtcccagagtattaccaagaactgcacttggatcttctctccttcgattgtgttcatcacagtcttccacaaaggcccgagtatcaacttgaatagtgtgggctgatactcaaaacaccttagaacaatattgagaaagagtttagcatagtgaattttgaattaaaagaaagaagagaagataattgctgacaatgaattttgtcaaactagagctatgaaacttaggttaattctctcttctcatca

SEQ ID NO: 386826 - DNA, 1649 bp, Cannabis indica
ggcacttatcaacttctcccaaaaataaatagatatcttttgatccatattggctagctagcttatatttgtcatagtatttactgagtaaagttatcgatagtctacttgctataatattttaatacgtgcccgtgtagaaaaatacggacaagtataagaagtgatgagtgattaaatttttcattgcaaaatgcttgggagaaggaaaagaaaaaattaattcacacaaaagaataaaagacagaagacaaatgtattatactatttgttgacgttgactttgaggatgggctattttgaaacgcgaggttgttgtagataaactttaaattacgcgtctaatcatgtgaatatctgctaagttatgattacaaattttcccaccttttaaaagaaaaatgattttgtggttttacacgtgtactcataactcaaattactatttttttttttatcttaacaaaaaaatttaaggaaaaagattttataacatcaggcactaataaaaagcctccttctttttcgaaatacaaaaacacacatttaaaatcctttcgacaattaaataaaaaaaccacatttgaaattacgcgtctaattatgtaaatatctgttaagtcatgattacaaattttcccaccttttaaaagaaaataattttgtggttttacatatgtcctcataactcaaatcactattttagttttatttttagttaaactcttttaaatattattctatttacatttaattctttaaatttaaattttaatgttcaaaaccttccaaattattttattgtttgcaaatttaaaatatcattcactttcttcagttaactatcaacataaactacttatatgtgcactcttatatacataacacatttatattagtacatctaatattatatataaaattttataatattttttattttttaaacattttttttataattttatttaattttaaatgaattttgaaaataatttttaataataatattcggtatactaatataaacgtattacatgtacaagagtatgcacataagaagtttatagtggcagttaatcgaatcacaccataaatttgctactagttgagtagtttggaaaggtttaacgccaaaaattgaaactgaaaaaataaaaaaaaagaaaaagaaaagtgaatttttttttttttttgaaaattaggaaacaacacgtgattcacgtgtgtttatattttgtttaataatatataataaatttcaaaatttgatattttattttaataatatgagtaactattttactatttttttattcagaaatgtaaaaaaaaaattatcatacaattttttatttaataaataaaggaaatactgatatatcttcaaacattatagtgaaaaagaaaatttgaagaacctttacacaatcttgggtcctaaaaaaaaaataattaataaatctatagaaaaatgaccatatatatgatctcaaaattattgtattattatcttgtagtcgagactacattaattcaaaactgtttttatcatcgtatcctgtcattatatttaaagtcattattgtcatcatcgtatctcactctactatttataaagggaaatttgaatttccatacttacaata

SEQ ID NO: 386827 - DNA, 582 bp, Cannabis indica
ttttagctttacactctatgtatgaggaatgtaacttggtttctgttaaagatagttcatagctcatattacaacgtcaatgtcatcaaacttgtagattttgtttgaactttggatttttaagagtgaaaaaaataaaattctaaggattacattttctcatgtttgtttagattgaatcaaaaaattgataattcaaagttaaaattagtatagtatgatttataaaatctaaaacaattacaaatatatttaagatttttcatatacatttcagaataaaaaaattacaattatttacattgaaccaagtcttttatcctattaatttcttactactttccctcataaaaatctactagactaatgattcttttaaaaataaaataatattgaaaccatttttctcattttatatagtaattgaaaaataaatcactattcataaatgcgttatttctatagctaatatataaggaaaatttgattttttatacttacatatacttaatatttttcccctaaacacataacacttaatatttgtgggatatgacatattttaaaatatccctaaaatac

SEQ ID NO: 386828 - DNA, 824 bp, Cannabis indica
tttattgagtctcatcaattaaataatatttatttattaattcaatgattaatcaactataaatttgaaattaaactcagtaattataaaactatatttgctgaattttaccaaagtgttcattgatataatcaactccagtaattaatcctccttgtgtcagttcataactaattttggtcaaattactattttaccctttgagttactttattctttaatctttagtaccattaatttattactagaagtacaatttagatctcatctaaatttgtgtgcaacgttttagttctagaattaacacataaagaaatcaacattcaatctgttaggaaagtcaatccatattataaattatgttctcagccatccaaattattaaatttctaaaacaaaaattgtaaaaatcattttctctgaaaaactaataacatgaatagaagtttgctaagaattaagtcttcaagtaaacggcaagtttgataaaaatagctttattcgtatcagtcattgttatatataatttttattatatacaacactttcatttagatatcatactatatcagtaatcataatcaaaattacttgcatcaaagaacgagcatcaatatgttatattattttataatataataaagtatagattaaaatgtgataaatatatgtgaataatatatattaagtgtatggtaaataaatatgtaacttatgaatttaacctacacttttataacctacatcatgttgtaacttggagaagagttacaatttgttgtcacttgtaactcatgtgttgatcacacattattagtgtaata

SEQ ID NO: 386829 - DNA, 819 bp, Cannabis indica
aaaaaaaaataggagtaattttaattacaaattttgaaagaaaacccatgaaaattataaaaatcacactctatatataatttcattataaatcaaaaatttgagaggtgccaaagtcctaattaaccatgtcttgtcatcttactattagttaactattattttttatatcacttatgattaattaaagagatttttaattattatacttcaaaatatatattttatttttacatttttacaaaaattcacagtacaatcaacagaaaatttaaattgctattaaaatttgcgtagcaacccacatagtaggggtggcaattcgtgattgtagatcgtacatgtttgtatcatatgttgagacctatatatatcaggtttatgctcgactcaagcacgatctatttaataattgtatcaaaaaaatgaaacccaaacacgacccatgacttaacacgatccgtataatccgtttataaacatattttgtttaaacatatatgtcaactaataacacgtttatgaagtattcaacacgtacatttataattcatttatggtatatggtaattaaagtatactaaaataactttaaataggttattaacaaagttaatttcgtgttagctgtgtcaatctgaacatgacccgtttattaaacgggttagacgagtcaatccgaacacgacttgaacccatttaatacaaattcaaactcgctaattctcgtgcaggtttcgagtcgtgttatcgtgtctgacacatttaaccggcccacacaaaaatcaccgaaataactcaaactataaattaaaaaaa

SEQ ID NO: 386830 - DNA, 892 bp, Cannabis indica
tttggtggtggtgaatgcttttattgatggtggtcagtggtgggtccgtgattgtggatggtggtggtagtggtgatggtacggacaatgaagaagaaaactaaaaactaaaaaaatgagttgttagagattgagaaaagaaaaaaaaacaaagaacatgtgattttttttatattttattttatttttgtatatttatttatgtgatcaattaaattgtgtcatgtgtttactgtattgtctatcaatatgatagttaatagccaaatatgaattgatatgacaaactgctaaaaaaacataaattttggaagatttgccatcaaaattttaaattttaaaaattaattgctagcgagatgatactattagaaatttcaccgtaattattgctctaacttttacctatacatttttagttctgattatattgactttacattctatgtttgggtatggtcttattagtttcttagatatagaataaaattatgtcaaggtataaagagcattattgatgatgttgtcactgctataaaggctatttttttttcttcttttttaatattagaggaagggccattcaaacataataagagcatcaccaacgaggcttcacatttggtgatgcagtggaattggccctccaacgtagctgcaaacatgacactaaattttcgtgtgtgccacagcgtacagtatatatgctgtgcactgtacacaagacatacttttttatatatataattaatttttatatatgtttatattattagttgtatttattaaattacaatgtgtctttttaaaagtcgtacattgatgtacttctacttattttaaaatttgaaacttttttttatagtagcgtacattatacttatttaagaca

SEQ ID NO: 386831 - DNA, 753 bp, Cannabis indica
ctcttttcttttcttttcttttcttttcttttagtacaggtagtaaaaaaagaattagaaccagttgataggagtcttaattagaacattttcagtggaagatgcaaaaactattttatatttagtaaaaacagaaatcaccttctataccactttttaacttttttttatttttttattttttatttttttttttacgatatagattgcttcggtaattgctgcgtaggttgcaatatggatttagattgctatttaggttgcttcgttggttgcatgtccaatataggttcaatgcttttctattgttaaaatgaataaatgttgaagacataagtccgataatgcccctatattacttattggtattgtaaataagaaaatgggtagcatcaggctaccattagtctgattaagtgaaattttatacatataatgtcacattttacaaattaaaatgcaaaatgcaagtgattttttaatatttaaattataataattgattgcttatttttcaggtgttttaaaattgaaatgtatttaaaaaatattaattatttgacgaaaaatatcttaactcctatttgaattaagtacttcgaacgcaccacatgattagcaaatatttaaaatatttattttatatttaatttaaaaaatttaatataatttttatttctaatatatatataataatattataaaattaataaaaaatattctaagtataatctgttaaaattaatataaaat

SEQ ID NO: 386832 - DNA, 1726 bp, Cannabis indica
atggcaaaaaaagttcagggggcatgatttggtacatgtcaaagttcgaggagaaaaaaatcataattagccttttatttatattaattagatttactgtctttgtttgacttgtctacattttttttgtattttttttattttaatgacttattttatatgtattttaatgggattacgtgcctttatttaagttgcgcaaatattatattgactttttcttttaatgacatttttatttattgttgacttctctcactctggaggaattgtgtagaatttctcatataagtttttttttattattattaaagtataatttgtgtatttttctttgtaatattagtttattttattattaattttgtaataataaaatgtacttgttatattttgacaagggtggattttttggactgagaattagttggtctccaagtaatcaaagataagtttatttttaaataaaattagttttatctttatcattttcaattttgtgtgttttctcatttttacattagtttttttgtggtttgtaggtttttttttttttttgttttaatttattattttaatacaactatcaataaaggaatggtgatttttaatgagttgggggtactgtttgaggatgttatagctttattgtctaaatttttggggtacagttttgtcccatgttgctcgcgataagaattttacagcccatagtttgacaaaacatgcccttcggttaaacgatgagctattctagttcgaggaggtaccgctgcggattgtggattgctgcatcattattcatttgtgattttgatcaccacgttaaaaaaaaattgtcaaactaatcaatcacatagcacattcttacgtgtcaatatcgttattgatccaactaaatatcgtgtttcatatagattaatagaataacttttagggagtatagctagccaatcgcaagacgatacatcttgatgatgctagacaccactagtacccaatagcaatgctcttgattagcatacctttggaggaaaaaatctttatatatagattaaagagtaatgatagagacacctttattttacaccatacttttacgaaaagatctaaaaggcactactggtgcttagcattctcctcggtatcatatcactattggtgtaattaaatatcatgtcttatatcacttaagaaaataacttataaagaatatcgctagccaattgcaaccacctatagaagatgcttagcaccactaatacttaataacaatactctatttttacacatatacacgtagcatgtcatgtcatcatattttaaaaatttctattaatactaattttactttttatttatttgtatttatataaaaatatctcacttttctaactgtttcatatttttcttttctttcctttttttcttaaccgtattaatgggaaaagaaattgagtaccataacttataaataatttatataattaacataatttattaatatatatagggataggatttggtcccgttatgccaaaataggaaatacaatccctgattgtactgtagccgttggattgaattggggcatgatctaagggctgggattaaagtaggggtagttaggggggaaaaatggtaaccggttggttttttgtattttaaattaattaatttttaaaaaactgacaccgattgacgtttgatgtacgtgacagttacc

SEQ ID NO: 386833 - DNA, 2126 bp, Cannabis indica
ttaatttaattttatatttgttgaattgtttttaatgaataaaataaaaatctaaattttaaaatttaacatatttatttatttagaatatatatcatagatatttttataaattatatatcctagatattttttaaatatttatcatctagttaaatcgaataaatttttctctcttttatattaatttacaaaattaagcacatcaaataaactaacaaataaaaatctaataaattttttgaattaaatattattttaactaacaaaaataaataaataaataaataaataaaaagctactgatgtggtttatcataaatgtaatgaccacaacatttattttatgtgactaacaaagttagattataattaaaacaataattatactttagcttacataaattaaattgaaagatgaagaattattatcattgtatctcatttatagtcgtcactacatttaaaattgttattgtcattgtatcttactaataattaccattaaatttaattaaaattgatgtcaacaaacattctcaaaattaaaagaagaaaaccatagttaaacaataagcatcaattttgaatatattagaaagaagcaaaaactgaaataaaattagtaaaattagagtaaaaaggttttacagagaaaaaccaaagcatgattgtatctattgaatcacttctatcatggttgcacgtattgtatctcttttatcattgggagaagccatacgagagtctcttgaagctagactgtgatgtcggaaatctcgggattgagactagagctaagaaggcgcatggtggggcggttctctgtgattatcacagtatgtatttgttgttggattttatgccctaaataaaatcacaattcaatgtaatcttatttaactatcaataaaagatatcgtagatcattttttactattgcctattgcttcattcacatatttatttcatgattatatgtttaatatataaattcatttactagtacactagtgttacactgatatcttaattagtgataggatttacttacccttggctaagtggaatatcttttattccaaagaattgaaaaagtaaactaggatcaaatttataagttttacatcagactggactgatattgatagtagaaaagatatcttaaaattactgttatatattttccagttcaatatcacttagttgatcatagattaattgatctcaatcttgagatgattaagctttaagttgtattattacagttctttgatttattcattactagcttactcatcggtctagctcatacttacatattaagaacttggtagttcaatgaatgggagcgttaatcatatagcttctatacctatttagaagtaaaacgatagttttctttgagcttgtcttaacgagattaaatggtggagcactcattttagtaattatgttagtttgctaaaatatcatttacaagtagctaagtgtttaaaggataaatacattgaagagtaaaatggtaattttgaccctactcgaggtagactatctatggaggatcaatgacatgatttgattaaaataatggatgattcatagtgtatctatattggaggatatagagtgttcaatgtaatcaaaagtgcaatttcaaatttatagtagagtcatgagaaattaataaattagaaaatttatggggaccgataaatttcaaatcaacttattgaaatattgattatataggttcatggtgccacaatgcttgagataatatcatcttaaaaaactcaaataattgatttagttaatcaattaaaaatcataaattaactatgtcttattttataaatttacacttaagttatatttgattgaaaatataaaagctattagtttttatttattaattaaaacactttgtgggtctaagtaataaatatatttaaactatattttatttgataattattagtgtttaaataaatttaattaagcaaataaataaactagtaaaaggtgaatttatttttaatcatggcattatataaaataaagggaaatttacacccattactgttttttcccaatttttttcgtttatactgttacacgctcaa

SEQ ID NO: 386834 - DNA, 1152 bp, Cannabis indica
attattattttaatgttgtgactaaaagatccgtgattaaaggtattagtcacaaaaattataatttgttttgactaaatgtattttaatcacaatacttgttgtgactaaaactaaattagttacaacttgtaattaaatactatgttttaatcacaagtaagtttttgttgtgactaaaagtcacattatttagtcacaaaaaatttatgttgtgactaaaagtaaccgtttttttgtagtgaaaagcaatgctccatttgattttttatctattagtatgtttgaagcttcttgctaataaagtttctatttcaattaaaaaaactataatattaaagtatggacaatttctatttctttaattgtttaaaattaatgataaagtttttatatacatattttcaagatcaaattttaaaattgtgtatggagtacaaaatactagaaattaatacaaatatatcacaaaaatttttttttgtgatataatgtagactttatttgtaaatagattagtgctataatatagaaattaatacaaaattatataaatgtagactttatttgtaacatgcaataaaaaaaaggttaaaaaagaaaaagaaagaaaattaatgagattgggtcattcactcctaacctaaccaacgtacacattataatttatcataaataatattgttgggcgcaattactttctaactgttaaagtaaataacaatgacactacatctaccaaatttattatatcattcaatgccatgcaactgcatttgttgagacatacaataaaagcttggcatgttcataaaaagaatattgttattaaatgtcactaatgtctttcgataaattattttcttaaattatatgaaaccagatatttaattataccataacaatataatatttaaaaaagtaataagtatcaatagtaccttaacatttctctcataaaaattatagataatttaatttgttctagctggatggttattattcgtaagaaaattgttaaaagatagagcaatttgcggccaaaccgccttatgttttgatttttatacacttaacccccttatctttatttttggtggcaaaacccccttatgttttaatttttatacacttaacccccttatctttttt

SEQ ID NO: 386835 - DNA, 925 bp, Cannabis indica
agagagagagagagaatacagattttttagctagataaatatgtattttcctctattttttcctgcattacttttataattttacttaaattaaaataaaacaactaattaattttattacaataacaaccaactttaaaacacattaatttatacaataacaaaatagatatatataataaataaaaagtatatatataaataaataaatgtataccgagctcggggagagagagggagtcgaacgagaagtggtggtggttcgacgtatgagacggagctgagagagacatcgacaggaggtggtggtggtccgacatatgcgacgaagaggagagggagaccaatggaaggaggggtggtggagatcgatggacgagagagacaaaaagaaagggagatcgagagagggaggaagacgacgagagaggaggacgatggtgcggaggcatgggtggggttttggagagttaagatcttcgttttagggtgtgggaaataacgaagaaataggtgcgcatgtgggaaataaaaaagaagtaggtggacacgtgagaaatgtgtcgagaaataggtaacgattttttattggggccttatacccaacagttgaaaactgtcgcctaactataggcgacaattatattcctataaaaactgtaataaaccttcgagaatattaatttttcttaacggttttaaacagttatttaatttttttagcgacgatcttctaaaaaaatatatttttatgaccgcggcggattctaacttttatggtatttaaaatttctttaatagtcgcttactaaatatttatttagtaatagtgaatccgaacctccttagtcgtattgacttgagaagattttgaatagattatttatttggcaactcttttaactaaagctatggaaagctccgc

SEQ ID NO: 386836 - DNA, 812 bp, Cannabis indica
taatttaaaataaaaaataacaataaatatagtagtactaaatacaaattttattgatagaaatagaaaaagtaactttttaaaaatcaaaagtatttgaacccttaacctctattatatgaataaactagcttaaccattataccaaaagaataatgaccgcatacttataatataaataattagtagagtaattagtattaattatttacattttatgattatatgtgattatatatattgtggggccctattttcaagaaataagtattagggttataattttttaattctagagattttattaaactcttggtgtattatatatatgctatatgtgaaatttattgtttttatgatttttgctcggtaacgataaaaatgtgacaaatggccgttagagtcaaatgggattgtttagaatattttatctagcgagacaatcataagtgatatttgacatatcgggtttaaatggagttgtagtgtttgaccattttcccttttaagtcttgatataactcaaatgagaagtaagggacaattttagaaatgacccaagtggttaactttgtctttagtagaatcctaggcttttttaagtgttttaagtcgaataatgtcttactagaattaatcaattattgattattgtttcattttcgcaaaattaatttaaaaaaaaaaaaaaaaaaaaaaacaaaaaaaaaaaccaaattaaacaactcttctacttagtctctttctcctttggaccaaagaaccagcagaaaataaagttttactttattaatttcttgtgtatttctagt

SEQ ID NO: 386837 - DNA, 514 bp, Cannabis indica
aaaaaaaaaaaaacaatttttttgcttagccatctaaatttctcttttctcaattttccataacagaagtaattattatttatttatttatttatttttgaataaaagcattattccctctcaaaacaaaaaagcgttattgattttagctaaagaaacggatcaatctatctaatatcatatacaccaaatctatttttctgttctttttttttctttttgttttccaaattaaagacttgttacattaattatttattcatatttcatatcaacaaaataaagaaataaattacaactgggcacaaaaaaaatttgctccttaatccaacgaaaaaactccattgcaatatctgcataattcaaaagaaaatacagtaagcttctaattttgtcagaaaatctaaaataaatagaaccttaacaatacaaaatttagaaaaattctacaatgtacttccttaaaaagaatgcatcgatacactctatctgttttggtatctgaaataatttt

SEQ ID NO: 386838 - DNA, 1643 bp, Cannabis indica
tgggaggttcaagatcaattgctcatgtcttggcttctttcttcaatgtcagaaagtcttctcactcgaatggtcgggtgtgaaacttcaaagcaaatctggtcaaaacttgagcaatattaaacattacaagtctctgcaaaggtgctggagtttcgaacaaaattgcagaacttgaagaaaggctccttatctttgtccgactacttactcaaggttaaacaccttgtcgatcttcttgcttcagtaggcgaagtctacactgctcgtgatcatgttgctgctatttttaaaggtcttccaagtgaatatgacacctttgtcatctccacaaatacaagacttgaaaactacagtgtagctgagattgaggccttacttctcgcctctgaattaaggatcgaaaaatctgacaaagaaattgatgttagtgctcagattgcttctgttgaacttgactcaccaaaagccaactatgcagctaatttcaatcgaaatattgcctttcaaaagcagcaggcattttcaagatttcccatgccaaattactctaatcatgggcactctcgaggaggttattcaagaggaggccattacagtactcaatatcctcctcctgggttttatgatcgtggcataccacctcagtttggccgaggcagtagcagacctattcccacagccaacaaacctcagtgtcaattgtgccttaagtttggacacacggcacctgagtgtttttacaggtttgacaaaagttttactggtgtgtcacctcacttaccaagcagctctacttctaatcagtccactcctccacaagctcacttagctgttgctcaaaccagtcaagactccaactggtaccctgattctggagccacaaaccactgcacaccagatgcttacaatctgtccactggagcagtttacaatggtaatgaaaaactctttatcggcaatggtacaggtttgtctattcaacatgttggtcattctattttctctacacctagttccaataagtcttttctcctaaataatcttcttcatgtccctgaaatcactaagaatcttctaagtgtttctaaatttgccaaagataattgtgttttctttgaatttcatgatgattattgtcttgtcaaggacaaggagactcactccactttgctaaaggggacttaccagaatggcctgtattcatttgatgcttcccaacttcagttcagtttgcccccaccatcatctcagtccaaagctcctgatctcaccactgctaatacctttcttgccaccacaaaagctgaagctaatacctgttcgaattgtattgagaataatttttctgattttgccatttggcacaacagactcggacacccctcctctcgagttgtccagtctgttcttcatcattgtaatctgcatatatcaaataaaagtacaaattcagtttgctcagcttgttgtctaggcaaaattcacaaatttccctttcccaaagcatcccaaactgaatatactgcccctctacaacttgttgtttctgatttatggggtccctcttatacacaatcatcaaatggatacaaatactacatccattttgttgatgtgtattctcggttcacatggcttta

SEQ ID NO: 386839 - DNA, 1018 bp, Cannabis indica
gtacttatgccactaattaccctaaattaatcaatgacaaaaaaatattaatttatggtaaaagtaaacaaaatgtcaacatgctattgatatcatatcgacaatgtatcaataaaaaatgataacacaataaactataaaacaatgactgacaacctatgtaaattacaactaaccaactaatcacaactaatgacaaataataatcataaaaaaaaaagttaaaaaaatagtacttgagtctctgccttgggcaaaggagcatttttgacatattccaatgcttttttctgcttgtcttctgaaaacaactgcgtcttgggtgtcctcctcagcctgtgtggcatccacaccaacctcaaccaggatctccacaccattataagagatggtccttacatattcttcctcttctatgcgtggaagtagcttcttcatcactttaagttgctgtttaagattcaaaaaatataagagaaaaatgatttagcatttattataaatattcatcttgaataattactctaaacataaaagaaattcatactcgtttagaaaataatacactgagctccttattctttatctcacccttgctcatccaactaagcatcctcaaaaatcgaatcacatgatttgtgctatacctctttccaacctctaaaatggcctcatatgcccaatattatactacaggtgcgaaaccataagctgtgtatttgcactaatgctgaacttccaaactcagcttcttctcgtagttggccttctgtttcaacatgtccttttgaagcgagtgcataagtctggcgaatgagtgcttcccctaaggaatctagaagaagaacttgagatcttcgacatgtctaagtatgttagccataatcaaagcgttagcctcgtgacctagtagcactatctccacaaacaagcacaagctaagcttgtataagtctttcgggttttgacagtttgagaacttacttggagtgcttctgtcttcacactatcagaccgg

SEQ ID NO: 386840 - DNA, 839 bp, Cannabis indica
atgtctacttgcactctactctaggtttgcaatttgaaaatcattacgagagaagtgtaatttcattcaatcaaaagtgttcgatacaaatgtagagccattcatgtatactagaaataatagaaataattgattcaatcaaaaatgtctgatacaaatgtagaatcattcatgtataatagaaataattgattcaataaaaagtgtctgatacaaatgtagaatcattcatgtatactagaaatactaaaaataattgattcaatcaaaagtgtatgatacaaatgtagaatcattcatgtatactagaaataataaaaagaattgatttaactttgcactctaccctagggtttgtaatttgaaaaatgtgaatcataacgagagaactgtaatctcattcatgtatactaaaaatgaaataataaaaataattaatttaactttgcactctaccgtagggtttgcaatttgaaaaatgtgagagagagtcaaaactatcaatctcattcaatcaaaagtgtctgatccttgtgaccaaatgtagaatcattcatatatactagaaatgaaataatagaaacaattatttaacatttgcactctattctaggtttcgtaatttaaaaaatacaaaagttgaatcacgagagaatcaaaagtgacaattttcatttaatcaatagtttgatccttcttatccaaatgtagaatcatccatatatattagaaactaggaaacaaaccgcgttccgggtgcggttatattttgtttattgataattaagttataaaaatatattaaaattgataattttttaatagtatgagtaactatt

SEQ ID NO: 386841 - DNA, 1239 bp, Cannabis indica
ggaaaagtagtatttttaacatccatggatcaaatacaagtgagaaacaccacccatggcttcccacaagccatggccgaccactgccactgtccggctccaactagtggcaatggcctcccattaggatttcggacattgaaatgaggtttttggatcgcgagacccaaaaaatatgactcaccattaaaaaaaaaaaaacaagtcaaaaaacaccataaggggtcccagaacatgcatggcgagcactgccatttggtcatgtaagtgctcacaactggtacgataacataaactaccttcagtaaaatgggcataactctctcaatttttatccaaatgacctggttcaacttgcatttgaaagataatttaaagacaaatctatgtatgcttacaaccatggctcaattctgaagttatcgggtctgaaataggctcacaatgcagattggtacattttactcaggaattgagtaatgtggttaagtgaggggtgttggaggacactactacaacccatgtggcaatgtatgtgaatactaacactccaaaacacatgtttcagtacttatcaccaatattaggggtgtgcagaaagtcatccgatccaatcccaaccgaccgatccaatcccaaccgatccaatagaatcggatatccaatcataattggatcggatcggatgcaaattttaaaaatccaattggatcggatcggatgttggatgagacatccgatccaatggataaccgaaccgatccaatccaatatcatccaatgtccatccaatcatatttaatatttataattttatatatttaattattttgtttaaaaaaatatattaattattaataggttttactgtgcacctgcacacattgatttaatattttatataatatttgcatttgatgtattggacttgtttattaagacttttgcttattaagttagatttgtgttatatttttattatgggatcatgaaaattaggttggatttggattaaactattgtttattattggattattaggttttaaattatattttttcttttttttttatttagaataaatagtggctaaaatggattggattcatccattggatccattggatggatccaatccaatccaataaaaaaccagttaaagcatccaatggatggaaccgatccaatccaatacatccattggatcggatcggatcggatgactcaattcaattggat

SEQ ID NO: 386842 - DNA, 1047 bp, Cannabis indica
ttcaccacaggtaagcaatagtcacgaacaacccataattgtgcatcagctgcagcaggtgctggttagttgttattaaggccatttttgttattaatgttaatggatgccattgtgaaatgtagctttttctttttttttttcaactgcattaatgttctttcttaggattcagcggtgtgagtggtgtaacacttcgacttctttgcataaattgaatcacaaaacaacaaacaaaatagaatctaatttaaagcaaaaaaaaattagtaattttataagtaatgatttaagagctttcaatccccaacaacggcgccaaaaacttgatacataatttatactgtaagcctacagtgttgttgtagtaaagttttaattctaaaacagttgtcgaaatcacaaagattgattattaaatttcactaattactatacttttttttattttatgctttaattagacaagtaaataataattaagaacaaaataataaaataacagaaaagtaaatagacaaacaacaattttaatcaaaaataaagacctagagcattgacttttttatttcaaactatgaatctcagtttaccaattatctaaattaattctataatttgtagtttcaagaatcataatgtagcatattaacatctctcgagtgatgatagaataaacttgattaactagcaagatatatatatattcaatattaataaatcaaagcaataataaagcaatatgattctctttaaatgaaactcaaagaactagtggaatctctaaatctaacacttgttctatgtcatgcaattctaagtctgattttagattacctctctcaagtgtaaaacctaaaatctctatactaattaatggtgatcaagaattaacaagatgatattaacacaaaatttcataaacaaatatggtaataatctaaaaacttttaattcattatctaaaatagttccatcagcactctaaaaatagtgtttagttcataatcacaaacataataaccacaataatcatgttcataatta

SEQ ID NO: 386843 - DNA, 838 bp, Cannabis indica
gggcatgcaaatgcaatttaaagcagtaacttctaaaagtacgacccatggacagaaagacaacagacctaatattgatagtggagatgttaagctgatcgtcgctagatctagttggggaagtcgatcgcaccaatgacaatgccgagatgcaagagcaatcagtgaatcaatttcttcttcaaaatccaagctcgcaattttttctactgtaatagtctatcaccgaataaggaaagtgtggggattctcatgccctaatccttagcagtagacagaggcaaaagtccacagcattttcaggttgaagaagaaggctttgcttcaaagtcgatttgaagttttaggaattgtagggagactcgtacaccttgaagggatgaaaaatttaaaagagaaggaaaagtggtaactgcaagttaccaagggtatttatacccaaaaaggcaatccacttgtggaggacataaacgaccacgatcttctctttagaaatacactttccatccaacaatcaaggaatccaaaaatctatgcgtattgtaacatgcgtgctaagatggcacgttacgagctaggtgatgcccacaagttggacaagtggtggcgcatgttgaggtgcatgttgatgcttagtttgtatggcagtggcatttttgtaaatatctacaatattgtccagattgggacgggacttgatattcgctatttatttgggtctatgaatacaatagtgcaatcgggttggagaaactctgtgatttggtatatggtttggccatatgtctacagagccaaaatcatgtatgttcctcatagaaggctaaaagcttagaat

SEQ ID NO: 386844 - DNA, 475 bp, Cannabis indica
gtgctggagagaactttatgcaagctgctcttaagttacgcaagtaattctcagcaaagaaagctactgttaaggctggttttggtgtagctccatgaactactctgtctctttcgatccatatattgcccagagaagacaaaaaacttgttccatttcagcctttgtaaatattgaagagagatgtgccaaatagttccctttatgcataactgaagctttagcccaatcaaacactatttgggaatcccatcaaaccgaacgagcatatttacaaccaaaaagtgcatatttaatagatttccaagctcttatgcagatagattgagcaagtaaagtccgttgtcactttccttcgaattagcaaagtagcaacaggaagagcatcatgaggactctccaagcaaagaaatttattttttgtggcaacttatttgataaactgccacaaaaaagttagggaatttacttggta

SEQ ID NO: 386845 - DNA, 1034 bp, Cannabis indica
caagccaacacattcataatgacttggcggacccagtaatcccagacacctccaagccactacgaactcaccataaaaccattcttcatctcgttggcatcactaccctcattatcaattggagttttgacattagttttggctatataacacatcaacattactcaaaacctcatacaaaccatcccccatccccctgctcttcaccaccttcatagccgaggaagtaggagtcaaaaccatcaaagcccaaatttttttttgctccctcgaccattgactatcacctccaaaaactgacctatctacaaagtcttatcatgcttattcttcactgaaactaccccttattttttcactaaacttggcaaaactcactgcttaactcccagaattggtggtcgttcaccaaccttggcattgaaaccaacaagatcaattccatgcatggaaccatgcaacgtcaaagatgatgaagtgtagaatgaaggagaagatgcacttaggggggtcacgtgatcactaaagtgtggcacacgatctccaacccctacatgcttaataaaagggtttaaatcaataaaatgcccataaagtactatttcaactttctccataagtatcccacgcccaacaatcttagaattggaggatgccaattttagttttgatgtataatgtgtaccaaaatccccaaaattaggtaatttattacctaattgcatgggtctactcaaatcaatattagtatctccattaattaaagtaatgcctaaattatcacatttcccattacaagaaatgtgtaatttttcattaatttccaaattgatattttaaattaattccttggccactgaattcgagagagaatctcttgcaatggctttcccttttataactgttgtcacgtcaaatttttggacatacacaggagctttcttttgctaagctgccaccttttggccatgaagactagcgttcaaacctccagaagaagatttttcagtgtgaaatgtaggctccacctgatt

SEQ ID NO: 386846 - DNA, 855 bp, Cannabis indica
ttaagggaacaaaataggttaatagaaaatattgatggtagctttgattagagagcacaataagattgagagagattatgagagcgttttatctaaagcttatcttttaagtgaatgaggaaagaggtaagctcaaaccctctacttataagccttaaatactaaactacacctcactcataatcataccatcacatactaactaactaaggttaaaatttaaaattacttaataagtggattaatcatataatgacacatagtctccaagactcattcttcatgcgataacagttggagaatgattcaaagtcacgtccaagaccccatatgcacacatagctttattcttttatttttttttcaaattatttactcatttgaactataacctcctccactaaaacctccttacaccccacgtgtagagttagttccatttttttataaacctaggtaatatcaactatttaccatctcctcattaataatatgtatatatataccctaaatgtgatacataccccattttggaatgccacacgtccaaataataaattggcatgcaaggctcctaagcttttaacacaattccatgtgttatatctcatcaccaaaacttttacaccttatgctatatgtataaatatatgcaacattctctaaaatcattaaccatccccataaataattaatcataataatgatattaactaaacttatttcctaattctacaagtctagtacggaatgaactaggcagctcatactaatttactcaagtctaaatttatcaaataaatactatttttttaaaaaacttttaaaataccgtattctatgaaataattattt

SEQ ID NO: 386847 - DNA, 1799 bp, Cannabis indica
tagtattcgagctagtaggatttgaatttctaggtttagtggtcacaatgctcgctattgcgatacttgtgttgggtttatctcccaagccagaatttaacaacttaatttaatttcacgcctcttccttttgcatgaaaatttgtgctctttcattgaactcgctgatgtttctaaaagaacaaccttacaagtcatcctataattctcctcttgtagttgacaagtcaattataattctagcttgaagagctattaactgaatactatcattcaagtttttgactttagttgtggtcatgctaaaatgacttaagtacgcctttagggattcttctggttgttgcttgacaattgtaagcaaagatgcttctggtctctgttctcttccaacttggaattgctttttgaaatccttcaataattgttcccaagaagttatggaataatatgcatcacaagctgtttgaaatactgcttgcttgcattatggaattaaagttattcaagtgcactataggatcagtcgtacaatcatattgtgtgacatgtggggttttgattccttaaggaaattgcaaattcaaaatatcaagatggaatggttctgtctcttggtctaagtcatatcccgatagtttcccatattctccatcttggtacatcttgaacttatcttccaattgtataactcacaattgtattagatccataggctattgctccatgggttgtatgctagaattttgattttgttgattatgtaaatctagtgcattacggtttaaatgctcgcgtaggttaggttgtctttttttaattgttcgcaaagatcagggtcgcaatatctttgatcataattactcaaagatcttgtccttgagtaactctcagattggtaattgcaagagttacttatactttcttggtatgataataatgttgtgatccaccttcgtctcacgtttgcctatcacgggcatgagctctggttgacctacctgtcttgcgtgttcttgatcttaactcactttgatctgtacttgaaccaaactcatgtgactcttctcgcatcggcctcctccttcgaaagagatttgacacatggcccctactctgataagtgtgtgcactttctctatcattgtgagtaggactttacggatgtcttgggggttgacctgtccctagtttatttctagaatttctcatgtcatgtcatgaaatttcttagtttctaggtcgcatttttctagcattttcattcatgcgagatgactccgatatatcaggttgttcattcacttagtttgcaagtctatgggaagttcctagattgtgacgttgagcctcttgatttcctgtatttcaagtattttgtgggttttctccatccattgggatatccctcatattgttaggttgttcttcttaagtgtttctagggttcccttgattgtttttttttgtctcttggtcctagaacctcggggccttccccgtggtcaccttgtagatggatcaggttgagtttgaggagtcgctccttgtgcagccctggccacaactgcttctcgttctaactcagtattcctcaaattcgactcagtcaggcgttgtcaaaattgcctattttctagttccaccagtgggacatatctggttgaatcataagcatccttgctttgcctttatgagatctgttcaccagttgggttgaaattgttgggttttgtgccctaaataaaaatctttacaatctgattagttatcaatataagaaatttgaagtgatttat

SEQ ID NO: 386848 - DNA, 1106 bp, Cannabis indica
attttcattgggttttccttgcccgccaaactaaagccaaccaatttcacttagccaacattaaaatattaaaaacctaaccaaacataggaaacttttagattctcattctcacttctctcattaccgcataccaaatagccccttaggagctccaatattcaatctatttctcttttttttttttattatttttcattgtcgtacaagtaggtgtgtccatcatgtataacctactagcattgttcggtgtactcaccttcatgttctttcttttttgtagatgtaccatggcgtctactgaggagatgactaccgggtagaaaaagaccttgttcaacttttatttgaagatttctctgagttatctttgacttcccctcacttgtcttgagataagagttctagtcggtggatctgtaatttcacccctcatctatatcgagcgttggtaggtagtgaggcgtacaacagacatatttgggagttgaagagagtaggcatggatcaaagattatttttgctaagattgatattatagttactctgtcaccaaatatgttacctgccatagcccaaactatgcagacaactcaagccaaattagctagcaaccttcacatggcaagattcgccacaaggagaattgaaattgagcctaatattgaaccatcttgtgtgaccgaaatgggtgacaccactggtgaggttgacctttctgatgaagacaccgaagaagatggatctatttagaaagaaactaaagaggacactaaagagggcactaaagagaatccatctgatattccaaatccaatttattggtttttatggtccatatcagagtagaaaccatattttaggttttataaaaatatcttaaatgaatctaatatgaaccataatccccaagatctcaacatgattacataaattaaatataatatgtaagaaaaaggattttttttcctcttgatgcctatcaaggtatccttaattcttttcgtatgtatttttgatcatctaatccaatgccagttcactccacactcgaaaatatttctgtgatgaacgaggtgcttggtgtaggtacttcacctgaggtc

SEQ ID NO: 386849 - DNA, 1002 bp, Cannabis indica
cactcagcaagattagcacttccattgaagctttgaaaagtttcaggaccagtgaatgacttatcaaatcggtagaagcatttttgtgccgtgtgacccaacttgtgacacaattggcattgtaatcttttgtccccatgcagaatactgaccacggccttggccactccctcctttttgctggtgcatttggccacggccaggaggaccacgaggctgaaaatgttgatgatgagatccaaagccaggggagggtaatttgcagcatatgaaccaagagaacccctgaacattgaagattgagatgtaggattagaagatggataatagtgagtggagaaagtacctctgcctcctgtgaaaggttttgtgagatgtaggtttgcttctggttttggcaatatcaagatcctctgaatccttttccaatcttacttcttgagccatagaagtgcctcaatttctgccactgtgtatgtttccaatcgagtgttaactgaagtgacaaagacattgtactcactcgaaaggccattgaagattgcctctatgtgatcttgagctgacattggatgtccaatggaggcaagaagatctaccagagtcttgattttcagcaagaattcattgagagaacctttcatctttgagtttcggagttgtgttttatacttgccaatattagctcgatttaatgctgtgtagtatgtacgcagagtatcccagatttgtgcagccgactcacacccgaccattcttgtgagaatgttttcagacatagaagacagtaaccaagaaactaagatgctgtcctgttgatcctaagattcatattctggtgagaggcgattctgcagaagatcttcattcgtgaggaatttgagaggagtcttggttggatcgagatgatgctggagacggcttcctttgattgcagcaaacacctgatgccgccaggggaggaagttgtgttcatcgagtctaaccgagagagaatgagaa

SEQ ID NO: 386850 - DNA, 920 bp, Cannabis indica
atgtgtaggtaaagaaaaggtgatcactgaacgctagtgagtccatagcttgaggattattgtacatatcaggatggttagacctggagtgttcgctctcagaatgatttgggccttcattttgtagtcgcggtgcgacacttttgtaaaatgtattttgaacaatgttgtaaatttctaggacaggatcctaactgtttatgtatgtttatatatttagaaaaagtttaattaaaagtttaaatttgacacgatttttgaaaaacccttttattagcaaaggcgtgcacaataagtagaaaattattgtagtgtgcctaagcaagtagggaattaagctatgtgatgaacaagctagagttcaacatgactaaattattgaacgagttaactgtgtttgagaacctaacaaggataagtcaaaggaaggtgaattaaacattattgaagcaaaatccagctctccttcttcttctgttaagtaaagaaaatggaacagtaagaacgaaagtagtagcacgcccaaatcgaaaggcatgaaggaacctaaagcaaagaagaaaaaagatatccctaagtccaaggacaataaggcaaacgacaattgtttccattatggtgtaatgggacattagaagagaaactataacaaggatctctctgagcttaagtaaggtaaattcaattcatttgttcttgaagctaatttagtggaaagtgataaatcttaatggattgtttaattgggagccactaatcatatttgttcttccatgcagatacttgattcatcaagggagccgattgatagagaggtgaccatgcgggttgggagtagagcataagtgtcttccaagagtgtgttggattttgtgccctaaataaaacccatttcagtataattagatttactaattaat

SEQ ID NO: 386851 - DNA, 1431 bp, Cannabis indica
tcggtccagtccaatgcatactccatgcattcgaaaccagtatactttgccaatgttctggaaagaacataacacttactccaagtgtaagtatacttcatcgctgattatcacatcagtgtaaatccaaaacactgatgaacagggaccaaatcttttgaatcatataatcacaatcacattccactgtattgacgatactgtaattgtgaataactatatgttctggatttaactgattttgtgcatatatcaagtatatgtattaaaccataaacatgtaacatacatgtaatcataattcacttctaaattgataactaatcagattgtaatgagttttatttagggcataaaacccaacatatgcaagcccgtgactgtgtgtgagtggctcgcgtgagagcctgtggagaatgaggggctcgcatgcgagcccgtgattgtgtgtgtgagtggctcgcgtgcgagcccgtgctgagtgaggggctcgcatgcgagcccgtgagtgtgtgtgagtggctcgtgtgcaagcacatgaagagcgagggctcgcttgtgagcccgtgagtgtgtgtggctcgcatgcgagctagtggtgagtgaggcgctcgcatgcgtgcccgtgagtgtgtgggagtggcttgcgtgcgaacctgtggtgagtgaggggcttgcatgagagcctgtgaatgtgtgtgagtggctcgcatgcgagtccatggagagtgaggggctcacatgtgagcccatgtgtgtgtatatggtgtgagcaatgtgaagtgagggaaaaatttgaatacatgttgaaaagaatgccattgggatagaaatcaaaggacaaggcgtgcatgggaaaaacatgcgaccacacctcctgcaagctctaaagcaaggaggtacgagtagtggaggcatgacatctacaaggtctaaggacttgatccagtgtacactacaaccactacccctgcgacccgggaccacctgacaccaaacaagggaacaaggcgcaagaccacctcctgcacctgcggttttccacccgaaagcgacaccttgtctttttgggatcaccatgtatatcaggccattagagcttataaataccctattctcaagtgtgaaagggggttagaaaattaatcttgtaatccatatactgaatgcaatagaaagaaacttctcttattgcattttctgagttttaagtttagatttccatttgctggccacaatattaattgacgaattcttaccgttaatatacacgtagcttattatatattcaaagaaacttatataaaaaattagtaaggttagaatttgatacaattttattatttagttattattattaaaaaatattatttaatatatataaatttaaaaattttaaacatcggtcgtgtgagttattttattttcatt

SEQ ID NO: 386852 - DNA, 1654 bp, Cannabis indica
actgatctgatatcctccttcttgaagtttgtattagggtcccaaggtttcataatcacaggtcttttattgaaaaaagtatatcccccattcaatacagcattcctttcatctacactatgaaatcgaattaagaaaattccataggataacatacctactttgtcgatcttgtctttccatatgcgtcgagcaaatcctttaagcacagataattgtggattggctccaagaacataacaaactaaggacgatttccaaaaagaaacctcatcttcattatcctcatgagtaatcttgactttgggtttactcgttgatccctcaaaagcaggtcccaagttcttaattatacctccagctcgaagaacagggatgggaattgattttccagctgcaacttctttcgaacatctgtgattcgcttcaatgaatgatgagaagtcatgtcgaatttcttcttgcctcagaatttcagtcagagaagatttaggcgaaagttgtctgaatacatcttcattcaccccctcaatttcctcttcgtcttctgaaagtgctaagggatcaatactgagatcatcctcttgtaccagtgaccccttcgacttcacatttgagagttgtttcgttttccttgctgatgattttggtctcccccgtcctcttcctcgcgattttgccatggcttcagccctcagagctgttcacgagagagagagaggaagaaaacttttctttatttgtgcatttcaatattaactcccacaaactttaatttaatagatttcaaaaacaactaacaaattattaagtaccacatcaatatcgtattgaatactttaaggtgtcacatagcaataataatacaaacatcataaaaaaacataaaagccaacaatgacttgtggatatgccttcttattatatagtaacatataaatatatatagaatacttctctcaatatattggtattatctatttatggttgctaaacaaatttaactgtaaatattaattttaaaaatattaaactattatattttaatccaatgaccaatagcaaaagagaaatttaaatttatatgcttaagttagctacttaattaaaaaaaaatcaaaatatatcttttttacagtatatcaatataaaaaatattaaaatcaaattcaaccttttttttttatcattttctttaaccaaaaaaattttattcttaattttttttggttggtagaactactacaatccatataatataaaaataaaaatttctccaattaaatagaaaaattaagtataaaattttaaattttcttaatactactatttattcatgaataatacctccaattgtaattatatatattcaataggtactacctatatgagtgagtacaaaaaagtgttgacatgtcaaaataataatttaatagaacacattatcattaagttattttatttttatttttatactatataaagaagaattgtaataatttcactttttggccttaataatacaagccatatcaaaatttataccctccattaatttgtacaaatttagtccattgattacataaacttcccattttaccctttttttaaaaaaaaaaaattggtaaaaactgaaattggtctttctctctct

SEQ ID NO: 386853 - DNA, 978 bp, Cannabis indica
catcctcgggtgtatcctgggtatcatcttcagcattgtcagaactattctctcccaactctacatcgttgattagtggatcgtctcggttctaatcttcaccatgttgatcatacaagtgattggtcgcctcatgcagatcatcaatgttccctactttggtgtaagaacaagtaaagtaaagaccagactttgttcgtgtgatcaccatgaaaactgaacacaatctctagatggtatcactacttcttttagctctcgatgaaagaaccaaactatttaccgagatttttgaaaaaccaattataaacaattagaagtgaaaaaataaacaattcaaagagaaagagtaagaaagacacaaatattggttggagcgttaattagtcttagtccacaagttgatgttattatgtaactttaagctagaaaagcctttgggaatacagtgagcataagttctcaagtttgcctgaggaagtattggaatataattcaactcttaatccgtagaattcattgggtatttatagtatttagagaattacacttagtttcctttttccctctattggagagtttatattgaattacataacttgggttgtcttgtaaagtcaagcccatgaagaaaaagatattctgactaggctgattagatacggcagaataggtatcgaatgtacggagtatacattgaactggaccgatattgaacttgaataagatatcataaacttactgttatatctttctaagtcaatatcacttagttgatcttagatcaataggtcttaatcctgagatgattaggttctagcttaactgtattatttgtgtttttagagttgttcatcaaagctgaccaattggatcagcccaatgcttacatcttgggaacatggtagtacaattgagtgggagagctaagatacagaatctatagcttctatatctacatagaagtgaaatgatgat

SEQ ID NO: 386854 - DNA, 980 bp, Cannabis indica
gtatttatataactttaatttactgtgattaatttcaccaatggcgtaatattttaatatcacaatcctttttttttttctaaatattaaaattgtactgtatatatgtgtctaattctttttaggaattatttcataattacataaaatttacgtctttagttacgaggctatatttttttacggataattattaatatttgtttatataaaaatacagaaagtttctctctttcttttttcttaaaaaaaatagagttaattttaattttgaattttgtattttacaaaaattatatattagactctctattttgataaatgataaatgaaattatatatttttttaaaatagtactataacaaaaatgattacgtttactgtacttgtttgtattaagaattgtcttctagtttgttatattaaaaaaaaaagggtttgaaaaattgagtttaaaatttatactattttaaaaaatacaaaattaatttattattcaataattaacaaaatataaagtttaaaataatattaatataaaaaaaaaaatattattaaaatattatttttacgctgctgcaatattatactataattatgtaacttgaaaacaaatgtccttttccacaaaaaaataaataaataaataaataaataacactccatctttgtaaaaataaaataaaagaaaaaatccataaaaaaagtacttaggtaagttgtttaaattttcttttctttttattgggttatatatagagagagagctactcaagtttatttgtcaaattatactaatttttggacttttaagtttcttaaatattattgttattgtttgctacaaaaaattttacttttagttacaacaaatttataattaaaaaagttgagactaattataaattattattcatattttttgattacaaagtccgcgactaaaaaaattagtcacaaaaatcacaatttattgtaa

SEQ ID NO: 386855 - DNA, 706 bp, Cannabis indica
aacttttgggcgactttctcaccagtacggaccaatcatgttcttgcaactcggcttcataccaactcttgtggtctcctctgcacaagtagctaaagaaatcttcaaaactcatgatattatcttctctggaagaccggtattgtacgccgccaaaaagctcagctacaactgctcagccgtctcattcgctccttatggcgattactggcgcgaaatgagaaagattgttatgttagaacttcttggtcagaagagagttcgagcttttcagagtgtgagagaagaagaggtcaaaactttgatcaaaactgtaactagtatttctacttctttgaattattctggtgttgttaatctcagtgaacttatggttactttggcgaacaatgttgtttgtggagttgcttttggaaagaagtacaatggttcttattatgatggtggtgatagtgaaaataatgggaagagtggtggaattcgagagttacttcatgagactcagaatgtacttggtgggttttgcatggctgacttttttccacgatggttaacttggattaacaagtttaatggtcttgaaagaaggcttaacaagtgttttagagacttggataacttttatgataaagtgattgaagagcattatcatcgttttgatcctaatcataatcaaaccaaacataatgaagatgttgttgatgtt

SEQ ID NO: 386856 - DNA, 773 bp, Cannabis indica
cataatataatttatgtttaatccaacttgtatcatgaaatgtaactggcttagaatttagaattgattctcatttaatttttttatattaaactcacaaattttttatttttagactcccaaaatgtcagggcgtaaggcctaattaggcctgtctgccccaccctaaagacgaacttgttccctacctctaataagtacatataatatataatatagtagtagagctcaaataatattaaaataaatgtacaaaagttaattataccaggacataataaccagtgaccgcagcaaatgcagttgccattgatgcaccagctaaagccaactttccatcattgtggccaataaacatcaatgatatcataagtaaagaaatctgcatcaaagtaaccaaagacactggacctgctaatagaagttgtctttgcacttctttccaaacctttttccaggtctccattttattcctgaataatatgttagcaagtagcaatattattaaagctaaattaatattaggctatttaagatttttaactcccgaactatatattattgtacatcctaaaccttttagcctattaaaaatagtccctgaactattttcagtattgtaaattggtctttttgtcaagttttgtcacatgtggcaaacaaaatgataacatgactgcttagtcaattgccacgtcactgccatgtgaatgccacgtgtgtaataaattaaaaaaaataatttatttttttaatttagttttacgtaattt

SEQ ID NO: 386857 - DNA, 849 bp, Cannabis indica
gagatctgcatttaatgtaccaaggaatgaatatggaatgatgattgagtaaggaataaaaacggaatgaaaaagaatctaggaatgaatctttattagtttagtttttaattttttaaataaatcttaaatagaggtcaatgtatgcatgtcaccattaggttgccattttaaaagtttaaaaagtcaaaaaaagtgaacctaacctagttagtaattaattatcaacgattgaattaatggcgcgtttgctaaactgtaattggaagcggaataattaatgggagaaatgtatcggtttaaatagaaaataatcggaaacaatattttattatgatgtttactaaagtgtccggaaagaaaaatagaatcaaattattcggtttacataactaggaaaggtaatttgaataatataatatgtaaacaaaataatttaatttgacaaagttgtcattataagaacatgtaattattttctgtttatagatttttaaggagtatatttgtcttttttattttaattaataaaattaaaacttaaataaattaagtaaggaaagggaaagacattccctataaaaatgggggaaaatttttccctttgttttctccctaatttgtgtgggtgccactagtttctcactttccaaaatttagtaaacaattgtatgggaatcaataccatacattcccattcccttaaagtaaacatgccataagatctatgagataaaagttaagcttcatcaatgatgagtatattttttgggttacatttaaatgcgacccatataaatatatataccttactttttataatttttttatttaagcatttatatatta

SEQ ID NO: 386858 - DNA, 1389 bp, Cannabis indica
aaaaaaaaaatctaaaaggctaaattttaaatttctgcacaaaacccctaaaatacttaagttggccttgatactgagaaaaatattaggcacccataatatcttttagcaattctcatatatagcataaaaatggagccaatattaattaattaaaaagtatatctctttgatatgatccaatgaagatctcttatacatattccaacgttttttgttttcatgtttatttaaagttaaccaattaagtaaaaggatatatcacttaattctaaacctaatttagaaagcttattaatgtttgacaattttttatgaattattaaaagataatgatgacattgagtatataagtgaataatgtatataatccaaatctacttaattattagtcaaaaaattttggctatgatcaagtgttttaattatcaaaccctatttaggtttaagcatccctatatacttggactttttcatccatattttataccctaattaaaatttgaaatttttaagatacatgtgtttattatagagtgtatttatgcatattcatccatcttcataagttgatttaattggattaattaggaagtagtcttgtgtgaccaatgttagatatttataaataaaatatgaaacatatatgtaaatggtgtataaagggcggaattaataaagcatatattatatgcattatgaacaaatgattgaaatacttttagttattgattattagagcttcaattccatacaaattttggatctgcaaaagaaaaggaaattaattattagtgtaggtatttggacttacaacctctctctactctctttagatgaatttagtagtgagagaccctatatttatataggtgagatatttcatcaagatttctgccacaattaattgtcaaaatattttgacaattaattcaaaaaattaaattaaaaaacaaatagttgataaattgtgatctgactatatatagaatattgaccaattaaatgtgatcaaattcaatgaatataaattatatacacgtataaaattattcattgatttaatatataaaatattctaataaccagtgcaaccctctcatcgcctgatgagtcaccgttcattacaaaagatcttatgttttaatcacaataaaatttgtaattaaataaaaaatttgagactaattataaatcatcattcatatgttgtgactaaaattctgtaacgtcggtattttatatttactaaactcgaaagataactttaatatattatatctttataaccatatgggtcgggatcccgagtatcaaaatacaatttgaaagtaatttattaatatgtacatataatatttttttaaaaactcgctagcatgcaacctc

SEQ ID NO: 386859 - DNA, 1715 bp, Cannabis indica
ttttttttttttttgttgggaataaactctttgattcgggggcactctagcgtgttgagaatgtcaaggatatttccatttatattggcagttggatccctatagtgtcacccgacttcttatcaacacctcatcgacttgatgggttaataaaggtctcattgcttcgtgacaattcgagaggatggaatagagagctaattcataccagttttttggatactgaagttgtggctattctttctattttatggtcaacaaacgatgtttcagacataattatttaaaactttgagaattcaggttggttttctgtcaagagtggctattggcttgttctctgtaacatgattttgcctcgtgcttggattcctacaaaagttaatctgactcgacatggcctcttatctgatggattatgtcctttgtgtgagtggaagaggaaactacccatcatgctcttttgggatgtaattcattgatttattgtaggaaaatctatgattttgtgttgggagatccgtgataaaaatttatatgtatgatataaaatatataggatcatgtataaaatacaaatttaatcgaacatatatgcactatgaacaaaggatcgaaatacctttatccattaattctttgagcttcaattctatattagctttagatctacaaaagaaaaaggaagttaattagtgtgggtaatcaggcttctaggctctctctgaatgtgtttttcataattttttttcaaattttgatagtttttaaatctttttcatgcatagattaaatgtataacacagtatgaagacgataatgtagataagattcacaatatacctcgagaatgaaaataaaaatttgtcataccccacgaccagaaactgaaagctttacacatatatacaattgcatatagtgattttatttcttttatcacatatttaacaaagttatctctttcttaattttaataaagtaaacaaatgtaagaaatgactacattactattaattcccaatagttattagtaaacgtgtcattaggtaaattttagaaatgcttttaagaatttttgagccttatatgtttaatctagtgtttaaggatgagcatatatcctctcaaggttcttaacacaacaaagcgtattcaacaatatttattcaagtgaactatatgacctctcatttgaacataaatgaccaccatgaatgaatcacctcttatttttttaagtgtattcaacaacagttttcactctcatttgaacatgaacgaccaccatagagctcttggttgttaccattgttaaattgagtgtttatggacttaaatggatgatttaggggttatgggagttgttggaaccgagcacaacgttcaaaaaatgttaaaattacatgttggaaaatggtcaggtgacatgtcgcttgttttaaaatctcaaaattttggtaactagtagccaattaccattttttttcttcagtatttagcaatataactcaaaagtaggagtggacatccgatccaatttaacatttttctcctcatttgatccaatccaatcaataattggatttggaaaattatcattaatctaatccaattagacctcaaaatccaatccaatccgattactaattggattggattggttttttaattggatatccatttacacatttaaattttaatattaacttaaa

SEQ ID NO: 386860 - DNA, 1547 bp, Cannabis indica
gatcattacaatgtaaagtcattaaaaaggttttaaaatgaaaacaaacaatgtaatagtaattatgattccattacaattcccattacactaaaccaaacatgccatgagcacttgcaatttcacttccaatacaattttgacttttctctatatttgactttgattgagctcttgtaattttaaaagttgtgaaatagtaaaatctcgaagaggcagaagattctatggtggtgtatcctatccaaagcaatccctattcggtctgagattagtaaaaggtttcctattgaggatgttagctgtcccctatgtggggtagaggaggaatctcttgaacacctgtttttatcatttaatgtggcttatcacttgtggagtttatctccttggggtatttttcctatctgtggtactggtatacggatgtgggacggaataaaattcatttgggacctcaaaaataaaaacatcaactctgaggaggtctttctttatgtttcgttaatagtttacaccatatagcagatccgcaatgataaggtaccgaataattatccgattgatgtaaaaaagtgtattgactctattcgtttatcttttgcagatcaccatgcttctttgttcccttgctcgtctcctagtctggcgaatgtttggtgtcctcccccttaggattaggtgaagctgaattgtgatgttaaagtggggttggactacatgtgtgttgctattgctgcaagggatcatcttggcagggtgatctgggttcatacatctaaattggagttttctgatgcgctttgtggggaagcgaagacttgctgcaaggctctggatctggcgaaggatcgaggctctaagtttattattgttgagttagattcgagggtagttatcaacgctcttaataggaaggagtctcgttgggagcttgagaactatgtctctttttgtattagatcctttccttattttgttagttgtgttttcgctaatattagtagaaactgtaattttactgtctataatgtggtaaagtgggcgtttacccatcaaataatgttttgtctttatattttatattttattaatatacttgcttcttccataaaaaagggaaaaaaaatggatactgcatactttttttaaaaaattactttgttttttctaaaagtcaaaaacatgatttttcctaattatttttttttctgcaagaaatcattatgatactttggtttagggttttggatactttaataagataagggttatttgcggcaaaaccttctaaagtggacaggtttttacaactaaccccctaatctaaaattttggtggtaaaactacctaaaccactagtccgttagcagttagctctttccatccatttttggctgttaagtgccaggttggaatgtccacgtgtacacagtatacacgtggcacaattttattgatccacgtaattataatttaaaattaaaataaaaaaattaattatttaaaattaaaataaaaaattaaattattttaaaaattaaaaa

SEQ ID NO: 386861 - DNA, 1029 bp, Cannabis indica
tttccaaagatttatattctcctccccagttagattggacatattttattggtcctgaatttttttttcaataagacttttgaactgtttaaaaacatcataagcttgagatctaagagtaagtggaaaaatcttaaataaatctgctaaaatcatcaataaagtgaagataatatctaaaaccatgtatgaatggtgtgtgaaaaggtccccacacattagtgtgaaggaattcaagaggttgtgtagccctactggagaacaagggaaagagaaacttgtggcttttttccttttgacaagcatcacagaaatttagatttttaagttaactaaacaaggacatttgagataaaatttgtcttagagtattaggtgaagggtgaccaagttttctaagccctaaattaacatcattagcagcagaggataaaaaaacttgagattagaaattaaaaaaaaaatgtgaatgtttattaataaaattttgagtaaaattgtcatgacatattggattcactacagtagaattacaatcattattaaagaaagaaagctcattgctggagagacttgatgaaggcgcatcagacttggatattgtagcaagttggcactggaaagtagattaggagaaattggaagaaatctcaccaagagcatatagttcacttttaagtttctctttgaccaagacatttccggtgtccgtgtccttaacaaaataataatttttgtgacattcaagataaacactattgtcattagtgagcttagacacactaaccaaatttttttataatagtaggaacacttagaatggaattgaattgtagaggggaagaagaattagagggaataaattctttgcctatatgagagattataagtttctaaccatctccaactataagggtctctgaaccatggtagggaatggcactgtccaggttttccataccaagagcaacattgtttgtggccccaaagtcaacataccatcttatattgtaatgtccccgcttcaag

SEQ ID NO: 386862 - DNA, 1368 bp, Cannabis indica
ttttcttcgtgtttcatcagacttcgtcttcaatctcagagaatctcagaactcctttcttcagtcatcaaattctcactcgacaagctctgcatttcccaaaaagttttgccaaaacaggaagcagatttcctctttgtttttgctattcctttttccagaatttgtaatcttatttttgctttcgattgcatctttatttactgcatttggtttaggtatttttaggtttaatttctggataatttctagggtcttaaggagaaagcataggtttattaaattcctaggtttctggtttatattgaacttattccttccagaaattgggattatccttttttgacaatatgtcccaatctgattttgaaatttcaactccagattttctagaaatagaatgccctaacgaattagctcttccatttgaacccaaaatccaaaaacctaaatccaaacttgagataaatgatgccaaaattagggatcatctaataaaaaccaattaggacaaatttccagtcgctataggcgattgttataagaaataactgagggtaaatgtcgttatctgtgagatgcagcttggcctgaaccctaaactttatcttctatccctttagcgagacccttatttttaccttgagtcattgttgctttttcacctggtgacctagattttgacataatgaccacccacgctcgtaaatcaaagatccctcaagatcctaatgttacttttgagatcgagctcatcgaatccaaaataagggccattaaagattttttcgggggtgtgttaaagacttgtggcatcaagcaagggcgaggatgttgcattagatccgtttcccctggataatttagctgctttccacccaaaaaggttattcgagaagagtgtggtgaagtcagcactagtacctcgtcaggaataggcgcttggagcctcgaacatatcaaggttggagcaatactccccttgagggaatattataaggagttctataattatcttggaatcgctccctttcaattgattccaagttcttacaaaattctggcaggcctaaaagtcctatatcatattttaggctgggagtgccccactcccctcgagatagtgtacttctatttcgtcaaagatgttcatgcaaggaagtgaggttcaggaggtttttattacttcggtgctcatacaagtgatcacaagatcattgtgaggttaccaaacaagaccaagttcaaggatgagtttttttggactaatggtctttctcctatcaacacaattgcattttgcattatacgtaagtaatttttgtctcaaaaacttggttttgagttctttttatatttataaaattg

SEQ ID NO: 386863 - DNA, 1019 bp, Cannabis indica
gaaactggaagtagagctttggcttcaagaagaagactttatgtggagtctaggctgatctttaaaaagaagctgcaacaaatctttgtctatgtggttcttacctccctagaatccactgggttcatctacaaaagaaggaatgggaggtaagtgctgagcaaggagaaaagaattaatggaaaacaattcccataatccaaccagaataatttttggatcgaagagaagaaacttcatccaaatgacgaatatcctggtttgaaggtactcaagaacatagacgaacccaaaattcatccgagcaccgtacgaaaattattttgagagattttctaaaggaaaaataggtgaatgcccaagaatctaacaactaaggtccgtgtgagcatattcgatgataaaaaaatccaaattctaagcctagcagtgaagaacactcaaagcataaaccaaaatgttgtagaaaaacatgtgtaaaatgcaatagattaaggatgaaaatgcatagaatggttagaaacttactgtagatattgctgaaaggaatacgcaaaactgaagctggaattggcattgaaaaatttgagaattctagcaattcttaaagattcgagagagtgaaaattttctctcatagccttgagtttgtaaatgagtaaaagaatgcaaatgagaatttttaccatcttttataagttgctcaatgattatactggtaatttggttttcaaattgagatttcccccccaccgaaaggagtgtaatcaatacactggaagagtatcaccgtcaatgcccaccccaatagcatgattcctgtttatcagaataatccatgccttgagctatgaaaggacatctcgaagatccaaaaagctggatccgttcacccaccttgtatgttgaacacacattgaccgagcaagtccacactgttggattttgtgccctaaataaaacccatttcaatataatttgatttactataaagatcagaaatcacattttatgttgca

SEQ ID NO: 386864 - DNA, 506 bp, Cannabis indica
aaaaaaaaaaaaaaaaaaccccgaaatattctcgtcacaaattatgtaactaaattcagcctaataataaatggaaatatatggatagaaaaaagtcaaaactgaacagcataataattagagcgtggaagcaatatacataaatatatatataatataatatatgagcaccaaaagtgcaaatatgacagaaacttacacttaccttatcaagtatgaacactactacaacaattaattatcaatatttgtatatataaaatggtatttttataagctgtaatatcactattagtacaatttaatgtctgttttaaattattttactttattaaagattgtaaaaaactgctaatcaattataaagcgtcgcactcatagtaatattaggtactttggtgttttattagctgtactaaatgttagactttttatttgaacttacattaaattttattggttttattaaaatttgtgtgtaaagtctaggtgaagcagaagtgtgg

SEQ ID NO: 386865 - DNA, 610 bp, Cannabis indica
aaaacataagaaaatttcaccgcaaataattatttttcttatgaaacaagatcccttaaaatgaaagaaaggactacattagataagtgttgtgaacataggtaatttttttttgatacgacacgaaattagcacaagcttagaaggtatgacacgacatgatactacaaattagcattatacaacacgaaaaatataaatttaggcataatacggcgtggtgctacaaattgacattatataacacgaaaaatatagacacatgcatgacacgacacggtgctacaaattggcattatacaacacgaaaaatatagactcaggcatgacacgacacggtgctacaaattggcattatacaacacgaaaaatatagactcaggcatgacatgacacattgctacaaattagtattgtacaacacgaaaattatagacttaggcatgacatgttggaaatttataggtgcttcaatagaaagaccaaagtcaaaatacaactcaaattgaaaagtacaagaacaataatattgataaaataatgttacaactctagacaaaaaacatacataagtactatagaaaaataagatgaagagaagattataaaa

SEQ ID NO: 386866 - DNA, 746 bp, Cannabis indica
atttatttaaaaatccgtatctaaaactaattttctctacattctatgcacccatttaacccaggctcaattttgggctaaggtgggctaggtccgaccctagggcccacttaaactcaagactcaaagtttttatacagtatatttttttgcattgaaaaaatagtatttttgaaatttttataaaaagaggcccaataatactctgattttactttagataaaacacactcaaaaaatttcttgggtccattattactcatggtcatggtcggccctgttaacccataatgtatcctctttagattcaattgctcacacatacttccttgtggctgcctcattccactctttaatcctcctcaaacccaatcctccttctttcttaatcttacataattccttccatgccaccaatcccaaaccactcgagtccatacctttccataaaaaatttctgcaaatagaattaacttttggtagaactttcataggaagaattattaattgagaccagtaggaatattggatggcaattaacaccgaattcaccaatgttgctctccctacattctgagagctccaatgacaattaactatgttgatcctattagaatattttatatatggaagttattttctaattaaggaaatgattttctatttaaggaaataaataaataattgattttctgataaatgaatattttatattcattgaatctggacaaaatcaattatgtaat

SEQ ID NO: 386867 - DNA, 1496 bp, Cannabis indica
attttgattttattttaatgttctaagactacagccaattgtttagttatcatcattagtgtagttagttgcttccttcattttgatttcatttgcttatttgtaatattatgtgttctttcattttgagcttgtctaacgttaattgataattacatcacaatctcaaatatggctaactcaattgagaaaaaatgacttaaacttttgatacttattttattattgcttttatggattggtaaccttatgttaattctcagcttcattaatatatgttttctttatttatgtttaattattcaatagaaaaaactaagataattttagaactttgattaaagctcaaatttatacattttaaatatttaattatgcatataaaagtaatttaaattaaatatttcttatttttgatggtaattttattctagtaaaaaatatttaatttattttaatttttgtattattttttagtatttgagcaaaatggtataaataagcaaaaagagatcaagaggtctatacattgaaggcccaatgaatagagtcaccctaacccatctttccaattaaagtctcatcatgggtcatttcttttaaagcctaatgtccaactcagtttcattaatcttctttgctattattcaatttgggccaaagtaagacttcaatttgggccaattacatgtcaaggaagctcttgcccaactccaattaccacaaatgtggtcttccttccaagtacataatatgtactaagttgaagtcaatgaaagcttcattaacttgccaaagtgacagtcagaccaaaggaaactaatataagcgcccacgtatcaacatgctcttttggtgggcctactctattcccaaatattagtagcgtggtgaacaagcttgtccaagccacgatttctactaatccaagttcccacttatgcttaattctctcaccatttctgccaacttgcccactacatacgtgattatatcacaactaccatcagattttctctataaatagaccccaaagcaagtgtaaagatatcagattttagagtagagaaaatacactttgttattttatttttctctcttattattattttatttatacttattttagtgacaaaaatgagtgtattaaaatagtaatattggtgaggttagagtgtagctttgtactttttattctcaatattgatattgattcttttgtgcttcatctccatatctcatttattaaattgttcttcatcttctaatttttcttccaaagttaatagtatcttttatataagttcagtcatgcttttcttatgtaagttaggctattaatattttggtatatttattatattttatgtcgtttactgcattctgccaatagtggtattttgtcgatttatgatatataatatgatatgctgtcaagttagaggtgagattcaatttatgcaagattaattaatttgtgcttttaatatatatat

SEQ ID NO: 386868 - DNA, 938 bp, Cannabis indica
caattgagtttcatcagcttattaatttgtaatgttgttgaccccccaacagcaacattaaagtttttttttttcataataaataaataaataaataaataaaaaactttggaaattgacgaagtcgtgtgattggtattgaagtcgccaaccattcatcatcaccatattcatgggaattgaacgaaaaatcacaccattcaacatcaccaaccacaatttcaattttagtatggatgatataaatatatatatatatttatatatattagttgtcatgttatgctgacaaaattaaatattatttcctcaatcttctatcataatttttagttaatttttatatttaaaaatatatgtatcaatgaatgaaaaagtattttgttggaacacatgaaatatttaatttttaattatgatattacaatattattcttgtaaattttaaaaaatatcaaatagtttagagtattaaaattatgtttaaaatttttttgaacgtgtgacaaactgtaatatattaaaaacttttcggtactgtaaattaaattcaaaaaatttataaggctataacaaataccgctataaaaaaatattttgacatttgattttgaacacgtgtgacaaactgtaatattaaaaattctgttttcggtactgtaaattaaatttaaaatttttaaaaaatttacaagactataacaaataccgctatgaaaaaaatattctggcatgtgattttgaacgtagagattgattaaaagattgtaattagcgttccttaatcgttttgatatataatgtatatatatattgttagtgagtcttacatttctaacgtgtagaaagataatatagaatctataagacttgtgagttatttatctcctaatcaaatagttttgagtatggaaccccatacatcttacaattcaaat

SEQ ID NO: 386869 - DNA, 1963 bp, Cannabis indica
gttagcagagagagggagaaaatgaaggaagaaagaaaagagagagagacttagaaaaataaaaaagtactaaagaaaagagtgtgaaactgaaaattgggaatgagagtggcatgaggctttcaaaagtgcttttatataggtataaatttgcttaattactatatgggaatttatgttataattaattaattaattaactaaaaaacaaataaaactaagttatttgttccaaatttcttttatgtttattttttttaaatttgcgataataattaattattatttttaaatactaattaaattattattatattaattttaaagttttattatatataaatatacgtaatagtcatttaattagtattgaataatgatatttaactcatgcctcaaatttataaaaaaaaaaattaaaaaaattaaaatataaaaaaaatttacggtcaattactcgtaaaaatatagtataatactcctactatagtatattactcctagtttagtatataaaaaatatacaaactagtgtataattttctttggttgtttttgttcttcttattattaatattttgacagctaatatccagccaagaaagaaagaagtcataaccattggtggttaatttaacctaagattgagtcattttggtaaccatggttaaatgttggattactatttttggctttggctttttgtgttttataatttttatttaagcacacttgatgtggtcaagagaagaccaatccttacttaccatcaatcattatcccattaccaattatatccattagtatttgtataaatcgtttttaataaacaatgcttaatttttaagctaaaactctaaagaggagtttgttttagcctttatatttatagtactattaacaattacttctcataactactctgtgtgatttgtagccaaaaaaaaactcctttttgacaacttattcctctataaaaaaattgtctactattttttaattatttagaatagtattttactacttgtatatgttaataatgatatgaatatgatgtttcatgagctaggtttagcttgatcaatcaatatatacatatgatatgtattgtattgtatatataggaaaagaaagcatattattattattattattattattatgtatatttacacacgtgaataataactaaataaaaaggagggaaagttaacataatttaaaaaaggatatataaagcacattatttataattgttttttttactatgtatcactttgctttaaactaagcttctttcactatttttacttctagtgtagtgacactacataattaaagtattaaaaagaaaaggaattaaatttacttaatagaactataaaaactttgttagtaatatatagtattaaagtttaataagattttataattgaatacatttcctctaatctattattttctaatactaatggctttggatcgtacttgttaaaaaatattactagtgcctagcacctttctcagtgtcatattgttattggtgtgattaagtatcaagtctcatataacttaagaaaataaattttaaaaaatatctctatctaattatggagcgccataaaaggtattgggtactaatgctaatagtaatgcttttaatttaattaggtgaagttttcaaagagtattgttattaggcatcgaatatattttgtaaataacgtttcacgattggttagtgatattttctaaaaattattttcttaaattatatgaaacatgatacttaattatatcaacaacaacatggattcaactttttactaattctcattttcaaatatttaaaattgattgttattattttatttacttgatctcatgtctgttttgagaagatcacactgtgaaatgagatgagtgtgggacccacatttcatcacatcctcctcttcctcta

SEQ ID NO: 386870 - DNA, 853 bp, Cannabis indica
tcccccccccccctcttgtattgctctattttggctggtcccctaacatcccagattcactatcttgttgtccatcatgttgatccagaatctaaatgcattatcaacttttagagcttctgtagtaacatttctatctgcagctttgcacccctttatcacttccatgaagccatcctcatctacaatcatctgtttctgccttttgtcttccttcacaacccattcctgctttcccttggcattcttcctacatgcctctgttatatggcctaaccccgaacaatgattgcagaccacaggtttccattcgtattttactcccacctgaacattaaatccatgttcattctcaaaatcaatgaaacctgggaactgttggtccatcctgacctcaattaggattctaggataattcaatctatctctctcctttgtcaccgaatccaccataaccgggttacctatttttcccacaatcttgaacaatgatctttcccccaagtatttcagatctagctcttccagttggatctgaattaggacacattttacatcttctttcttgaaattcacattggaatcccacgattttattatcacaagtcttctattaaagaagatatatcccccaataagcacttcatccctatccttcatcgaattgaaacgaattatgaaaatcccgtaaaatagcagcttcaccctatcgattttatccctccaaactctcttagcaaatccttctagtatatgtaaaggtggattcgaccctagcacataacaaattaattttttttatgcaagatagagtatatttcttaattgattttttttttcactagattaaaac

SEQ ID NO: 386871 - DNA, 833 bp, Cannabis indica
gttaaagttgggaattgaaaccttaaggcataatagaacttaaagttttctagtgagacaaggattatgcttgctcccgagccactgtcatttgatgagccatcaacaaattaatttctaaattttttggtttgagattctctctgtatctttgttagtatttattccttcaattaaaaaaaaaatcttatagtacttgtcctttgatggctgctcgtgggtgataagtaatgttaaactatcctaattttgttaactattttatcaatcgacctgatgtgtcaggcattgacaatatcttccttagtggatgattggtcaatagatggattggatgtacttggaaataacgtcttagctttcttgaggcatgaattaggcttagtgtgagtctttcaaaaggagggtatcttgattctgcccagtagacttttattagcaagatcttgctagttattagttttgaaagcacatgtagggtcagaaagtattctataatcccctgaaatgctttctcacattcctctgtccgttcaaactgcttgttacctcgcaacacattaaaaattagaaggtacttgtctgttaattttgagatgaacttatttagtgtcaccatttttcaagtcaattactgaacctcttttggtttcttttgtgaaggaatattgagcaaagcctttattttttccacggtgaaaacgctcgcgcgggccgatgaagtctagtttggatacacttggtgtgtgagtccctacaccaaatggttagttgatgtttttgagtcctctagaagagtgtcatggggccctcaagaaggatgtcttgattta

SEQ ID NO: 386872 - DNA, 1253 bp, Cannabis indica
tctttcatcttttgcctaaaaggatccatgaaaatagatgaacagagtaaaacaatagccaatccaggaaagatggaagagaagttaacaacaagaaagaagaaaccccatgaaaaccagagaaaaccagttgagaaccaaacaaagactgtggaaaaccgttactgaaaacttaattgccgcagagcactagaagggcagacgctctattgtggtataatcactttgacatacttaatttattttctttatcatggattaaatttaattatgttgagagagaataaaaaaatattattatcttcatcataaatcttgattgctggtaaaaaaatatttacctcaaaagaaagtaaaaagaaagttactgaaagaaataaatgcaaatagttatgtttttaattagattactatatagattttaaaaaaataataaaaaatattatagttaaaaataaaaattaaagaaaaaatatcatttttagattttttaatttaaaaaataagtgaaacgtgatgaaaagtaaaaattaaagagttattttttaaaaaaatgagaaatttatagaaaaaaaatatatattttatatgaattaatatttatgaaattaataaaaataaaaataaaagagaattaaaaaaaataatactaattaaatatatttagttatcatattacccactcatattattgataaaagatagaagattgattatattttaaaaaccaaaataaagaaaaaaaaaatacaaaaaataaagcaaatataaaaaacattaaaaaaaaaaaaacaaaaccttaattattatcagatccctctctcgctctcgctctcgctcgtactctctctcacctcacctctttgaagtcgctgcccactgctcagagagtggacgacgacggtgattcgctgccaagcgatttgacgacgacggagacggcaacaacttctcccctactcgcttacgacgacggctatctcctccctaagtcgccgacgacttcttcaccaacgaaggaagcgacacagctcctctctcgcaaacggcagcaactcaggtcttttaactttctcttatttttcattaaccccaaaaccagtgacttaattaggcaatttttgtcccataatctctctaattaatttggtcgaaagatgtaatcatgtacaaattgatctaattatgttaaaatttgaatttttatttttcttaaaaaaacaagtgatgaataaaaataaatattttttttt

SEQ ID NO: 386873 - DNA, 1460 bp, Cannabis indica
gtagattttattaggtttttttctttaggggtaaaaatagtagtttcattcaaagaaagaactaattatgattaagtttaatacaaatgtttcatggataaaccaaaataataaatcattctaaaaataacgagcaagcgacaacaacgctaatagaccgacaaattaggacatacatgccaatcaaaatcatagtcgttaataaatatcatattatcttaataggtaacaaaataaaacaaggatacaaatttttattgagataataattaataagaaggatatgaattaagggttatccaaattaaataagaatatgttaatttcaactattgattattataaattcaatgaatctagctaatagcttgattaattaattgttaatcatcacaacccatgtaggaagagttccatcacaatataacactttaaaaagttcatccaaaactttatgatgagttggcttaattggttttcttatatatttattattatatattattacacaaaatgttataacaattaattactaattcttttgatgtataatttttcatttatatttttataattgactttttatttatttatataaataaaaataacataatttcgaaataaaaacaacatatcatcaaaatagaaataatttttataaaataaaaacaaaataacctcgaaacagaaataacataactttaaaataaaaatagcttatataaaaatgaaaaaaaaaaaatatattaaaaaaatgtaaaagtaaaaaaaaatgttatgtacatgacaatcccttaagtatatttttaatttaagcttgagatacatgcatattatatgttaattgaatatttatatacctaaataattgaatttattataaacatcatttgactcacctcaacatttccaaatacattattagtgtaatattccaaaattagaacctaaaatcaatattgattgtagtcttatttatttatttttgaaaaatgtaatgattgtagtttttgaaatataaatataatgaagatgatatgtagtactagtgcattgtgaccttttaaataaagcatgaaactttatgaaactttgagaaatgacttgaaacttattgcatcttttatataataatatttaattaaaaaagtgatgactatatatatgtaaacaatatattttaaacaaattataagaaagtgatttcataaagtggagttacaatttttctgctaattaattgttttatttgaattaacattattaatgaagttgttgaccgaggttttcggcaaccaataaaataataaaaaattaaggagttgtaagaaattaagagaaaattttttacgtggttgggtggttaatgagccttagtccacgagtctgtgtatttatgagtgtatttaatacagagaatgttcttggtgagtatttactcttcttgcacttatgcaacc

SEQ ID NO: 386874 - DNA, 1531 bp, Cannabis indica
cccatgtctttcttttttttttgttttttttttttaattctttcatttatagatatttgtattaaatacttaaaacaaatatgagccataataatgcaagtcgttgtcatctacaatgcatacaaccactagtgtttcttgctatgacttcttattgttttgaatgtaatttaattataaagtattcaataaaattaaagataataaaaaaaagaaagcaacggtgctgaaaagaaacaccgatgctaatgtttccttttttttatgaatcagaatacgtattggctcaaaaacaaagtgtttacaaactaatagcacccaccaagggcctaaaaaatcatatatacatgtaaatcacaaaacacatttgtttctatgcatttacattattcacaaactaaaaaaccattgcttatcttcctctgaaattttctttggtcaaaatagctcaatccgatgagttacccctgatttgagctcctttaccaagttgacagtttcttgtttctccttatcccataagcatttgtttctaagcatccaaatgttgtatagcaggctggccacagtagcagccaatgtcatcttcctaaacttactcaacttagctcttccaatccatttaatgaggttgaaaagagaagtgtgagtagttttccaacccagccaggttttcattgtctgtaggcagctgatggttacaaagcactcgaaaaataaatgctctgcaatctcttggtgcgtacagcaaagaagacaagttagatatcttccacaattttcatcctgaaaatcctatctctggttttcaacctctggtgcatagctaaccatagcacaaagctatgtttgggtgagttcaacctgctccagacttgcttaggcttgcccctgctggtttcagcaagctatacccttgagacacagtgtatttttgttgcagtaaagctttgcccgatgtctccttaatctgatctttgagcctcaccaaactcttccaataccagctactttggccagtgctaatgtttctattgaaaagtcaaaaaaaattatgtagaaaggtcgcacttcactgataggtatatttcttatagcaattatattagagatgtcctgagaggccaccagttttcaataaatattttaagaagtcgtagaaaatgacaatccatgcatccattgtagattggtaaattgtcgcataaatacttaatattttagattttatatacttaaatactttatttttatttctagaggtaaaaatacctaatgttacaattctcttacacctattactaccacttccatttatcataaatatgaatacgtagagggttcaaatacattacatttatttattttattttaaaatttaatattcttaatatcataaactaaatgttacttgttttaaaaaaaatatgagagaggtaaaatactaattaattaccaaagttgagtaaattagtgcagtatatggagcatggttattgagttgaagtgtcaattgttggaaattatttta

SEQ ID NO: 386875 - DNA, 1834 bp, Cannabis indica
gttccaattgcttcggcattgggaatgccaccactgactgtaagaaaactactattgtcaaacaacagtgggtgattaagaaggataataggaaggccttagaacctgatgaggagggctttactaaggtctcaaatgggaagaaaattgacagagaggtgaagtccaaagatagtgcacatgcaacagtaatcagaaacaaatttcagcctctttccttggaagagactgatactcttgagaatcattcaactgaatctgtaactgatgttgttgggacaatggctgagtatggagtgaacacaggagggggggagatccctctctctccaatggataagctcctatgttggaacgtccgaggagccaacaatcaagataaatagaaattaataaagcaatttattaattctcaaaagattgattttattgggcttctcgagactagagttaaggctccaaaacttggagccttatactcaaatgtatttgatggttggtgtttctcatccaatattgcatggcatgttgggggtaagattgctattgcttggaatccatttcgttttactgttgatatcatcaaatgtactagtcaactaatgcatttgaggatctcaacagttgaggggttcaatagcttgctcacaattgtttatgcttctaataatctaggagaaaggaggattctatggaaggaaatttgtgacttgtactcagatgaaaagtggtgtttaatgggggattttaatgacatattggccaaagaagaaagaattgggcatcgggtaagatcttatccggactcggattttctgaattgtgtgcactcttgtaaactagaagatgtaaagggtagtgggaacttcttcacttggaaaaataagcaacctgggacagatagaatattctccaagtttgatagaataatggccaattaagcttggatcaacagatatgagtttgttgaagcagtattcttgaatgagggattatttgatcattccccagctattccatctttgcatcctgcaatggtagggggaaagaagcctttcaaatattttcggatgtggaaatcccaccccaagtatgatgacgaactcaaagaagtatggaactcgaaatgtatgggcagtaagatgtttcaggttgtctccaaaatgaagcaattcaaggctagactgcggctactgaacaaagatgggtactgcaatttactgcagcaggttgaagagacaaaatctggtttggaagctgtccagaaccagataaaaattcaacctttggatcgtatactacatgttcaggaaaaagaacttcgaaaaagacttgtgaaggttcaaaaggattacaattccttcctttcgcaaaaggccaagattgattggatacatcatggggatgcgaatagtgccttatttcatgcttgcattaagcagagattgaggcataatcatattctctccattgaaaatcaggaaggtaccagagttaccgattcaaagttaatatccgtggctttcctggatttttataaaagcttactgggctctacactagagcacaagaagcatgttgagcagagctttcttaccacaggttccaaggtgacaccggaccaagctgattacttgcttcagcaattcaacaaagaagatatcaaaaaggttgccttcagtatacctgcaaacaaatctccgggccctgatggattctctagtagtttttttcaagacaattgggagattattggagatgatacatgtgaagctgtattgaccttcttggactcaggtaacatattaaaagaaataaactctaccatcattac

SEQ ID NO: 386876 - DNA, 1148 bp, Cannabis indica
ttctcgtgtgacgatgcgtgagcatactcaagtgcttacttgtaagccttatgaagctttatgaccatgacttaattgcataacaagattcataatatatatgaaggagaaatattaaaagttagtactatttaaaatgttatatcacgtctaattaagtatcacttgaaataaattgagaaacatttcttttttgtatttattaataaaaaaactctcatattatattttattaaaatgtatttacttttgtgagtaagttacttaatatattctcatcctccatttaagtctggcacataatttagattaacttaagggatataataagatcatcatctataaaagtagatatatcttaaaaaatataaaaataaatgtaaaaaattcgtaattttctcaataaattgtccaaatcaaataattctggttcttgacactaatgctcgaggccaacttcttgattatgtcgtaggtggtggtccaattgtttgtttatatcagatgcttcttgaagctatcaacaaaggaaagatatttttcatcaacaggaggtagtatttgaggatgttattgcttttattgtctaaattttcgggagcagttttgtcctatgtggctcgcaataaaatatttgcagctcatggtttgacaaagcataccctttggttaaacgatgagctatcctggtttgaagaagtgccactaccgtttgtggattgttgcattattaatcacgtatgattttgatcaccacgtcaaaaaaagaaaaagtggatctactgaaaaatactgtattttgattcgttttagaaaattaccgaaaagatttattgtaacttattcaattttttgacgtatcttattcatttcatttctccttattgtacttactgagtggctaaaatataatattaatatcaattaatattggtcaataattaaagatcaagtgtaatctaaaaatccaaaaatgtattgactttcttttcttcttcctgttgtttctcatatgtgaaaaatttataagttgtcttaaaatatatatatatatatatagggcaagactatggtaggacctaacttttttgaccattgaatttagatcatgtggttattattgatgtaaggtgtatactcttacgata

SEQ ID NO: 386877 - DNA, 679 bp, Cannabis indica
tttgtttttttttttttgtggtgatatttggaaattaagaagatggaaatgttaatgtttgttattatagttgaaaaagaataatagtaataataatgcattatttgtaggcattgtttttaataataatataataaataatatacgaggaaggtggtgagtggagatatgacctttgtgatggcatggggagaagagaagcctaagagtaggaatcttgtgtaatcatggtgttggtggtccttactctaatatggctagtcaaccacgctacttacaccatgtttggttgaatgattaagaaaagagaatactagagcatcaccaacaaggcttcaaatttggtgatgccgtggaattagctcttcaacttagctgcaaacattacactaaattgtcatgtgtgtgctatagtgcacggtatatatgcggtgcactgttcacacggcatactttttttttatatatatataactaatttttttttttgtatatgtctatattattaattatatttattaaattacaatgtgtctttttaaaagtggtacactgatgtacttctatttgttttaaaatttgagatttttttttaatagtagagtacattatacttatttaagacatcctgcaaaattttaaaaaaaaatggataaatttaacacgccgaaaataaggt

SEQ ID NO: 386878 - DNA, 2104 bp, Cannabis indica
ccttatgagttatttcaatttcacacgaatttcgattaacacctattttaaagccattcagatacatttagaaatatatctgagaatccaaaaattaatgtaagcgattaacaccatgtgcgatcatgtaggtcgcacatggtacatggtcgcacatggtcgcttagtatggttttacagttacactgagcaaccatgtacgacctgcatggtcgcatatggtctcttagtatagttttctaattagattgagcgaccatgtgcgatctacatggtcgctcatggtcgcatagtattttttccgttttcactaaatgaccatatgcgaccaaaagcgaccaaattggtcgcacatggtcacatatcacaggtcgtcttcaaccttgaactgagattattttcacaccatttttattagaataacttaaatttatggtttatattgttatataattgtataataacgaatactcaattattaaacttgagatcaaaataagttgcttaacctttacaattttaggatggaattttcgcttcttctttaagagttttttatttttttatgtcaaatgtaaatgcatctcattgaagaataaatacttgagtagtgttatgaagatgaagataagaactcaaatgaagatgaagatgaagagagatgaatatgaaaatgaagataagaaatgctcagttgtgattccatagtttaggtgtgaagtcttatttttttttaatgataagagaaaagttaatgttaactgtgtttattatattaattattaagttaattttaaaagaatgttattttgctaattaaaatatttaaaatattattttactaataaaatttttcataaaggttattttgcctcactcttcttacttctaccttgttgtgatttttctctctcatgaaatgagttatcccttattgtgttatctctatatcgaaagtcgatgtgctgatgtaataataattaatataattattcaacaaaactaatcaaaaattgatcattacctaaaacaaatgtttgaccattatgaaagtaaatttataaatgtaaataaaaataaccactgaaaaaaatcgtagattaaacaaaaaaaatactaaattagaccaaaactactcaaagtaaattcaaagaatcaaaaacatatataaataattaattaggatatttttttatcttttatattttataattataaaacttaaataaatgggaaagggttataaactaatcaacattttaaagtttaaatgttaaaactaatacactgagacaaatttgaaataatctaattgaaaatatgaattattttaacaaaaatttattttatttataaaaaagtaaaaattttaaaactatattggcctattttaaaattataaatatatattaaaataaaaagaaatatttatttttttttttgtagatgatatatcgacttcattgaataaattagcattctgaatacaaaagacgtaagagttcgccagaaatggaaatatcagaaatactacgatcagattgataccgagaatgtctagcaacataatgtgctactcggtttgctgatcgtctaatgaaaaataaattaacatttgggagggtagataacaaaagttggcagtcttttattaaaaggccgaaagtggacttcattgcttggttgcttcgaatagcttgtactgaaacaagactgtccgtctcgatctgaacatgttgccaattattggtctttacccaactgagagcttctttaatccccatggcttcgatgacttcagctgcatatcttccaccatggcaaccggcccgtgctgcaacaaggtgaccaagatggtttcgggcaacaattccgaaaccatacttattgtcgctatcaaagagtgctgcatctacattaatcttgatagtgttttctgcgggtttagtccatgactcagcgccatcaccaatgttttctagatagattgatgacaacgaaattttatcctgagctttatccagtgatcaagagctacttgtgcagaagtaagcacgtcattaacaaatgattgtttctttttccaaacaaccttgttcctagc

SEQ ID NO: 386879 - DNA, 1500 bp, Cannabis indica
ttttatttacataaaatataattcttttgatgtattttgtgttattttttttttattatttgtatattcctttttaggctaattaggattttagtcctctgaactttcacataactaaattatcatgaactatgtagattgttagatctaaggatttttgtctagtttcattcaattttactatatcagtgattgtttatatactaaaccatcctccccaaactttgaaatctactaaatcatgcccctcgaactttgacatttactaaatcatagccactggaatttcatccatgttagacttttttactaaaattgaaaaaaaaaattcttaaatccaacaatctcaataattcagaggcatttttaacaaccttaacagtgtgtttggcaagagaatttttaggagggagggagagcaatggagggagtgtggagaggagggatcatatttctatgtgtttggcaggatggataaatggatggagagaagtgttggagggcttaaaaatagtcagggcccaccattttgtttcctccttttattggacagattgtaggagagagggtgaaaaaaaagtgggaaaattgacaatttaccttccaaaatactattttgtttctctctctcatacatacctattttatatgtattaacaaaatagtaattttattaacaaatcactctccatcctttcaattctccttctaataccaaacaaaaggattgaaaattattatctctccttcctaccttaccaaacaagacaaatgattactctactcctctattctttccctccttcttaaactctctatccttcttaccaaacatagcctaagagtttagggggcatgatttaatcaaattgagggtgcaaaaatcttaattaacttattttttatgttgttttgatattattttattattattttgatgttgtattttttttattacttttatgtgatatttttgttattttttatattttttataaattatcgtaaaaatataataaataaataaataaactttaaatataaaatgtaaaaattttacaaaaattagtattttatgtcattttgtggaaagtgcaattttttctttaaaactattaaaatgtgcctaatacattataaaagcaccaataattaagaaatgatgtaacccctaacccccttttttttcccgtggcttaatagtggtcttacccgtcatcacacactatgatattttaagccattattattaatcagatgggccagctcacatcactcggactgtatgattgatgagtttttttttctctattgatgaataattttttcttcattgataaaagatattgatgagttaataatgtgattaagttagaatttctaaaatgttataggcgttgatataaattacataaatatagaaattataatttaacactaccttcacctttatcagtagaagtattttcatttttgttgcaaccttttctcttttttttt

SEQ ID NO: 386880 - DNA, 1705 bp, Cannabis indica
gataagtggagagtgatcacacatgtaacaccactcaaaagtcatgatcaagaaggcctaggggatttggtatggaaagtgaccaatgaaggcatatctttgatcacttgggtggcatataggctctgttatgttgacgagagacatattttacatgagcattcaattttttttcacatctgtgtaagtactctcatggtaaggataactttaagaaaacagtgatcttactcccagtaatcgagtttcttaagacatggcatattgtgcaactgttaaacggtcaagcaataatagttaaagtaaaattaaaacaaaatatagaaattcaaattgatgtttaaataagttggaaataatttctaatctaaacaaaatgttctaatcacattttactaaggcttatcaacatcgaaaggcctctcgagaacgacgaaccaacacacaaaagctaaatgctagaaacaaaaaagaagaatggagtcaaagaaggtcctgaaggaatgttacatcaataagattttcctccctgccttcactctccccaggaggtgcctcaccatcataaggagggaagtcaggacactcagggttgtagccttcaactcgtgaagtttctctgacaactagttcaccacaatttacagtgaagttagtttcttggaaagaatctacatccaaacggttctcacactgctcgatgaactttggcacatcatggccagggaaactgctctaattgaatgactaggacctacatttggcaacctaggctgtataaatggcattaaaacgtaactcattgtagtgggtgacatcatgcaaagcttgatcatcaagagtagtcacttttttctccaagaccttgacttggtccatttggtcatcagccacatcagtttccttattcaaagtgagatgactcaagagagcacgttgaagaagagattggtagctggtcatctcactcttaagagaagaaacaaacttcaacaaaagaaactttttccttcaagttagtcacctggccttcagcaacaacaacctagtcttcaacaactccaaggttctcagccagctccaccacattcttgtgtttgtcatccatggtgtagacataacaaacaaaagtttgaagataaaagaaataattttaggtgatgatacaacaaaagaaagctaagccagaaggagacaagacaaagtacttactccaaagatgttagtgaagcatatttgagaaattatgtgtggaggcttggtgctaaccaacaattgcaatggaatgttctctgccctagcaccaatcaatgcctcatccttagcaagaagccaagaaccttgctccgctaagtctgaacccaagtttggagcaacatgtttagaatcatccagagaaaggtcaattggagtcctctcatttacacgaatagtgttagaattctccctaccagattcttcaggaggaagagcagcattcgtaattctaccccttttcctaatcttcttcttcgagacaatagaggaagaaggagtgccaccacctcccttgctggaggctcaatttccctcaacgtcaaccttcctcttcaagttcaaacaggatgccatggtagccaagaagctcatattttcaacaaagagtaaagaccaaaggttagtgtaaagcccgcttagttaatttggaaattagcagctgtttatg

SEQ ID NO: 386881 - DNA, 876 bp, Cannabis indica
tttatttttatctgtttaggaatataatgccacaattgagttctactgggcaccatttattcttgaatcaaattcagacaatgctgtcatccatagggtatctgataggatcgtgaggaaaggatctatcaataagcatggcaaacattggaagggtgttgatataatggtgtttaacacttacttgtggtggatgactggcttgaagatgaaaatattgtacatttcttgctcttgggtctaaaatattcatcccattattaatacctctcagttagttctagctgaacttgtgtaacttgctcattcttatttcttttaggcgtggatcttttgatgacgaagctaaggatatcgtggaattatcgacagaagatgcttatcgtatggcaatgaggagtatgttgagatgggtgaggatcaatatggaccggaaaaagacaagagtattctttactagcatgtcacctactcatgcaaagtaagattttattttacgttttgcttttttctttttctatagctggcctgattcccacgatgaacagagaaaattattaaaatgtgggcaaaaaaagcatatagtttattgcactttctaaaggagaagtcatttaactcaaaattcggaaaagggttacagattagtgccccaaaaggccattatagtctatcctagagtaacatatgaaaagaacttgttcaaaacagttttgtttttttttttacgaaattccacacaaaagcccctataataactaaaaagcaacctaaatcgcaattaaaatctgtataacaacctacatagaaactaccggagcaacccaaaccataaatttgaaaaaataagttaaaaaatattatatgggataattc

SEQ ID NO: 386882 - DNA, 638 bp, Cannabis indica
agcttagggatgttgtctagtttctaaagcagtcttgaaataaaacatatgttgatttataaaaaaaaacacaagttgtgagaagtgctaacagataacaaatatccacaagcaaacagctactaaatataatttacctctggcttcttaaagttagtataccgccatttaagaagaatagcaagtgaaaagtactttaaggccaatctaagaaatcatatttgaataacagtttataagccccttaaaattttaattgcttatagccaagtataaatcgtaaccttgtaaccaaatatacaaggcaataataaagctattgaatcaactttggtctctatttgttaaacaacacaaaaacctgtagcatcaagtattaaattatccagcaaataaaaccaggaaacagaggcatacactagaatttcacaaatattgaaatgcttttattcatttcatatttttgttctttctttctaatctttgttatgaattactgttgaatatttatgtatatgtatatattcaccgaataatataagatcatagatatattcaatccttcttattagaaacaaaattcttataaaagcaacatagaagataaagaaattataataaccatttcaaaaaaaaaa

SEQ ID NO: 386883 - DNA, 891 bp, Cannabis indica
ggtgttggtggtttgttgttgcttattttggatattcagagactgagaaaattgagagtatgaacaagagcaaagagcatggttttgtggggtttagaaatttaaagacctcgttcatttattggattgataagttgaaagctaataagatagttccttgattattatatagtatgtaagttaagagcttatagtacttttgttttgtgttttccaaataaactgtttgtttgaatggacttcattcacacatcatatctattttattacatattattagggactctgtttagagttagttagtgaactgttattctgttaattcagagcagttagaaggttgttaggagtagttaatcaactccttttctttcctttctctctattctgatgtatataaatacaattcccattgtactctaaacacttgatgaatacaataaaacacaattgatctttctctctgtcgttctctcttttctctccttcttcttctttctcagtttctttcattgttgttctagcttcactgctatgagtaaacgaatcaccaatcgtaatacatatctctctcgaaaatctagactatattaacatctgaaatgaattctatgcatgttctgctcgataattccaccaaaattattttattgtttggaaagtaacaaagctagctcatcatcaaagaccttaacttcaatggatatttctagggaagcagtgaagctaattgatgtttacactggacatgaataatagagaaacaagcaaaatagatagatcagagaaggatattttttagccatttcattaatcaataaaccaaataaaactttcactcacacaaagctgttctcctcctttctcatagattctcccataaccagatat

SEQ ID NO: 386884 - DNA, 2116 bp, Cannabis indica
tccctgctcattacacttcagcaaacactcaggtaccttcaactcaatccactgtaaattcttctacaacagtatttttcccatcttctaatcatgtgtctccacttgttttgcctcctacatcacaaccctcaaatgctgagccatctatacaacaacctgctccttcagtgcctcggcaaaattgcaccagagctgctgcaacactgcccaatactgctgcaacaataacaaatgaacaacatgttcaacacaatcttcctgagccagaaccaatcattgctacagctatcccacaccagcaaccttccacttctgggcctaacattgcatcggatgttgcttgtcatatttccccacctttgccccctgccaccataagtgagcctctccctgttgagttgcctcacacagatatcccaaacattgttgttcaagctcctgcagcacctactgctacacgcacacataaaatgatcactagatctctaaatggcatttcaaagcctaaatcctaccttgccacgaaacaccctctccctgaatctttgcttccaactgagcccaaatctctcaaatctgccttaaaagatcccaaatggcttgcttctatgcaatctgagattggttctctgaaaaaagctggtacttggcatctagttccatacaggaatggaatgcatgttattggaaataaatgggtgcaccgtgttaaactcaatgctgatggttccttagataggtgcaaatcacggttggtggctaagggatatctccaaaaagattgattttgaagaaacgtttagcccggttgtcaagcctgctactattcgggttgttctatctatggcagtttccaacacttggccagtgtaacaattggatgttagtaacgcctttcttaatggtgagctcgaggaaaccgtatatatgcttcaaccgcaaggatttgaagatgctcaatatccatctcatgtttgtcaacttgacaaagccatctacggcctcaaacaagcgccacgtgcgtggaatgacaagctgaaacacacactttaccaatggggctttcatagcagcaagtctgatccttctcttttcatacatggcacgggttcaaaccttgttgtattgctggtttacgtggatgacattctgattactggcccgaatcctagcttgatttctcacatcatttctggtttaaatatggcattttctctcaaggatcttggaccggtccattattttttgggagttgaaattcacagagatcactcaggcatgtttctttctcaatcaaagtacataacagacttgcttgtcaaattacatatggagggagcaaaagcaagtcccaatcctacaagtgctgcagcaaagttggctttgaatataggtgagccacttgaggatatcacattgtataggagtacacttggtgctcttcaatatttgtccttcacaagacctgatatcacgttcatagtcaacaagctcagtcaatttctacatgcccctacttcaacacattgggaggcttgtaaacgtgtacttagatatcttaaaggaacaatttctcttggtcttcacattcaaccgagttcgtttccatctctaacagcctattccgatgccgattgggcaagctgcatcgatgatcgacgttccacgggaggctacttaatcttcttaggtgataatcttgtaagttggtctgccaaaaagcaacatgttgttgctcggtccagcaccgaaagcgagttcagggctctcgcaaatgctactgcagaaatacaatggctcaagtctctattgtctgaactacaggtctctatgcctcactgcccaattgtttgggtcgacaaccaaagtgccactgcactagcagccaacccagtcttccatgctcgttcaaagcacattgagatcgatctacattttgttagagatcagattatggccaaagacttatcagttcgttatgtgcctgccttggaccaagttgctgatgcattgacaaaagcacttaccactgatcgttttttgtacctgagatccaaactaaaaatgggaattaccccttttcgtttgacgggggatgttaggatagatggta

SEQ ID NO: 386885 - DNA, 867 bp, Cannabis indica
tgctcttaatggaaaggattccctttgggagctcgaaaactatgtctcaatttgtattagatcctctccttttattgttggatgtattttcgaatatatttgtagacagtgtaattttgtggcccataatgtggctaactgggcattttcccaccagaggttccgttccctaccgattacctctatcccagataaactcttttgtaatgaccagaaggtctaacacttttcttcaaaaagaagccccaagccttaacaatacgatccgaaactgaagccaaatggatataagagacaaattatatgccaaagaaattttctcatgtcatcaaatcatcatatcaataacagcaaattaataagttatatatatttatatatatttgtatgataaactgtacagatataaatattaaggaacgtcaaatagcacatcatgattttataaacataattatcaaatcttcaattaattcaacaaaggtggctttgataccatttgttaggatttataaaacactcaaaaaatatatatcacagatctaaatatattcttaaaagtgctttaatatagaaaattttaaatcctaaatctatagaatatttgctaaattaaagaagaagatgataaaagatgagtggaagcactaacgtgaagccattgctggagattgcagagaacgttgtgatatttcaagaatatactatttctctaaagtattttctctgatgggaagagaatacagaaaatactagtatttcttggagaccactacctatttatagactcattatataatgagttttaggtatttacaatttgttccctcaacaaattataaattaacttatggtatctatacatta

SEQ ID NO: 386886 - DNA, 1245 bp, Cannabis indica
tttatttttaaatatatattaatattataaaatgaatatagaatattctgttaaagttaacgtaaaaacttaaaaaatatcgttaaaccaaaaatttcattacatagccacattttatatagaatagatatttaaaaaattataaatatgtaattaatattaaagtaaaaattaataataataaatggcacatattttcctataagaacataattaaaatttatatttatagagtacttctatgtgagaggattggttttgctctcacaagtgagtgtaatgttatagtcattatttctcaatcttgtggtattaatttatttagttacaatgagacataggattaataatttttatatattttatttatataaagaaaaaaaaatcataatcaactcaaccccaagtagcaaatagcagtacatttattttattttataaaaaaattaaacaaaaatataataaaactaataattaaaacaatatatgaaaaggaaccaacttgtcttctccaacttcatgatcttcttctccttgacgacagacctgttaaatgatggaccttttctatcggcgttgttgaacgatcgagacaccagagttgttttgttaaaaagtatttcaaatttgaataattttttcttgtttttattttgtttggttaaatatgttaaacgttagatctaattagtttcttgtatatgttcaatgtgtatacattgaattaaatttgaatgaagattggtgactatagaatcaatgtgattgaggtacaagttctatgaactgttgggtctataaaataaaagaatttcttgacttatgattatatatgttcttctcattatgttctgattttaaatttcttgatttatgatattttgtttattcttcttcattaactttttttctttggtatcattattatttgttggtgaagaagatggtttgtttttaaaaataaatatggattaaagatgaagtgaaaaaacaattttgatctattctgtttgtttcattagaatataaataaaaaataattataaaaatgagaaataagtaaaatctacactgctctataatcgactttaagcctatacatctccaaaaaaacaaccaatcataaaacaaagaaaatgcattagcaagaacaaaagtggtgctcccacttaaaaaaaaaaaataatcctatatttatatatatgtatatattcattaaaaaaatttaaaactaattaaaatttt

SEQ ID NO: 386887 - DNA, 1226 bp, Cannabis indica
ttttgtttttttttttttgtttgaaaatatctcctccaaattccattgttagagataggatacacatataatcctaaaaaaagaaaagaaaagaaaaagatatgatacatataaattattaatatcttgattaccagcactcccaatcatgaattaaataaattacttaaatgctacaaagtaataatataattacttttgatacaaatatataagaacctatttgagtgttttattaataaaaatttcttttaaaaaaaattgcaaagaaaaatcaaataccagatatatctcatttttgctcgactatgatccaaaaaaagatgattggggattaaggatcattagttctctttgtaaacgtggctactgggccgggcctaattggtccaagcccaaaacattaccaccaataaataaataaatgaaattattacaaatgcaaaataatagaaagaaaataaaaacgttggtaagtcgcaacacccaacttttctcgctcttacgataaaaagcaaggtgagatatatataatacaagacaagtcagaaatctgagtacagagccggagcctctcatcgattcagatcccactgtcgccggcgatcgccatgttctccgccgttcgatccctccctctcctcactttagcttctctttttcttcttctctcgccgactttcgcttccgattcagatcacaaggtgagctttgatccacttctttttaccctaacatcttaacctaatgtttgactattagatcttgttctttatgcatctgctgtcattgaatttcgtttggatctatgggttattacccgtttttctgctcctcaattgggctcgtttgtttttttttttttttttgtactttcttcaagcgtcggtagcctttaattcttgttctttgagcttttaatgtgcatttttctaagcaaagttttgtgaatttgggctgagtggaggaaatggagtcatgggtgttctttgtaagggttagatctcaactggggttttttttgtttttgtttttgtttttatattgttatttatgcagttttcgttaaaaataaatgaaaaaagaactagtgctaggcattccacgtgggagtatagctgagcgtgatggctgagctgctggcattgttgggatcatggtctaggagttccagtaagatttggatagtgagtggtctatgagttttggtgatattcttacagtta

SEQ ID NO: 386888 - DNA, 1242 bp, Cannabis indica
ttttttaattattatgattattacattttaccattgttgtattcattttatcttgtgtttgatgaaattcattctgaagtccctaacttcattttttcttttctcttggcctttatatctatatatgtcgaggcatatatagtactttgaaattatgtatatagatttagttctgattgtttgagaaaagtattattatcgcttggagtatatagacgattaagctcaattgtagggatactaaaatggataaaatgcagggaaaaaaaagatttcgcaagggaatatacattgctgcaatgaatgctctgacatagtacctatggaaaggcataattgggattgtgtgaaaacatgaggtagttacagtacagagtatttttattgggtaaagcaggttgaatataatagaatacataacaaattttcttacaaagtttagtaaggaagatcaaatgtagtttactggggtatataaaagcctctaactactgaatatattgggttttactaatagagtttgaaaatgaatttcaatcaacataggcttacttgttcgccaaaaaaaattatgttttaataaccaagtcatttatttctctaatctgaatcttttcttagaaaaaacataatggattactaagatttatttactggattgtggattgtgagatctcaaataacacctcttaacatatattatgcaatctctttattaaaaattacaaagctaataggaagaaaaataaacatatagcatagaattaatatcgatatagaaactgaaaatataatcattgtacaagtaatctttatataatttaatgaatttaaaaagcataaaatattgagtaaatagtttaataatacaaataattctaacaacaacttaccttaattgtatatgaaactgttagaagttgcagaaatcttgaacagtttgcaatattttatagcctaaaagaagaacatcatattagaaaaaactaataaacaggaggtgtaataaagaagtgttctgagcaaaaccaacctatatattaagcttaattaaccacttaattattccatatagaattaatgatgaatcatgtctaactatgaaattaacatattacgtactttaataattccttatatgtttatttgttttagttacatatatgcctgagcaaaacactaagagcatgtttggtattattttctgttttttgttttcaaaaaattgtttttagaaatgag

SEQ ID NO: 386889 - DNA, 916 bp, Cannabis indica
aagttattttcttactaaacacttttacatttatttttatttaataagtatataaaataagattagtcatacaatattctaataaattagttattagttttaaccattatacaaattaattttttttatcacatagtcatatacaaattttattgtttaaaataatatatataaaaaaaaatcatatttttctttctaatataaaatatatagtacaataagataaaaataaaaattaaaaattgacctgaggggggaaaggatggatagaagaagatggagtattcatagtaatttccggtgcctcatgcgcctgcattactccgtatctatttttacaattagattaattaaataaaatataagaggatggatatgttttgttaaataaaatttatttatttatataagacatggtgctgaattgtaagtgcaacttaaaggaatttaatattagttattattatcttaaaaatatatgtaaagaacgagatgtatacatacatattatttgaaatggaaaagtatgaaataattatgtctaatgtaactagtaacaactcgtgcttcgtgatagatatttaaaaaattttaaattatacaaataaaataaaatatactaagtaataaattaaattgtatcaaattttactaattttttatataatttatttttttataatttgagaagttaggtgtaaaaacaaattgaccaactcgtatttacaaaatcctattttattatgaaaacttgacatattttgagaggagaagttcaagaatactcatttttttttttatactttaactaaatttacctctaaataaaatttaattcaaatatacctctttttatgaatattgtaccaaaaatatcctcacacacccatataactaacacataatttcaaacata

SEQ ID NO: 386890 - DNA, 3497 bp, Cannabis indica
ttcagaaatctcttgtaagattttcctataacgaatggcagtttcttcttggtttgatttaatcagatgatcttcaatcctggaatcattcacttccaattcgtattgaggtttagaattttcaggtgtatatagggaggacatatgtttggtatatttcggtgctgcaaattttggaagataaatttctgaaatagaatgggacatctccacagaagaaggacaatcccaatttttgaatcaaatttaccaaaccagaggtctatggaatatagctaacataaaatatgcctaataaaaaatatatatgaaccttagatattgaaccgaatgaagtaatgaagtacaaggcagatcatcaccaaagtgaaatcaaagaaagaatgaggtacttactgtgtgaagattgaaaggctagacaataaaaactctgcgaatgaagacttgatagccagcaaaatgagttttatcaaacaccgagagtcgagggttcacaggaagaatatcaaagttggaaatgaaggagagtagattcttaccattttatactttgagcccagtaacggtaaggccaaaagatggaagatctaacgactaggaatgaagaagaagtggaaagggtgggtcattaatgctaataatgaccctcgaaaccatggagctgctaaatccaaggacatgcgtgattttaaaaaggagattatgataaaaattccctttatcatcatttaaaaaacactttttattcacttttaagaggcaattgttataccgaaatttggctatcggttcaaaggaggatacatgtcgaactgggaagaatacaaatcaacaattgtaatgataattatatttgaaaatggaatccctcattactgcagaattgacagagtatatatacaacttgctgactataaggtcttacacaagataaagaaacaccaactgttgcctcgttcattaacgagaaaccatacgacttccgatgtacaaggcgaggcgtcaacctcgctacgcattaggagacaagacatggtggctggtaagacacttagtgtataatacaccttatatagattaagtataatagtcgagtaaatcaaaacaactaatagtgaggcacccatctttctataggaaggcgtgctcatgataccttcactaattagctccagatactttcagtggggttcatggccctgtcgagtcagctctctcagatagaagctaacatacaaataatgttgactgctgaggtccaccttgtcacccagaactgtaattttcagatgaagcattatgtcatcaagcgcaggaacgacaagacttacattatccacctcggaaagatatgggaaaagcttcaattcgctacgaaggttattgctgttgtgttccaagcgagacatcctagaacgttacgatttacaacgtatttaatacacgtttacattgaccaggtaagagcgaacccatcacagctgtgtgatttttaaatattaacaacatttattttacgtggtatataatcaaaccccacgatttcaggggataattgttgtaggatatcagtcaactatgtaattaactgccctattatgtaattataaatatgagcaagttatactgaaaaagggacgaaaaaatcattagagaaaaggcctgagagctgtaccagaaatctaataagattgactcgtggactatgcacaatttcaactgtaaaatcacgtgaaaacctttgtgttcttatattttctttgccgtttgtaatttctgtgcaagtttatcactacttaggctcaaatatagttaacgaaaatctgcgttaataattttaattgcatataccttatatggtttaatataatttaattctacatttccaattttcatgtgatagtagatttactaaagaaacttatattcgtgctaggacatatacatctcaacccatattcaaattttctactctcctgataaatttaaacacataggatgcattaagcataaaaattctaaatgctacattgaccatataggtactctcgttttatatcgaaatctatatctatttcaatatagcacaatcaacacccacttctcatattttttattgagatcattaaacaattaattggtgatcagaaaattaaaaataattaagtacgaatgaaataaatagacataaaaaattatgaaagaactaaatcatattaaaatcaaaataaagtgtcaaacaatctctattaacagctttataaaaagtctagctactcatgattattgaaaatatccgataacaattaagaacataagaaaaatagaagaaatcaagaactcttcaaaaaataaatgttaaaagtctttagagtcgcttctcgtttctaattttcgtactccaaaagtcgtatgctgaaaagttatgaaaaagggtctttatatagctaaaagaagataaaaaaacctaattttcacagataagaataggtgggccaaaacactaccttgtagtactgtagcgcttgaagcttgatattttgcagtgagcttcccggtgtgatgactgataatattatggccacaactctttcaatattacttgaaatttgacgattcaagatgttttggaaataaaaaagagagatctagaacttttattaacaatagctttcttcaaagtcaacatatcatagtcaaaaattagattgaagctttagacttaatttttgattaaaaactgagcgtgtggagcatctaaaacatagaattttttaccacttatatcctagaactccaaaatgataaatcatcgtattcatctcatttaacatgttttttcttattattaattcacattacaaattttactattgaaacccgaaacaaatataaaataagcgtgcttttgcacaaaataaatatgatcaattgaaacacacctctaagaaactttataaaatacacctaaaactagcctatcaaactcccctcgagaaaatattgacactaaactaaagataaacgaacacaaagcaagtcttacttcatttcacgctacaccacaccatcactacttacaagattcaactattataaaacaagatttttaatttaattgctctcaatactcaactttaacattcaaacttgaaaagaaaaatataatttgcaaatgacaaaaactatgagaacttaatatgcatgctcgaaataaatctatcatctccacaactcgattatcaataacaatgcaatacttagtcttatctactaattttaacaacatgtgctttaatatcaaaatgacataattgggttataaagttatgcttaggtaagggtagatgaaaagcgtcatttaggctcacctatttaaatcactctaaaattttaacaaaatgatcccaatatcctttttttctaaatacattagagaaactttactttgataactttgtaatacttttttatgacacggcattgccaaaaatttt

SEQ ID NO: 386891 - DNA, 581 bp, Cannabis indica
tagttgaacctttctgtagacaaggatttcgtgagcaggtctgcaacttgatcaatagatgggacaaattgaacagcaagttggtgagcaaggatctggtcacgaatgaaatgtaaatcaatttctatatgcttggatcgggcgtgaaaaactggattcgcagcaagtgcagatgcactctgattatcgacccagatcacaggacaccgaggtattttgacttgaagctcagtgagcagagacatgatccatttgagttcagcagctgtgttagcaagagctctgaactcactttttgtgctagatcgagcaaccttctgttgctttttcgaggaccaggatattagattttgtcctaggtagatgacatagcctcctatagaatgtctatcatccacacaactcgcccagtcggcatccgaataacttgtaagagccatgtcagttgttggtcgaaaaactagcccgtgagaaattgttgccttgagatacctcataactcgtttacaagcttcccaatgagaagttgtaggtgcctttaaaaactgacttaacttgtttatgatgaaggccacatcagg

SEQ ID NO: 386892 - DNA, 1254 bp, Cannabis indica
gagactcgaacctaggacctccagcacacacaaaaccacctatggtcatttaagctagcctcaagtgaaagatagtcgtagtttagtaattagtagtactccctcaaatttgtttgattatattttttatatttttttgcgtaaatctaaataataactcacatggagtaatctaaattgtaactaaaattcacataacaactcatataaaaatcactagagcaacctaaaccgtaaattaaaaaataaaaataaaaatagtatatgagataattctctaatttttaaagagtgcgtttgttaacatcttttaattaaaaaaataaaaatacttttcaaaaactatattttaaaaaattattttcaatttttttttcaattttttaattgagaattaaaattttaaaataaaaaaattacttttaattttttcttaattaatatttttgactcttattccaacatggatctcgggacctaaccccagatcaagacttggccccaaacatgggtcttgaatccgaactcaaactcgaacctgaaccctagaccccaaacctagacccagactcagacccgaacattgaccttggactcgaatttggaccaagagcaaaacttgaacttcagacttggacccgtaccctgatctcaaacctggatcccgaactggccccgaacctggacacaatttaaataaaattaaaaaataaaaataattataaaacatattttttatttttctcatacaaaattttaaaataaaaaaattacttttatttttataattaaaaaattaaaaaaattaaaaaataagtgttaaaagaaagagtaatttgcggcaaaaatacctaagttttatcccgagtagcagataaatacctaagtcgtatttttggcggtaaaaataccttccgtcacacttctggaacttccgtaggtacctctccgttaagtggtatgtaagtgtccacatgtcatcttcgcattggtccacatcatttaattattatttttattatttaaaaatcattttaaaattaaaaaaattaaattaaataaaaattaaaattaaacctaattataattttaaatacaaaataatataataaattaacattaaaaatttaaacagaataaaattaaaaaaaaaaatacaaaacaaacctaaaactaaaactatcattctcatctctctcttctcacaggttcctctccgtgcacctccgcccgacccgaccctggtttcttctc

SEQ ID NO: 386893 - DNA, 592 bp, Cannabis indica
agatctaatttagcaaccttgaaccctgcctgaataattggttcagcatagtgtaaccttgctgtaacattcaacttctgcccatcttgaagcttcgcccagtgactcctagccgaagcttgaaaatcaccattcccttcatccttcgtaatcccttctccatctgcttccttcatgatctctgccccatttggatcgtcccccattgcagaaacgtctagggttctttcagcagagaggtttttcaaacccatctccttgcacaactcttctccacccatcgccggcatctccggcgtctgttcattctccggtcgttcaagaatcgctggaaaagtacccaatcgcaccactgttgctggctttcgagtcgaccgtttccttctcatcgagagagactcggttgtcttcgcacgcccaaattaagcttgtcttcctcttccaagaacaatatcgattctcataaaaacataatcggaccagagatttaattaaagaaacgagcgatgatgatggtggttcggccttcaacaacggaacgtttcttcgcagagagagagaaatattaatttaaaatattattattattatt

SEQ ID NO: 386894 - DNA, 1207 bp, Cannabis indica
tcaatgcactatggagccatactgcagccaaggtatgaaattccaacttagattggagaataaaattctaaagtttgtgtttttcaaattaaggtggtggtggttgatcggctaaaagtgctggaggtaagaatcatgtagtgttggaggtttagttaggtttgcttgccatgtgcaaatatgattgtcattgatgaattatctttaggtttgtggagcgagagggttttgaactattttccactgttgcatgccctaagtttgattctctgtatcatgcatagcactacctagggatatcacgaatccttactattaggagggaaaaaatgagttttctaattctttttattagtctccctgaccaatgagtcgtgtgattctattagaaatgcttgccatatattgttgaccgcacactatatagatattgaataacaattgtaaggggattttgaatttttatcaattcctaatcacaataggaagacaataggcaaatcgattgagacttgcttaaaacaatgggggtgttgagagggtttttgcaatcataactgataatgcctatttaaacaatctagctatttgttacacaatgagaagatattgcaagtttggaagcatgtggcttatgattgatagattttaattatgggtgatagattgtggtatttggacttgtttgtaatgtaattaaatatgttagagattctcaatcaaggttgtctgtgcttgatatttagatgtttaatcattaattaattatgaaaaatagagactctggattgtttcaaacattgactagtactctgactctggaaccttttcctcaaaatatgaagtgaaacaagaaaaatctgaattataccagcatgtgcttacttataagatctatttacacacggtaggttctacggttattaactagctcatgttttctatgcatttcacattttgcatgtcttgagttcctcacagatttgctaaacattctatcaaaaactcaaacacagataaaatagcaaacatgtcgtgttaggtacagagaaagaaccgaatagactcaattaatattgctattaattataggatttttgaaatgaaaggactatcctcatgtgtataaaatgatcctagatttacatgtgcttggtccaatggttagcttgcttggagtattgttttttggttgtatttgaaagtt

SEQ ID NO: 386895 - DNA, 1262 bp, Cannabis indica
tttttttttttaattttttaacaagaacagaagttttagtattgaataataaataaaaagtttggattgtcattgattgattcttgaattttttttaagtaaatttacattctctgaattgttactatggttaatatcatactcttttatttatttatttatttaaaaaaaaatgacataacgtgagaaatttatattttatttcaaagttgtagactctcttaattattattgaaataacaagttgtaccattgctgatggctacctacccaaaagaccaaacaaagactccattcattactttatgtttgccttttcttatttttcttttgttttgttaataaaatggtaataaattattgaagaaaaaaataataaatgtttataactagacccatcatcatagtatggcgtggccgcccattaagaatggttaaaaagttataaaaaaaaaataatttatacatatactatagggtaaggttgtaaagggtgtttcatttaatttttttatgattagttttggtatatataagagttttttagtctaaattatgttacgatacaacatatacattataaaaacaaaaaaataattggactaaataatttcttaaataccaaaactaacaaataagaggtttactagactgacccctttaataggatctatactgaaattctttatactatatcaatatcatataaatacaagccatgcaagtagccactatgtataatattaaaaataagaattgtgttcatagagaacatgcctatgactgagtgatgagtaataatatatagtcgaacacagaatagcatagctcactcagtgatttgaatttcaaagtgcatacacataaaaacagaaatattattattcgtcataccatgatcataccaaaagcaattttgtaggttccaccatgtaatgatattttgcttagatacttattactattacaaaaagtagcatattgtatagggtaaatctacaatatcactaaaaaagtatactgttttgggacccatatctcttttgggcatataaaagaattttttagttagtttttttttacgatagcatatattattgttgtttaaaattatttataaattttttaaaattttttaatagtttataatattaaaaataagatttatatattttgttgtatgggtgactattttttttatacgtgtgatatatgtaattgtttaaatttaatttttggcactgtaaactatttgaaaattt

SEQ ID NO: 386896 - DNA, 1914 bp, Cannabis indica
tgtatactcgggaaatagactatatatcccttattcttgtaacttgaaactctacctctcaatttgtaaatttagattagaaactattcaataaagaagtaattcatttcatttgtgttctttaagtgtgttcaattagcattggaggttgtttgagctttgaggattgttctcaaatgttctatgaactcccccggtgtgtgagatcgtggtttgaatctccaacaagtggtatcagagatgggattggtcgaagggggatcttggaactttgaagtagaatcttgatcaatcaagaagaaaggttcttattagaggggacagttccaaaactaggtgatcaatccagcaagaaaatagggaatgtcaaattcgatttagaaaagtttacagagaagaatgactacagattgtggcgagtcaagatgagggctctcctagttcaacatggtttgcaagatgctcttttgggagagaagaacctgcctaaaggtttaacaaaaaaagagaaaatagagcttctcgataaggcacatagtgccataattttaagccttggtgataaggttctcagagaaatattagaagaagattctgcagctggtgtttggaagaaattagagagtttgtatacgaaaaaatcacgggcaaataggttgttcctcaaacagaaattgtactcttttaaaatgataccatgaaaagatattgaagatcatttgtgctgacctcaaaaagtgatcaactgacagcgggatcgtgtggatctgatgcttgccacatgttacacaaacaaaatgataaagtaaagaacacacagatttgttatagaggtttggccccctgtgatagcgggtaatgacatactctccttttagttgtattaatacagagggttaatactattcaaatcactataggtgagatctgatatagcacccttaaggatacaaagtatgaattgagattcgtagatctcaagtgatgagaatgcttgtatgggcgtgtgagagaaaattaagaagaatagagttaccagacttaggcttagagcttggaggctagtatcaggcttaaactgaacttagattttctaggatagagttaaggtctttatataagaagcatgaactctaatttacacttaaaaccctaagatatttgcatagttaattaattaattacaaaagaccaaaatgcccttaaacatagatattattcagttattctattgggcttttagggcccaatttgcagcccaaatgatgttgtccatgtgtagaagtgcacagagaaccctagagagcttctcttggccatccagacccctgtagggggaaggctggccgaccatggtgcagtccagaggctggccggccatagggtcgaccaggggtggccgaccaacttttgtgaggaagttggtcagtcacttgatgcccatttgagtgtcggggtctccgtttgcttaggtactgacttggtcttcttattggtaggctgtactgccacgtggcagtgattttgtccacgcaagtactgccacgttaggaggagaaaaatcaggataagtttttccctccaagtccttatgcggatatttgtactgatagggacttaccagccatgctggtgcggttgggactgttgtagcctttgctgaataaaatttgctgcgtttttagccttttgaaattttttgccttgactgtttcatctcatttgttgtagaaaattaactgctttaattgtcttattgatgtgtaggtgaagtaagtgaagaaagggtcccacgtgtactacataagtgctttttgggggaaaggctttttcacttttcacttttcacattctacattctcccactaaaaatttacattagaagaagctcctccttctctctagagggccaaa

SEQ ID NO: 386897 - DNA, 1327 bp, Cannabis indica
gaaatcgcgagtctgaagagttcactccggtacacttcactcataatctctctgtaaaattaaatgaccataattttcttctttggaaacagcaggttcttgctgcaattcgaggaaatagattgctgaaattcatccaagaaggagccactccacctcaatttctcactgatgctgaccgtgcctctcaaacatataatcctgaatttcttgactgggatgtgcaagaccagctgcttgtttcatggctcctatcttctatgactgagagtcttcttactcgaatggtaggatgtcatacggctcgacagatctgggcaaatctggaaaaacacttcaccttgaaagtatcgtcaaagattcttgaattcaagactaagttgcagaacttgaagaaaggcactctatctctcaacgattatttgctcaaggttaaacaacatgttgatcttctcgcttctgttggtgaggttcttagtgatcgtgatcacattgcagccatattcaaaggtctccccagcagctacgacacctttgttatatcaaccaatacccgcatcgaaggatactctgtaggagagattgaggctctattactcgcctctgaatcgcgaatcgaaaagatcgatcaagaaactgatcttacagtcaatcttgccaccactgatactgagctacaacctgaagttaatcttgcctatcagaatcgattcaacagatccatccaatccacaaggcctcctttacagtttggtacttatctcctcagttttctgcagcaagaggaattccccctcctcgtggtgctcagttctattatcccaggggtcctggatatggggttcctcactattcaatgcctcaattctctcaacctactcgtggtggcttcaacagaggtggtcgaaccaatgcttcttcaaacaaaccccaatgtcaattatgtcacaaaattgggcacacggctgtggactttttttacaggtatcctgattcgggcgctacaaatcactgcaccccagacattcacaatctggcttcaagctccacctatgaaggatctgagcaattgtttgtaggcgatggcataggtttgtctatccaaaatattggtcattctagcttcttatctgcccctcctaatgcttatcctcttcttttacataatatgcttcatgttcctgagataaccaaaaatttgattagtgtgtccaaatttgctagagacaataatgtattctttgagtttcatcccgatttctgttttgttaaggaccaggtgcatcaccaaatcttgatgactaggagataccagaatggcctgtat

SEQ ID NO: 386898 - DNA, 1309 bp, Cannabis indica
aggatcttactaaatttaataataaactacccgcattctatgttaggttgggtcgttaaggcatgctacttcactaatggatcttctttcgaggctaaacaaggaggttattgctcttatgtgcggagaagtatcctttagggaaaagagcttattgagcaaggcatccattggcgtgtgaaatcagggaggatagtgagaactaatgaggataaatagctgccatgctctaccacctttttctctttataccgcaactattgttgccctaggaatgaccatatactctctcaaaataagtaatggaacctgtaactcagagcagattgaagaaacatttcaccaagatgatgttccacctatacttgatttatctacctataactcaagtgcggatgatgatctagtggggcattatatgcccattattctgtattcggtaaatagtggttataaagtttttgatttgaccctgatcatggcaaaaagttccttgagccaggttatggaaaaatgatggactgagttatggcatcttgaggtccctcaaaagattaaaatttcatatggcgtgtttgtaagggttgggttccagccaacgcaacccttcaatggtgcgaaattatagctcataggtttgttttatcctgcaagttctcacatttagaaggcattctcattcacgggtctcttcaatcgaatatagaagatcctactgatcttctccttgggattcatcaacatttgtccaagtgttgttggctctcattttcactttaaccaggctcgtgtggagctgttggaaggagagaagactccatcttttccttccaaatacagctcattaaattgagtgggcaagacttgaaattgcagaactgttacaacaacatatttccactaatcctccctgctctaaacatcaaatggtgcctagatcaagtgggataattcgcccttggtttcttttgtatcaatagtgatgcaagtattctagtcaagcagaactattgtggttttggagctgttatccgagactatcacatgaaagtgattgcaacaaccatttgaaggatgaagggccaagttatcccaagttttgcactctgacgtgtcatcacatgaatggtgacacatggaatccacttggaacatctgctcgggaactatagtccgagcaggatgcctcgctggcatgcccagagcaaagtattcagcaatccgcgcagagcgaccaaaacttagcaaattcagctttctcgtcgtgagtaatcagcacaatccctataactcagggatcaatttacgt

SEQ ID NO: 386899 - DNA, 2387 bp, Cannabis indica
aataagttgatcatgaccaggatttaggcgtattatgcctaaaaaaaatatgagttaagatgtaaattgatctcaaatttaaaaattaagttagtaaatgagcttcaatcatacaacaaatagctctctataataaagaatggatagagagtcttcctagtgttttttgctaatttttttagcatttaatcaaaagtattattagttttttattattttattaaataaatttatatttagtaaatttaaattataaaatattattaaaataattaaaatactagagaacataattgaagcaaagataatcatttatttaatttttttttaacattttaattaaaatttactaaaaaaatgacaaaaccttagagatggtttaaccacttaaaaattcatgcatgatgcatagatagtaaatcactgcatgtactactgctttcttgccgtgtagtttgtcacaagttttgaaatattacatattaattcttcttaagaaccttaaataattattctacttaactacaaccatatatacatatttataaaataattaaattttagcatttagtcacttgtcaaaatattaatacaaccatatatacatagttagacaattcttaataccaacaaatatagagaatgtaaacaattttatcataacacatttagatcggattattgttaaattttagtttgacaaaaaattagttcatgagggtcctatttgtacccggggcggagccaggattgaattgtaggggggaccaatagcacaagcaatgtatacgataacaagacttcatatatagtgattttaatgatcgacattttttaccgaatgatactagctatttatgattgatctaatatcaatcacttaaattaatttaaaattttacaaatatttttatgtaataaaataaaatacataaattaaataatccaataattaataagatttacaagagtaattaattatcaacctgtattgactaaaaaatatttttacgtcattttaatatttaaaacaaataattagcatatttaaaaatagcatctggctaactatagtaaaactaacaatattatgaatagtattaaaaaaaataaaaataaaactaaaacaatgtataatagttgaactaaaatttaactataatgtatatatcatgaaaaaattaaactaaaatatttttttcgttgacgaaacagataaaaaatttactagaacaattcataaggtctcctacaaaaattcaaataatatttattataaaaattaattatcattaacattaactcacattttgttaaaaaaaacttatttttagtatttattttaaaatactatatatttcacatgacatatatcaccagttatttacttaattactatgtccatataaattttagactttttcaactcactttttttctatacatataatatatttattttaataaaacaaagagcttttatctatgtatatatgctaattatattgatgtaaaattgagcggggcagggccaccctaaatttgttaacacatctgcgtgtactattttaaaaaatacatgatttattatgtcatttaacaaaatagagagtccaaatgataaattttgtaaaacacaggatccaaaatagtatttaccctaagtaatataccttggcatccttgtttgagataaggatttccctcatatccttgcttgcaacgacaacgatatccaccaccattgtgggaatagtaacaatcagtgttttgtccacacacataggaagatgatgatgatgatgatgatgatgatgatgagttggattgagcttgctcacacgtctggtttcccacaatccaatccaccacaatgataggattcttcacagcttgttggggcataaaatcgagacgcattttggatatgttaaaacttttttgatccgccaagaaagcatacccgcaggggttgaaagggttaacatgtttgtggttattgaagctactcgttgtaactgataaatacttgagatgcttgggaacagaggtctggcaacaccctaaacccgaacacgaggtttgggccgacatgtttacattttcgttgcagacggagatgcacccgctcccaaaattatttcgtgaagcgttcatgaaggcaagggtatcgcaaccgaaagcaaagagcttgttctcagaatctgatagggtgaaggacttactcaaacgtatcgagggtgagttttcatgaattaagataccatccctatggtaacagtcgtaggagtagaaatgcttaacactcatgatggccttttccacatcaatcttggtaacttctaggcctccatattagaatatttctaattaaggaaataaaataa

SEQ ID NO: 386900 - DNA, 1453 bp, Cannabis indica
gagctaaaattataaatagtagggggtcaatagtaacatacacatcaagtgtaaattttagtgattaaaattcatttttgtgtactatatgtccattgaggaaaatattatatagctattaatttttagagattttttcatttttgtactttaaaataatttgtatttatttattttattttttgcatttttatagaaagttatattacaacttacatagcaaccttttggagtttgactcaaattagtttttttctttatttatttatctatatttgtaaagttgtaattttttttaggtaataattaattatgggaaaaggaaagtcttggtggcctagttttgaaaattcttcttaaggaagctttggaatgtcttggtccccatgttgtcttgatgtccaagttttataactttataaatatgtattttgtgtgagaggtgtgagtgtgaaaaagatagtgagttgtgaaaagagaagtgcgtgagttatgttatgtggtgagagtgaggaagaagcaaagggtgtattgggatttgggtggagagattgagatagagagtatatgtaattttgaaatgataagtgtaatatatctctctttgtgagtttggtagttttaccaaactgagtaaattgctttgtttcgtttctttgttatttcgctacgcttgaggtttatcattttctcaacaagtggtatcagagccaaggttcagatgatcaacgcaaaaaatgtcaaagatggtgtcttccacaaaatttgagatcgagctttttgatggaaagaataatttcaatttatggcagagtacggtgaaagatgtatttgtacaacaagggctcctaaaggcaccgcatggaaagaaacctgggaatatgactgatgaagaatgggaagagttgcaggaaaaagcggtaagcactatttgtttaagtttgactcctgaatttatagtatagtgtattgaatgaaacatgtccgtctgagttatagaaaatattaaaaaagctttatacgttaaaatccctaacaaatagattatatttgaagaagcagttatatgagttaaaaatggttgaaggagaagatgttagggatcatataaatagatttaataagtgtataacttaattgttaagtgtagaggtcaaaattgatgaagaggatgaagctattattttgttggcatctttactaaaatcatatgagacattagtgactacacttttggttggaaagactactttaattgtggatgaggtgtcaactgctcttttggagacatatagtatcaagcaaccaagtgtgtctcatactgatcaatctcttgtgacaaggtcaaaatcaagtcgtggtaggagtacatgatcaagaggaagatatgatgacagaagagacaatcgaactcattcacgttcttcgagggaagtggagtgctactattgtc

SEQ ID NO: 386901 - DNA, 1211 bp, Cannabis indica
actattggcataatattaaatttaatatatctaggcatattgacttctctaatttatggtgaaattttgaagcacttatagaaattagatgcttttatatggacatgtgaacaacagagggcggagtggatcaagttcttgggaagttttgtaaacgttgaggaaagagccaatcatgtgtactccatcgtaagaatattttcaatcaatctttctaatttactttaatataaatatatatagattatgtgtcaatgtatagatttattatttggaattattttaaaataccaaaatcaaccaaaaatttatgttcttttacggaattttgaattattttttatttttgcaaattttttttattaaccgttgtttatacgattatttttaaaaaattgtaattttcacattgtgaaaaaaataatataatgttacaataatgttaaaacaatttaaaatcgtaaaaatgtaaataaaaaaaatcataaaaactgtaaaaataaaattatttgttgatgtattatgtaaattttctttatttttaagccaatacagaaaaggtgaaacttttaaaattatgggttttacacttatcatttttaaattacggtcaaattacttttatttaaaaaagtcaaaaatttatgaaaaaaataaacttattaaaaataaaattgtagcataaatctatctttattcgaaaatatgggaaaacaaacttataaattaaaaatttctaaagagaaattcattaaataagtttttgaaaaaaaaaaattatgtgcatgtttggcattataattaaaaattatttttattttaaaaataaaaattattttttgaaaacattttgacttgtttcgccttatttttttaaaacagattttagaaaacaaagttacaaaaaaacaagaattttgaaaacaacttgttttctgttttaaaatcaattcttttttggtcaatattgtttttaaaaaacactaaccaaacataacttatgttttaaaaactgcaaaaattattttttattctcatttctaaaactaattttttgaaaaaaaaaaaaacaatattgtttgctatatatttctctaacttattaagaagtcataaatcatgtaattttcacattaaaaaaaccgaaataacaaactacagtttttgtttttttgtgtaatattattttatacctatacatgttattattg

SEQ ID NO: 386902 - DNA, 3781 bp, Cannabis indica
ggggttagcttaaattcctcgctgatttaccattaacccgaggaattttcctgatccgacttcaaagacacatttgagagggatgagtcgcattttgaatcgtcgcaatatctcgaacattgatcgcaagagattttacgagcatatcgtcagcatataccttcatggtttcccaattagttccacgaacattatgtttaccgacctctgatatgttgctcctgcatttatcaaaccaaaaggcattaccttgtaacaatacaaacctcgatctgtaataaaagaggtatgttctttgtctggttcatacatcggaatttggttgtatcccgagtatgtgtttataaaactgagaagttcatgacctgtggtggcatcgacaagttggtcaatgctaggtaacggaaaactgttctttggacatgctttgtttaaatcagtgaaatcaatgcatgtgcgccatgagacattaggcttgggcactagtacgggatttgctaaccaatttgggtagaatgactcccttatgaagccacatgccaaaaggcgatctacttcttctgtcagcggttggtacctcgcggggtcaattttacggtgcttctgtcggacacctcgcacttcagggtcaatgttcaaccggtgacacatgacctgttgagatattccgaccatgttcgaatgtttccaggagaaaacatccaggttttgcttgagaaatgtaataagcttttctcgctgttgaaaagttagtttagaaccatttttttttattattatctaagggataaatgggtacctccatggcgtcttccgcagcttgggcggtggtggtataattgaggacccttggatccaagtctggcttttcttcatgcggtatttcctcaattctaaacacctcatgtcgaggaggtggtgcttctaacatgtaaatcatgttaactgacttctttttcgcgagctttaatgccgcgttgtaacattctcgcaagtccaattggactcctcgcacagatcccactccactaggagtatggaatttcatggtaagatgatagatggatgtcacaatcttcatctccttcaggataggcggccaatcactgcattatgtactgagtactggtcaataacgaggaagtcagccattaacttagccacgacaggtgcggttcctagagtgattgggagtttgatcattccctttaaagcaatggtgtctccggtaaaaccttagatactcgacacgactggtcgcagatccttctcatgcagtcccatttgcttaaaagcttgaaaatttaagagattcacagaacttccgttgtccactaatatgcggtggacattgtctcctccaatgttagcgacgataactagtgcatcggcatgtgatggtgagcccatctggcatcgctttccatgaatgtgatatcgtcgcatttcttcttaaacagtttttctggccgctcactcagattgttcacattggtgagtggcctctctcttgccttcttggcatattgctcctgtgatttcctgtgatttattgttcacattctgtaagtatcacaaggatattggccatactactctagggctcctccctctggagctttttcctctaggactacgggatcgtgattgcggtactggcgactcgcatttatcctttcctttctctagctcggccagagaattctcaatccttttatgtgattctgccatagcaaaaaactcgaccaatgattcaggccttcgggcctgcagctccttccaaatatcagttcttggtaggacacctgttatcaacatacaaaccaacaaagactcgggggccttctcaactttcgttacttcagcattaaaacgtttaaagtaatcttgcagggactcaccgacctcctatttaatattagccagagtggtatagggtggcctatacatcattgtggcctgaaagtgcatgagaaaaaggtcgacaaaggtctcccatgttgatatagatgcttcgggcaattggctgaaccaatcatgggtattatcctccagggtcacggcaagaatgcgacatttcgcaagctacggtacctggtccacttccataatagtattaaatttttctagatagtctatagggttaggggtacctttatacttcaaagactcagacaaacaaaatcccttaggcaatcgagcttgtcgcacttttatggtaaaaggagaagtcccatgcagcttgtatatgggctttctctgctgctcgattatctttaaagcttgcaaaagtataccatgatcgatgcctcctgtaagggtgccgttgccctgattcgttgcagctgcagtttccacaacaactataatcgtagggataacgactccagtagtcgcagctggtgcgttaggcgggttggtgtggttgtttatgccctgatcgcccaaacggggaccacgagggtcttcatcgttccaggtcatcttggaacgcgccctaaaaatagcgttaaggtgatcacaaagatcgcccctatgaacttggtatctccctccttgcggtattttcaccgaacctgacctggtgtacctgctatgagtacgactttgtgaagacgaagagccggactcaatgtcattctcctcattttgtggttggggtctactgcgagggttacgtcgctctggatcttcttccgattgagcctcgcggttgaaatttctcgcgaattgatcccttgacatcggttgatttaaattgagatcttcctgacctatccttcgctccctgcgagatcggttagttcgtcgtctagatgttgttacctatgggttatccgagcgggtagtgggtactcgaggaggactccgtgttttgttctgtccgtcaatttcagcctgcaaagcttgcatttggtcctatactgtcgggtacttgtcggtagttaattgaacaatgcctttagacaccacagcaggtgtgataagtgggaattgtcctattgtggttgctggcgtggacgtttccccaatgtgagcagcagttttgggaacaaattgagtggccttacgctcgtccgtcctactctgtcgttgatggtatcgatgggaggtaccctatttcccggaagtgggacattcatagtcccaatgttgattgatccatcattggcgtctccatttgtctgatttccaaccattgtgattcttcttctaaatcaacaaagtattatcgttcccacagaaggcgccaaatgttgttgaaggaaatttttacaacaccaaaaataaatactaataatgttatatgaataataagtgcaagtactcgacctagaatggcgagtattcaaattaagaacaaaaatacttagccaaagactggaaaaataatgaacaccaagagaatatagtggtttagtcaaatctcggtctgcttagtcaacaattgcatggattctgtcttgtttatttcatggtggatcacccatttatatacaaagcaagtgtcctatcatttacacaaggatcgcattcattatcaatctatttatacattgaattacaataattaacctaaaaaaagtaaacataataaatgaagaacagtttccagcttaattcactaaatacagcaacgtatgcgacttctacagtgcgagttggatattcatattcttgcatcagctcgcaggcttaggatgcattcaagactagtcgagtctaggatgtctgcctcctttcaaagtcgcttgtacggactgttgggttttgtgcccta

SEQ ID NO: 386903 - DNA, 2288 bp, Cannabis indica
aaacatagcagtttttaagaacattgatcctatacagctgctggtttaagcttttaagattagtaatattcttcttcctccaagcggttagcacattttcctgtaaccatccttgaaatccaatagttgcaaaagcaaaatagtttagagcccctattactagtctttgagtgtttaatgagacaataattgtgatcataaagaactccccatctgtaactcgcttcaatgtttggaaaataatcaagccaactttcattagcaaaaattatgtccagttttgaatgaattctgatccgctcctcatgtttgttagaccaagtaaagaatgagcctaaagctttgagttcttcaacctgtccctgagcaagcagttttgactgtcttggatctcaaaatccttgattttcctgccaccacatctatctttataagcgaacatggcattgaaatccccaagaataatccattgtttattccagagatccttcctttcatttaacatgttactaccataaacggctgtgaggtaaaactcctctttgaatccaaccattttgagcttatagtggaccatttctctatcctccaaaaggacattcacttcaaccagtttatcaatccaaatcaacaggattctatacgaaatttcttgactagaatagatcttccagtttgggttattagaaatcagactagtaactttgtcatggttaattatggtctcaaagagagccctaaaactaactttatttatcttacaacaatcaaataactctcgctgcttctcaactttatgcagccctctaacgttcaacctagaagattgatgttatccattaaacaagtttaagaaaaaataaaaccaaaccccctactgcttcattcaaagcatcataaccattactaattctagcttcctgctgtgttcaaataacaattttggaccccttcctctttggaatgacccaactcgctgcatctttactctcttgagcattcgaactctggagtgcctgacttggttcaccctcattatcatcctccctttttctaagctattgttcaaaatagcctttttcatgacagcaactgagatatcttcattattcttctgcagtagcacactcccaggctcatcatctttgtctccattttttctcttatccccatgctgttttttcatccatgctactggtttctctttgttgcagttcaagatattatggccaagcaagttacaggctgcacatttagttggtaaccattcgtattcaacctgttgctccacaagttgattcttctcattaacaaaggcaatggatcttgggggttcatctttgatctcaacatccaccaacactctagtaaatttaatcatggttctttctagtgtaaccttgtcaggtgttatgggtttttttgattgtgctaataagagcacttaaattcttcttccccagtattgaaggcctaaaccattcaaccttacccatacgggaaccgatttaatcatttgagaagtatccatgtcttctgaccaaggtctaagaacaacaagttttttatcaaattgaataacctcattttctaggattatgtcccttgtaacttcatctttgaaactcgccaaaataaaaccataatgcattctaacaatcctttccactcccaagttctcccaaattctcttaataaagccttcgaacactttgaacggtggattggcctccaaaaaaatacaaacaatcgaggatctccaataagaagcctcaacttcaacttcttctaaatcaagcttagcgaccacctgatctccgattttcaaaggctcagtaaaattcagttgggaagaaggagttctcacctgattaaccttgaatttgctccatgccaccttgaccgactcctggaaatcaatcgcttccacctcatccgcccaactcgttacagtaggggttgacttcacaaggccaggttccatctcctcccattctggttctagttcttcacaagggtccaaaaaaacctctgtacgagcagaggcttcttcttcttggattaaaggaagctcaggactcactctcggaatggttacactcttcaaactagacttcaaaacaccttttctcctcttcgctatgggaggaagaaaggagcaacacacgccctccaatacaaataaataaatagataaaatatattttgaaaatattctaatttaaattgttctgaaattaataaatttcttatttaactataatttttatttaattaaatatataaaa

SEQ ID NO: 386904 - DNA, 750 bp, Cannabis indica
taggcttacaatttcttaactaaggaggttaaaggacaatttggatattttatattttagttataggtggcatcttttatgagtggcatctggccacttattttctcagctaaaaataatggattacttaggattttcttagttggaagaaattaagaaaagaaaagtcaaaattcaagaaaacataaaagtttccgattctctctctctatgctcgaccgccacaagaaccagcaggagccagccctaaccttcactattttttggagatttagcaaggaatcaaggagtttcaatctaaggtaaaaccctatagatatagcctttgtgttgtttaagttttaagtttggttatgcaattttgagatatagtggttgtttaggttaggttttactctaggttgttttaagttagaattaattgtttgttgttaattttgctggtttgtttgtggaatgggcaagtttgagcttgtgacctcatacttggctcattcatggtagaattggattcatgggttgtatgtttcttttatcgattggaatatgttgtttgaggttattataggtgttctggaaagtttggagaagtttggacacattttcatcaagaattggattattttgggttacctagtgcaaacaggttaaccggtttgacaggtagtgtaaaactggttaaccggttctgggacaagtttctcaaacaagccatttcgtcaattcgtgttatttttagagccttggttg

SEQ ID NO: 386905 - DNA, 733 bp, Cannabis indica
aaaattaaaaaaaaattaacaaagacataataatcaattaaaatttgtacggaacaaaaaatatcgaatattgaagtattattataaggaagaattatgaggataacacttgctatctaaatttctacataatgatgtggcatccatctagatgacatgtgcaacacattctgtaaccccaacgggaaatcctactcttagtaagtcatacaggatgagttaactctcaagatcacaaacaggggttgtgacatctaaatagagtatgcatagatagttgttgacctcaaaaatttatcaaccgacagcagagtcatataaatcagatatttgctatgtgttacacaattagagtaagaaagtaaaatacagacaaaattattatagaggatcagcccccttagatagcaggtaatgacctactccccttttagttgtattgatacagagagttaatactattaagatcactataggtgggatctcatatagtgcccttaaggatacaaagtagaaatcaagcttggcaaatctaaagtgttgagatagcttatcggcatgagagagagagtgagaaagagagttatcggacttaagatagtttatgacttagttatcgcttcttgacttaagtgttctaggttagagttaaggcctttatataggcaaacttaaaccttagtgtacaacgaaaaccctaggatatttgtatatttaattaattaattataaa

SEQ ID NO: 386906 - DNA, 671 bp, Cannabis indica
aagaaaaagaaaaaaaaaatttatcattttactttagagattataatatattatacttcatgagatgatccttttatataccttagattagttgagataacagttatataaacgtgtaagattttatttactatattagacagtactgggcattgtattaattgtggtactgaaagtactctgagtctcactcattaatatatattgtcaagtaacgattatacattaatatgaaagttttgaacaattgacgaatgagtcatgttcttcttcgaagttcccttagttttcgtacgatgctgctttagttgatcaatattttctcatcattcaaagttgttcagttagggagtgtttgatatgagattcagacttgataataatgggaatgtcaaactaaattaatttttaatatcaatggaatttgtgtttttcaagtgaatccattttactttttaagttaaaatggtagtaatgttaatctccttcaatacttatatttgatattccctccaaatctattatttcaatctttactctctctaaatcaaactcactaactcacgatttcaaaaaaataaaaaaaaaaaaaaaaaaactaacagtaactcacttaataaaatttgattaaaattaatgaaaacatatattataaaaatacaaatgagatt

SEQ ID NO: 386907 - DNA, 3187 bp, Cannabis indica
caaatcctagtaaaaacatctttatttttaatgtatactttacttttgccccccaccacaaaaaaaaaggtgcccctcaattttagttctaggtccatcactggttgaactaacacgccaaatattataattactccaaataacacttaatttcaattacacgaggtgttataaattttcgttaatcaataaatgaacctcaatataataaataaattataggatgataatgaataataataatgaatataaacaacaataatatttttaacatagttttgaagttaattcttcatactctacaagagtccatcttatttttaagatttcacagtatctatagaatacgagatataatatttgtataagttaactcttcatactccatgagagtccatcttatttataagatttcacagtgtttacataatacaagatataatatttgtatggttctctctatttttagaaattggttgtccatttttctttaggttctgtccctatttataggagttttaaggtgacacttattctcttgagatcttatcataatagtcgttcatgaaacgtgtgtaatctccacatttcatattcacaacacatgggataaaaatagaatcactataattgctcttgtctttatctataagcttaagcggttatgctaactatacttcttctcctcgcaacataaatgattatcttaggatactttactttgaagataattgtttgggcctaagtataatttgggaagtacttctcgcgtccttctgtaatattgagagagacaaacgcgaggcactgtcatgtgataattccaagatgaattatattgagtgtatttctcatagtctttcaaaacactcacgatacgtgggtcaataagctgcaagtttttaaagaacttgttatctaccctttgcaacttattgtcgttcgctgtatactccatgttatcaactttttgtgttgactgttcatttcgctagtcttacaaagcggtagttgttattcacggctcgcccttatctttgaaagaatgagttcaattgtactttccgaggagagttatttgaatgtagttatttcttcataatctgagctggtttatttttcaacttctttatacgtgtcataaccatattgttggctcaaaatatgggtataccaatttccccttaaaaaaataatttttaagattaaaaaggattttttaatcaacaaagggtacgatcatatttttccctttaatagaaaatgcatgcttcattttggtggttcagtatttcaagaaaaaaatatcatttatgaatttattaatctaacccttcttttcctaagagttcccatctgttcgatcagtcatcatcacgattgaacgattaccattgtaggaataagatcaacaacctccttgtattttgctatttcccgttttactgagcttcaaagaatttcaaattttagtccccattttctctgaaagtgcatgccctctttgtctcttacattatccctacaagtctctaccactttttcctcaaccccgatattgttacaaatcaaacccctggaataataagttcttagtaacaaattctccaaggcttcctttcaaccaacaacccagtaagtacacttctattctaattatttatttttctcttattgttttctatatattttttgtatcgtcattttcttgtatgagattatctttatatgggtttttaacaacttaaggttagagattaaggataaccgatttataggccctgagtttttactgtatttcaagaattttgaggtattttttcttttaatcaaggcaatgcctcattctgatcaagattacaaacacccagaccttgtagaactcgataatcctcaattccaagcaattgtttttaaaccctacattcataaacctcaatccatacctgagatactttacgaaaaaatagaaagcattcccttagggctagtcaagaagaaacattagcttgctatagaaaatatatagatgagattattaaaggtagacgtcattatctgcgagaagtagtctggcctgaattgcccaatttagtaaacatccccttagcgagaccattatttttaccccgagtcactattgcttttttaccaagtgatcttaattttgaaattatggctcctaaagctcaaaagtccaagatacctcaaaaccccgatgttacctttgaggcaaaattaattgaatctaaagttaggtcaattgcccctacgtgggtcctttctaagatcttgcgacattaaaaatgaaaagggatgttgtatacattcagtcatgcttggaaaatttagttgctttcccccatctcgtctattgattaatgaaggctgcagtaccagcgactcttcaagaattggagcttagagcgtcgagcatgttaaggcaggggttgtccttccccttaggcaatatttcaaggacttttgcaattacattggggtcacaccttttcagcttgtcctgaattcttataggatcttcacgtgctaaaagccgctttatcatatcctagggtgggaatgttcaatcccctttgagattatatgcttttatgcgattaaggcatgccttgcgagaaagagttgcttaggtggcttatattaagtttgtcatgttgaaagaacaatgtccgaccagtgctgaagagttggaagaaaggaaggatgtaccatgtgcaatggttttatggtgcataatctatgtaatggtgagcactagactggacacagctcattctctaagcatcctaagctggttcatgtcaaattcaggcattgaacattggaaggctctcaaatggatattaagatgcttaaagggcacatgtaattatgttttaacctacgagaaagctaaaggagtgttggaactgaaaggatttatggatgcgaattatacctcgaacagagatactagaagatcaagcacaacctatatgttcatgataaaccagaactatatatgcaggaaggcctaattataattagtggttgctctttccaccacggaatcagagtttatggctaccacgaaagcgttaaaggaagctttatggcttcagggggttttgtacgaattaaaacaactaaaaggaagagtgggtgtgtactcagatagccagtcatc

SEQ ID NO: 386908 - DNA, 616 bp, Cannabis indica
aaatcttattaatttaaaattatgtttgttaattaaaaactttgataaaatactcacctccataaatattttacataagataaaatgtcaattgaagggcaagtttgtttagcataacttttttgtggctaattatgtaatacaattagtaaaagcccaaaaacattctcactttttatataggctatagatatatgatagtaagaccatgttggttttttgccctatatattttttttttgatgattttcatgatgttttttatggttatttttgtcatttttatgatttacttcattggattacatctaatggatttagacccaatcgatctaatttaattatttattgaatattgaattttgtcatccgatccaatccaatccaattgagtcatccgatccgatctgatccgatccaatgaatatattggattaaatcggttccaaccattggatgcattgatttggttttctattggattggataatccaatccattttagctaccatgatttcattaaaaagaaaaatatttataaaaaaatataatttaaaatttaataatccaacatacataataaatattagtttatccaacctaattctcatgatct

SEQ ID NO: 386909 - DNA, 1134 bp, Cannabis indica
aaaataataaaaaaaacttcaaaagtaattaaaattgtaagtccctcccccaaactaaagattcacattgttcccaatgtgactaatttttttttagtcaatcagtgaaatttattactccacaaatatcaatttacatcctacaagcatcttcatccgaagatctgatttccttctatatgtacaatatatgataacaatgtataaccatgcaacaaaagttgttaacaaatgtttgaaaaccaaaaagtatcagtcgggttaacttgtttgggccaattgcaatttgctcttctcttcacatcttcttttgtaacactaaccacttgctccagtgattgctttgctgaattccataataggtcatttcgggtcctctatagttgatacacaatggcagcaacagcagcagccaagatcgccttcctaagtctgctgattttggctcgttctatccaccttaacaacctgcataaggctattgctttaactctctagtcgagccaatattttacttgagataagcaaagattagagaaggagcaagagaagaaaagataatttgaagactctgtttggtttttgcagaacaagcaaaaatcttcaccaataatattgagtttatgtagcctttctctagttctgagcctatcttggactgcaatccataagcaaaaactgtgtctaggaatgttaagtatattccatacctcatggctccaattcactttcctttggaaaggacaaagtgctttgtaaccattaaagatcttgtattgaacagatgcaaattacttaatgtccatagaaggtctaacttgatatttgacaacaaccaatttcttccaataccaactagcttagggtggagctttgtagttccaccaattctcacccttaatatatacacagtgaatccatctaatccacaagttgtcttccttattcgtaattgcccacacatattttgtcatcgctgctatgttccattctgcaattattttcaaactgatccctccttcttcttttggttggcaaacatggtcccaagtaattggtccagagcccaaggacaaatgatggcctttccacaagtaagcacggcaaatggcttcaatatctcttatagactta

SEQ ID NO: 386910 - DNA, 1532 bp, Cannabis indica
  modified_base (1213)..(1213): a, c, t, g, unknown or other
tttttttttattattttaaactaagattacttaaacatttatgctacctaaaaaaattaaacatttataggattttttttaagtggaacacttataaatttaatatttattaaaatggtatttttagaaacatggcagagacaaaaaattgaaagtgatagtgatggggcgtatgggaaaaaactctcagacaaattaatacatgcaaattatagatctgccacatgtaaaattaatcgagggggcttattatttacttttattagttttgacaaacactagacaacttctgtcaaacaaaaaatcaaggctatttagtaatttttctctccaaactttaatatatactaaattatatttttttgaacttttttagccgttaaaaattctctctgaactatagagattattagatttaaggccttttgtctaatttcattcaattttactgtttcactcattgtttatgtattaaaacatgctcccagactttaatatctaccaaatcatacccctcaaactttgatatgtattaaatcatactcctaaactttcatccattttagaacttttttactaaattagatcaaagtccttaaatctaacaatcttaatagttcaggagaaatttttaacggccaaaaaattttaaaaggcataatttagtacatgtcaaaattgaaggagaaaaaaaattaattaaccaaaaattaattttataaaaatgtacacaaaaataaattttatttaaataattaaggtaaaacgtagtgtcaaggactttactcatttcagactttagtaaataatttttatcaatttcgcttgatgaattagattgtaattactttgtatactattattactattatattattatttttgattatctatttttcatagagtaattataattaaataaattaattaaaatagaatgagaaaaataaattaaacataaatacaagacatatatataagcgaattattttaaaaaatactacaaaaataataaaaaattttatgtttcaagtctctctccctctccatctcagtatctctctcaaacttctctttcaattttttttcttaaatatctttcactcctaatttttttcttttgaaattttacttggttttactaaatcaaatagctcataatttatacataaaattagatctgtgatgatttatcaaaagtaattttttttancctttagtgttcgactgggttcaaagggttttaggggatacaaacggatacaaacctagatttgagatctatttttttggattttatttattttgcattttataggtgtttatatggatttgaaaatcgtaatagtggcagtagttattgcagtagctacggtggtgatggtagtgggggtgatttcggcggtgtggttgtggtggtttagagaaaatgtttgtagtggtggtcaggacgggcctgaaacaaagtgggtcataggaaaaaaaaaattgggctcttttgctagaaaaaatgtggtatttttcaaaattag

SEQ ID NO: 386911 - DNA, 1026 bp, Cannabis indica
tcgaacatggctcatcccttgcttttcgtactcttttttttttctcctgaacaaccacgagagaaaacttctatttttcgttatctctatttgcttacggaaaactttgatgcgccaaactcaaaaccataagcatccatagaacttttatatatttcactataaaaattggaagtatatattattaataagatgagcataaaaataggagtctcaattattaggaccccaacaactcaaatacatgacagtcctaagagaatcctcagattgcttcaatttctcatctttggagatgttattagaatactgagctggaatcttcttggcctgagaatatgatctgagatttgcctttgtgtgttgctgaattgaccttaaaacagaattccatctacaaacgccttggtccttcaaagcttcaactactccaatacttgttgccactgcccaagccttgcttgttgaactcatatttttcctcttgaataaaattctctggtcaaattggaagtgggaaagttatgttgtgatgggttcaattgtgattgtgttgagtttagtttagtttaggaaagtttatgtggttatatagaggagtagtatgtgagggagttattgggattgaagaaagaggagcaaacctagagaccacttcaccacctgtagtttggaagaaatctgtggttttgggtgcaaaaaccatttgcttagctcattactacttccgtatttaaataaaatgcaaagtgagtgtacctacaaatgaggtggacccttatattattttaagagttatttattataataaaaatatatatcataacatttatagaagaatgaaaaaatgctttattttgtcgttttgtgaatttcttttagtgattattttaatttttttaataatcattttccttttaatttatttactagttttttttttattaactaatttagttatgcttaatgcaacaagatgtaaaatttgtattaaattttagtataaaaattaaatttataattata

SEQ ID NO: 386912 - DNA, 3452 bp, Cannabis indica
ataataactaagtaaaataacttaggggacatggttgtctagtctgcaaggccttatggtcaaagagcttaagtttgctcagtacactagtgctcatgccattgctagaaggtatatgaataaaccaagtcattcatgtataaagcgagatacctccatcgaggtattgttagaaggagttagatcttatccatgtaagcgttgactgccttaaatatggtttaaatcacagctgtgtaatataatttacacgtagttctttaatcgcgcgctcatattttaatatttgaaaatagtagtttcccgcaagttcttgctcttgcagctggaaagttggtgccatggctaaaacaaggttaaaaattcatgggaaacctggatttgctattaagatttcaaagaagaaaggtgagatgatatgctcttgtggatgtctttcaacctcctctatctcctaaatcttcattgaaagcgattcagaaacaagaggatgtcaggattgattttgtgcagttcctcagagcaaacgagaaatgtaacatttaaattgcacaaggtaagtctttgattcttccaattttacgatctggatctgtggttcgcaatctagataattcttttaagaattttgagcatggaaatagtaaggtgaagattactatggatgatattgaggatgaagtatggttttggaaaccttcgattgtgtgttatgtcttgggagcgaaccctcctttgcacattcttgaaggttttgtcaatagaatttggaaggacaaggttgatcgagtgaagatgctttcttatgaaattttcataattttattcagctcaatcgaatacagggaccagatattgaatgggggttacattttcttcaacaggaggcctgttataatgaagccctaggacacaaatgtaaatttcaaaaataagatgtgaagtgtgtgcttatttagattaaattggaggatctagacctgaagtactagtgccaaagatcattatttaagaccgttggtcagctagggaagccaattatggtggattctgtcaccaaggagagggagggattgaattatcctagagttttagttgaggtcctgatgtatgaaaattttctagagatgctagattttgagaatgaatttggcacgaatataattaatggggtaaaatatgaatggaaaccagttgtctgtgcacattgttcaagtttaggtcatattactgtagattgtaagaaaaacccatcagagaaacaacaatgggtcattaaacaagataataggaaacaagttcaaattgatgaagagggctttacgaaggtgacaaaagctaggaaaattgaaggtaaagaaaaaatagttgctgacatagctgtgagtacacagttgtgagtaaatctttccaggctctcgattggaggagatgacaattgaaacaggggagaatatgctagatgaagggatcaagacaggaggaggggggaaccctctctttcaaatggataaattgttatgttggaatgtctgaggagccaatagtcaacataaacaacaattaataaagcaatttattaatgttcagaaggttgattttgttgggcttctcgagactagggtcaaggctccaaagcttggaaccttgaactccaatgtttttgagggttggtgtttctcttctaacatagcatggcatgcagggggaaagattgttatttcctagaacccttggaggtttactgtggatatcattagatgcactggccaattaatgcatttaaagatatcaacagtagatggtttcaacatttttctaaccatggtttatgcttctaataatcgagttgaaaggagacttttatggaaggatttgtgtgatttagctactgctgagaattggttacttatgggggactttaatgacattctagctaaagaatagaggatcggaaaaagggtaaaatcttatcctaactctgatttctggaaactgtgtcaatttttgtcaattggaagatgtcaaagcaacctggagaagatagaatttgttccaagattgatagaattttagccaatcaatcttggattaataaatttcaatttgtcgaagcagtgttccttaataaaggcttatttgatcactctcctggtgttttaactttgtatcctggtttggtgagtgggtaaaaaccattcaaatactttagaatgtggaaatcacatcctaagtatgacagctgcctgaaggaagtttggaatctgacaataaagggcactaggatgtttcaggtcattactaaaatagaatcactttaagtagcagacttaaggagataaataaggaagggtttttggttttacagatagctgttagcaggactaaattggaactggacattttgcagagccaaattcaacaacaaccactgaattccaatttacatctgtaagagaaggagacaagggagagattgactagagttcagaatgactattcttctttcttgcaacagaaagctaaagtagcttggattcaaaatggggactataattctgctcttttccatgcttgtattaggcataggatgagacgatatcaaatcctatcgattgagaagcaagatgggagtagggtgcatgatccaactctaattactgaagcttttttgaacttctatatagggctgttaggtaccaaaatggagaataaaagacatgttgaggacaaaatattggccagaggtcctgtgataacaccagaacatgctacattgcttttacaaggattttccagagatgaggtgaagaaggctgtgtatagtatacctgggaacaaatctcctagacatgatggattttccagtagctttttccaagataacttggatgttataggggatgacatatgtgaagttgtactatcatttttggagtcaggtaaaattcttaaagaaattaattctacaattattactctagttccaaagattaaaagccctaactttgttaaagattttaggtcaattacttgttgcaaggttatttataaggttgtaaccaagcttttgagttctagaattaaaaatatcctccctgaaatcatatctcactcctaagttggatttattaaagggaggtttatagggcataatataatgatatgtcaagatttggtgaggcattatagtaggaaagctaataagccaagttgcatgatcaaacttgatctccaaaaagcctatgataatattgagtgggatttttttggaggaactactagtagggttaatgttccctaggaagtttatgcagttagtaatgaattgtatcataacttctaaattctctcttatgtttaatggaacattacatggtttctttgaatctaagagaggacttaggcaaggggatcccatgtccccccctgttgtttgtattgggtatgga

SEQ ID NO: 386913 - DNA, 1358 bp, Cannabis indica
ataggtatactattcatctttttgcttttctttgtttttccacgtagtttcctttttctttttcctgtgttggttttttttcctgatcgttggcagcagctaatgaggctgcaacaaactaaaattcctcttataactgatcactgacagcagctaatggagctgtaactttctgcaacagtaaaaaccaggtacagttgtgcaaaccagtcggcatcagctggtttgagcttctttggccaattgcacaccactctattcttgacatcctccttcgtagcatgtacaacattatcttatgctaatctccctgaattccatagcacctcatttcgattcttccataaatgatacaacaacgcagccattgcagcggttagaactgccttccaaaatctggtcattataactctttccagccacctgcgcagcttactcaaagctgtcgctttgactctccaacctagccaagatttaatttgagatagacaaatagtagagaatgtacaagcagaaatcttctccaatgatgttaagtttgtgtaatctttctctagtgctaagtctatcttggattgcaatccaaaagagaaagctatgtctaggaatgttgagtctattccatacctcatgactccaaaataccttgctttggggagagcaaagagacttgtagccatttgatatgttgtatttggggcttgtgaattgttgaatgtccatgacacctgtgagttaatctttaaccgcattcaatttcctccaatactagcttgcttgaggtggagcttgataagcccaccaatcctctcctttaatgtatacacaatgcatccatctaatccacaggttatcttctttgttcgcaattgcccatacatactttgtcattgccgcaatgttctactttactattcttttcaaaccaattcctctagcagtttttggctgacaaacatggtcccaagctattaaccccgggccttgagaaacatgattgcatttccaaaaaaaattagtaaataacatattacaaataatgattccgattatttttcatttattatgttacatttctccattaatttattcagattctgaatactatatagtaaacgtgccatgagggtttcagggttttgggaatagggatgggaatggtcaggggaatgggaatgtgcatgggtcagggaatgggaatggggattgaaaacgggaatgggctgggaaatgggaatgggaattggttggggaatgggaatcagaagagaaataggaatgggaatgggaatgggaataggaatgggaatgcgaatgcgaatgtgaatgggaatgtgaattggctggggaattggaat

SEQ ID NO: 386914 - DNA, 678 bp, Cannabis indica
atactattattattacttctttggataccatatagagttgagtacattttaaagaatgaaattaaacacaacaattatttgtttgtacatgtttcctgccagcaagtactcctagaaatccaacaactaagggacaaacctaattcaatgaagaataatggcaggtctctaataatctttgcttttttttttttttaagattcatgacctaattcactactatattatatatttacatgtttctttttattttaataaatgaataaattatatagattaggatgtttaattatttaacgtacgttataaacattatatatatactgttgttaattaataaactaagactatatatatatatatgtagatataaagagatgattatatattccatacaccatttatatataatgaactactataatctctaaattaactaataataactttctcaatatatatttgttctcatcggatgaatagtgtgacattagtcaaatctatttaatttctagaaaaaattagtagtatcattttattatcagatagactaattaatatatatatatgagcattattaatttatttttacctccctatgttaagtattatattgttgataaatacttaaatttaatttttaatggtaataatacttaaattatatttttaaaattt

SEQ ID NO: 386915 - DNA, 1592 bp, Cannabis indica
actaattctctgccaagcagtagcgttccaaacccctttatcataactatcatgaagtctatctaatttaccgaaaattcaggctggcacataagagtgggtggccccagagtcaaacaatacagagaagtaagagttgttgaccgagagctgacctgtaacaactgagggactagcttctgcatcagcctgagttaaagtaaacacccttgcttgagcgggttttgcagttgacttcttctcctctttcttaagctgcggacagtctctttatagtgtcctggcaacccaaactggaaacatccttgttctctacactcacccaaatagtgtttcttacaattgggacactccgagtaagtgtatatggtttttgaaaaaccccaacagttgcctcgacattggttccctcaaaacctcttattctgacctaagccaccgggtgcaaattgtgccttttgtttgtgatcgctggttgagccactaccacttctaccataaccagaggtagtaggagtagggcgtcctgagtccctcgagactcctgggttcactcaactgcaccctcagctcgcagtgccttttccaccatgtcagcataggtggtgtagtcgtcagtagtaattataagatcatgttttatttttaggtttaatccatcaaggtacttttctttcttgctaaaattggttggcacaatttttgaggccatcctagccaattgatcaaactgagttgtgtattcggtaacactcatattctcattctgggtcaactgagtaaattcttttctttttgcagttctgactacctcgttgtagtactttgcgttgaacaactcctagaactcttcacaggtaacagtagtaacatcacgagtcagagataccatgtcccaccaaaccagggcatcctcttggaactgaaatgtggcacaggccattctgtcattgtcgtgatgcccataaaattcaaaattcttgtaataaccgtcagccactgctcgactttcatcacattgagacctcctagaaagactggaggtgcctacttgcagaacaattcatacagtggttccatcctattcactacagcaatcggccctacttgcacagcaggggcaagagccatctgcatttctcgagcaagcattgcatgagcaccatgctgttgggctttgtcccctaagtaaaactccattttaatgtaatctttatcatttaattatcaataaagagacataagtattttcatcacttatttattgtgtcattttgttcatgttatcctttatatgcttattttatttataaattcatccaaacccttatcacattgatattcttatttattatgtcgttagcatagtggaaagtaatcaagaatgtgtgatgaaatatatattcctagatttatcaatacacagggtttaactgatatgataatctactacatagtttacttgcaccttggaaaaagggtaaggcccttcccagggcattggttaaagtaaagcttgggttgaatgcatggagtatgacattggatagcaccgatgttgaacttggattagatatgataaatttaccgta

SEQ ID NO: 386916 - DNA, 2066 bp, Cannabis indica
tacaatcaaactttatatgcatttatttagggaaaaaaagctgaaatcaatcagccatttattatttctctctcatttatttattttaaaattatctctctcatacaaaccaaaagaaaaaaaaaccgtaaaacctaaaacacatacatctgccttctctcttctctctctctctctttgtttctcttgtgcggtgccaacccaggtggggaacgaccatcttcggtcatcagtggtccaaagggactaataaacaagatttctcggccccagtaaccccgaacctccatccccacccttgagctctttctctcatcgtctttcttcctctctctttctttcgttctctcttcatcaagtccagccaaaccagcgacagacggtgagctttgacgtgtttgtcaaggtgtagaccaatgacggagatcccaaaggttactttgtgtgcaactcaatttctctatgtttcggtgtctctttgacttgtctacttatgcgatgcagatttgagattcccattcgaagtcccatggtcaagatttgaactactgtcacctctctctctctccctcttttatgtgcaggtggatggcattcaacggagcttcgtattcaggggttctgtgtcgacagagcttgcgacttcatgttcgtggctgtttgattttgtgtataattggtttcaaattttatttgtgtgatagaaattgattttggtatttgttatttttttttttttttgatttagttttgcggtttgtatttagcccatactatgagattgatttgtaattttttgtccaaaattgtatagacactattaattcttacgaaaaattacttttttttctattttttttttgtagatctgattttttttatagttatatatatttttaataattaccgtgtgatctactagtaatagtattagtggataattaataattttaaaaatagtttatttataaattaaaatgtaattttaataaaaagaaataacatataaattattaaatattttttttattttgaaaaattcaaaatcctgctttcacgtccattaatggtggactagaaatgtccaacgtaaaagtagactagaaatacttttttagtccaactttaatggacttaaaagagagtttttgtggtagtgtttagagtgatggtatctctatcttctttttctagtgccaaggtttatcacattttaagagaaagtaatgtaacgacacatcttcttgctaagaaggctctaggaatgggtagagattgggtttggaattgtaatgaatccaatttgtatatcttctgagtttgtaactgaactttctggtttattctaatgttacaaatcagttgtttcaaaaataaaaaaactcacaaaatcaatcaaatcaaatcaatgtcacccatctccacaagaggcaaatttcatttattttatgttttttgaacaacacaacactacatgatcatgattcatgcatatatgtatatatattcttattatcaaatgatcatagtctcaatcaacaaagccaaccagaaagaagtaagctgcaacgattacaagaacaatcaaatattgaatatttgatcatcttctaattaattaatgtcagaagaaacatttaaacaaattaacatatgaatttgagaatgtgaaacaactaattaaactcgtcttcactctctacgtacgtatgactctcacgtacgtgtcccaatatgatccttggtttctgatttggatcccaacaaaaataataatcatcatgcattttctacgtctaatatttcttactttttattttttaaataacaattaaatgttttctttgaaaaatgtaaatgaaattaaaagataaatatttttacaaaaaataaatataaaatgaaaaatcaataccataaaatatcttaatttgaacctcaagtactaattaaaatataagtattaatttttgtataattaattctattaatattacagagagataggataggacttaggagtcaattaatttttgttacttttttttttaataataattaaatgt

SEQ ID NO: 386917 - DNA, 702 bp, Cannabis indica
tttatttatcaactcaaagatatgtggccgaaatttttgaccaatctattgtgttagagcttggatattcttaatgtttttgaccaataatttataataaattatctaccatattttgctccttaatttactctagcaagtctttcatttatagttacttactaatactaacacatttgtaatattaaaaaaaacatttgttattatatgttatatataaataaattcacatgccaaagaattagggttgtaatgtgagaaatatagaattaatatatggtagcaaaagcacgtggggagtcatgtgagccacaaactaaccctttttaatcatgtgcattgccaattatttttgctttaaggaaaaaactcataaaataaataaataaacaaataaaatttgagcaatcattatagatgggcatggcctctaaaaaagatgacagaaagaccatcttatgatagatcttaattgctgaaaattattaaaaataattaataaggattgacatgacaaaattgattgcaagggtttaattgctataatagattgagaatatgtataaatatgtaattatgatgtttgtatttatttttagttgctgaatctattagatgatttttgattaatttgaaaatttattaaaaataattaataaattacttataatttgatactaatttaatttaatttatttattt

SEQ ID NO: 386918 - DNA, 2245 bp, Cannabis indica
ttccccttattcttattttgaatcttggtttctaggagactaacaaacccaatatttttagaataaatcaattgcttcattttcttatgcttctgttggttgttagtccctctaacattccaacaaaggtatctctaacaaaactgtaggaaattaagcattaaaatgcccctacaccaacatcccaaagtacaaaaaactaaggtaaaaaaggaccttcctctcttgtgcggatcaagagatattttccctcaaaaccttaccttttttatggcagtataaatgcttctttatcagcagaaaccctagcaggccaatttccttacttcctctaaccctagatgaagcctccttctctgcttctcctttcttcttgcttgaaaccctagcagccgctcctcatgatcatcttcaacccactgctacatttttcccttcttcttcagcccttctaatcttcttcttcaagctttatgagagctttctaacccaagcttaatgctgctctttcgaacctgcaacacacacaacaagcaacccgaaactagagaaagactaaaggaaaaaccaacagaaaaataaaatgaagaacacacagaaatgattttagagttccctctaaatcagaggtatgtctccgtcaagcgaccctcaaagttgcttgaatctccactatcaatgtcaaaaccgagttacaaggttatggagattccatgccacaaaccagcaggtaatctcaaagcttcttttcttgtctttcactcttatttttctggtttggttacaatatgtgtttctaactctctctatgtttttctctcttaaaactgaggatttttccacttcaaatggttgttgctactgctttccttggctgggccgaaaactctcttccaaatgggcaagttgacccttattttatagtgttgttgctgtatgtgctttgttgtgttagagttgagaaaaatcagttagaaacagttacaaaaaaaaaaaaaattgttatttatttgcttgagttgctgaaagtttgttggagtcttgaaagttgttatttttttcttgtatagtaaagagctaaaagatttaagcctatgaaacagaactgactactccaagagttataaaggtctgttgaggcttgtaaaaaatcttattttatttccttgtaaccttgtttaaggtatttttttcatgtgacagttagtataaagatttatccaacaaaaatattgatatactctaactctaaccaacaataaagtaccctaacatccttatgtttatatttagaatcgcaatagtcaatgcaaaatatacatgtgtgatcaatatcaacacccaaatacctaaatatgggtacaaaagccatacaattctttaattacatcttaacacttaagaaataatccgcttaagcccttattcatcataagagtagtattttagcttttataatgaaaactatgaaaaagttaaagatgggagtctaagatttcatttttctttagcttgggatagacctaaaaattctatattacttaagttattattatatgtgtctaaataaaatttacttttacactctttcaatgtggtacttttgataacattttatgggaatataaacaaaataaataaaaaataaagaggaagaaaatggtttgtaaaatttagtcaattactactaaatactacatttatatatttcatatatgcacatggttttttgtcttgttttattttgttttgatgtttttgtttgtgtatttttttttctccaaattcctcttaagcacatgttagttgaggtgtcttctcaatagtttgctgtaattgggcctattttcatggacttgccttgctgcattttcccccataattttatgaatgagtcaagtttttccaatccaaaattgacacatcataaattttgtgcccacaattttagaggacatcttggtccatttctttaaaatagagtcactttcttagggtttgtgttttctgcatacaccaacaaaaaaaaaagtaattttggtgtttttgtattttgtattaaattatttataaaagaaaataaaagacaagcaaaacatttatccttctagttctaaaaacataacagtctttgtaagtgtaattaaatttgtactataattaattttatttaaagaaaataaaaaccaactacaaaaattattaaaaataaccttagaatgagttttagggtttgtgacaaaac

SEQ ID NO: 386919 - DNA, 741 bp, Cannabis indica
tcgcctaacgggtttgcttgccaagatgaagagcttccttaaaagacattggtgggcaacctttggccaatttgtcctcatggcgtcattccgatgtagaagaagagtcggctcagggccttggagttctatgcccttcggcccaccctctgacatgtctcaagtgggtgccaaaagtggttttcacccccatttctgcccgttttggcccaaccccaagctcactcggggtcacccgcgcagtcagctaactcagggagggcagatcccttggcgccatctcccacccagaggtggatgacacccaaactatagcgcccaaaaggttctatgcccttcggccctccctctgacatgtctcaagtgggtgccaaaagcagtttcaccccattgctattgttttggcccaaccccgagctcactcggggttgcccgcgcagccagctaactcagggagggaaaatcccttggcgccatccccaccccggaggtggatgacacccagactacagcgcctgaaagggaggagatgttggaaattattttacctgaaggaaacaagatgtgaaagactatatttcctgaagccttcactatctatttatagcataccacatagggttaggcttgaattatttggcattaaaataatgaaaatatcagatgatatttcctataaaaagtggccggccaaggattaatggatttgggcctcacttttgcaaattttgcagttttatc

SEQ ID NO: 386920 - DNA, 5511 bp, Cannabis indica
ggtacttatgccgctatatacccttatacttaatagttactatgtcttaagttttgataattgggtaaatatcatttttgatattatttatacataaaaaaacttgtttgtttgtcccatattgctccaatatgagtaatttgtggtgcttgtattacaattaatagctatcaagtctcaaccacttaataaaattttaataattagataaattaatgtaatttattaaaaataaataaataagtaacagataaaaataacttagcttcttcaagtttaaatataaaatatcatttagttatgttaattatggttataagttttatcatctggaagggaaactgtgaatccgaagagcagacatgggaagcttgaagtgaattcgaaaagtcttgtgcggaagactttgtaaaactcaaaaggtgtttctaaataagcttgtactgcatatgaaccgtattttttcgaatagcttgtcattagttcggagatgcacttttagatagcttgctgtcagtcttagttggtcatctaggaaggagcacttgtacatatctggatagcttgtttgtattaaaacttctgtattgtttgtacttaaagcgcgttatcaaagttgatgtggtttattactgttggaacatttaaggcagtttaaatgtgcttcgttgttctcagaactattttagacaataatgcaaatctataaatagctattaatattgttaatcagtgagggaatcaaaccattatttcttgagtgtaaatcgtgatagtttaaggttgagtgagaaagtctaaactggagagaaaaatctattctcgtaatctttgagagtttgtgaagattcttgtaaccttgtaaacactaacatcaataaagatatagttgttgttgttccgactgagatgtagagcattacacatggttcaaactcattaaacttgatgttattcttttttattttactacttaattcattacttgaattttgatatctcttgattgtgttacgtgtttgttggtctggtatactaaatcgtaagtcattgattgtttccatttcgtacaaaaaattggtcttagagcacagtttgttatcatgactgccgcgaaatatgatgttgaaaagtttactggtacgaaggactttggattaaggaggatgaagatgaaggctttgttggttcaccaagggttgtatgaggctctactaagagacaagtctcttctagattattcgatgtttgaaaaggacaagaaggacacccttgcaaagtctcatagtgtgatggattgtttacaaggggcagaagtgagaaaagagaaagtcacaaaggttcaaaagtaaaatcaatatctaaatcgcagtttgttggcctgaagaatcttagatgttgaatttgcaagaaaatagggcatctcagaagggcgtgtctagagagacataagacaggtgattcaagatcaaaaggggatgcaacagtgagtagtgatagttatgactcaactggtactttactgacaacctcagagaattcagattctgaaatgatcttggattctgggtgttcatttcatatgacgctgaataaatcttggttcaaagaatttatatttggaaattatgggactatgtattagtagcttagagataaaaagtcttgtaagatggggggattgaaaccgtaagattgaaatgttacgatggtgtggaaagggtgttgaaggacgtccgactagtacttgatctcaaaagaaatttgatagatgatcaaggatttcttgttaaattaagaagggagtcatgaaagtttgtagaggtttgatggtggtgatgaggggaaggaaatcaaatgaaatttatcctctagaaagcactacaatgtaaaacacaaaagcatgtgtttcaagcaagcacataaataaaactaaagtatggcacaagagacttggccatgttagtgaaagaggattgtatgaactaaacaagcagggattacttggaaaagtaaagcttgagcagtttgatttctatgagtattgtgttcttggtaaggcttgtagagttaagtttggtactgacaaaaggaataccaagggaacactagattacattcacagtgactatggggaccctcgagaacactatcacactctggaagtaggtattttctttatattgttgataattactcaagaaatttataggtgtttattttaaagataaagatgaaagttcttgaaagatttaagtactgaaagctaatattgagaatcaaataggaagaaaagtgaaacagcttagaatgaataatggtctggaatactgttttgaagagtttgttatgttttgtaagaaagaaggaatagctaggaacaagaccgtgaggaagactcctcaaaaaaatggactcgcgaagaggttcaatagaatcattctggaaagagtcacatgcatgcaattgagttctggattgcccaaagtgttataggcggaagctgtgtccactgtagtttatttgataaataagtgttgtcaacaacactagatttcaagacgccaaatgaggtgtggtcagggaagccaacaagttatgaacacttaaaggtatacagatgtgtctgttatgcacatatcaggcaagacaaacttgaagtgagggccttaaagtgtattttcttggggtatccaaaagaagttaaaggatatagactgtggtgtttggagcccagaatgaaaaaatatataattagtagggatgcgacttttaatgaatctgttatggtatttattgacaaacttgttggaagttaagccaagactgacatgaaatgaatcaaagcttcgagaactgagcttgaggtggagcctccaataagagtagagactgaaacacttatagatcacagcagtggtgatttagaagatgatttcagaagtgataatctgaaaagttataaactgtctagagacagaacacaaagagaagtaaaggctctagatggatacagacatgctgatttaatcgcatttttatttcacgttgctaatcacattgtgcgtgaaaagcctaccaactatgcacaagcaatgaaaagtaagggtaggaagaaatggaataaagttatgttggaagagatgcacttcctgaaaaagaactggacttgggatgtaatatcaatgtcggaagatggtaaagttattgggtgtatagatgaaaagaaggcattccaggtgtacaagagacacgacataaagcaaggttggtagcgaagggattctctcaaaaggaagaaatcaattataatgaggtattttcttcaattgttaagcataaatcaattagaatttttttggcacttattgcttgacaagacctcaaactagaacaattagatgtcaagattgtcttcctgtatggacatctggatgaaataattctaatgaaacaaccagaaggatttgaagaagctagaaaggaacactgggtatgcttgttaaggaagtcttggtacagtttaaaataatgctcgagatagtgaaacatgagatttcatgattatatgaccaagataggtctgaggagaagtgagtttgatccttgtatatatttttgagaaagaaatggagatactttgtatctattgttgtacgtagatgatattctgatctcgagcaaaagtgtacaagagatcaagtacttgaaactctaggtaaagatagagtttgaaatgaaggatttgggtccgattagtaaaatcttaggcatggacataagaagggaaatgaagaagagactactacacttgattcagataagctacatcaaaaagattttagatacttttgaaatgaataactctaaggcagtgagtactccacttgcacaacactttatattaagtgttacttagatgtcgaaagatgaaactgagaagtcagaaatgtcgagattttcatatgctagtactgttggctccctaatgtatgttatggtctgtactagaccgaacatagcatatgcactgagcatggtgagtagattcatgggaaatcctagaaaggagcatttggaagccctaaaatggattttacattatttgaagggaactattgagaagggactggtatttggcatgaataactagaatgaagacttcgatgttatcaatggttacgtggactttaattatgtagggtgtattgataccattaactggatatgtgtttactatgtccagaacaactattagttagaaagcaaacctttagaaggttgtggcactttcgaaaactgaagcataatttatggccttgatggaagcaatcaaggaagcactgtgattaattgggttgatgaaagagttgaaactcaacagaagattattactgttcattgtgataattagagtgcaattcaattaaccaagaattatatgcaccatgaatgtattaagcattgattttaagcttcatttcatacaaagaagttgtaaagaaagaagctgtgacgatttctatgatccaaacggaagagaatccttctaacatgataaccaagataatgccgagtggtaagtttgagcattgcctgaagctgattgaagtcacctcagtccgaaggagctaaggggaagaacagtatttataacaacaatttttcaagcgacttcaacttgaaactaaggtagaaatttattgattatggttccacattttgtcatctggaagggaagctgtgaatctggagagtagattcgaaaagcttgatgtgaattcaaaaattcttgcgcggaagactttgtagaactcgaagggtatttccagatgagcttgtactgtgtatgaattgtctctctggatagcttgtcattagtcccgagatgcactttcggataacttactatcaatcttggttgttcatccgggaaggagcgcttgtatgtatctagatagcttgtttgtgttaaaactttcagattgtctgtaccgaaatcgggttatcaaagctgacgtagtttattgttgctggtaatgagttgaaacatttaaggcagtgtaaatgtgccacaatgttcttagaactattttaggcaacaatacaaatttataaataacttttaatctttataatcagtgaaagaatcaaaccataattgcttgagtgtaaatcgtgatagtataaggttgagtgagagagtctaaactagagagagaaatgtcttcccctaatctctgagagtttgtgaagatttttgtaaccttgtaaattgaaaaactgagtttttgcaaatatcaataatgtatacgaaaatataaaattgtatacgtctgcagaagcataatgtaattctgttactgcagaaaccagttttgcaacgacaaaacagaacatgcagaatataaaaatatttacagaaaataaaataacttgacacaagagatttgtacgttgtatcagtgttctcccgaacacttctagtccacggggccacgcccagagaat

SEQ ID NO: 386921 - DNA, 833 bp, Cannabis indica
aatctcacacttctcgccatatatgtaatggtgtcaaacttttagggtaaacattattgctgccaatgcaagatcatgggtgggatagcgctactcataatctttcaactgcctagatgcataggcaatgattttttctgattgcattaagaataacttaacccttgtttccaagcatcacaatagatcaaatttttcatcactagttggcaaattcagcagtggcactataaatttatgattctttcaggatagctcaatatactatttaaattttttcacgtaaaagaaacgataaaaaaacataaaattaaaatattaaaatttaataaaataaaagagaaatgctaaagtgcatttatagtgcctaacacccatgtgaggtgtaatattattattggtgcaactctatatttgatcccatttattttactttattaaatattatagataattactaactaattataagatgacactatttattgtggtgttaagtaccataaatacctcataacaatactacaaaaaaaaaaaaaaaaaaaagaacaaaatttacaaaaagctaaaatagacaaatgaaacacatacttataataagtcacataattttttttcttggaaaaaaacaactagccgacagctaaaataaaattcttcatatatatatatatatataaatataaatatttattttatataaaatgtgattatgtaataaagtttttaatttaatggtaattttttgttttctatgtaaaaagtttaacaaaatatactactatttaataaaatattttttattaattttgttggtttaactttaaattaaa

SEQ ID NO: 386922 - DNA, 848 bp, Cannabis indica
taaaaataaataagaaatttaacattatcagtgacgacaatattgtgactggtgtttatttccagtgacgactttgtttgtcatcattgatacttactttcaatgacaaatcatcactaacattttttttagtgatgacatgtcgccattaatagtcaccattaacaaaaaagatatctttcaatttcaatgaccaaatttattttcattgaagcctatttttcttgtagttgatatatagttgtttccctcaaatttttgagtatttaaacatttttcttaagaaaaaattaaaaaatttataagtaattttctttaatttattaaattttaatattattattttcatacatctactaacatttcagaaattttaatttgtttaaaactttacataattttttttttaaaaaaaatactattctgttttcttttttataaataacactttaattaaatatttttaatttaaaataatattattaattaaataacacaaaattatataactaaaaatacacattaaaaaataaaactaaaaaactaaatatacccgcaatcaaaaatatcctaatcctctaaaaaaaaaataatcctaattctctcaaaaaaaaaatatcgtagtttatatatctattttatataaagtgtgcctatataactgaattcttggtttatgagaaattcatgggtgactttttagttatatttaataaaataataaaatattatttatatataataaaataataaaataaaaataaaacaaatctcattaatatttgaactgatatttgatgctaattatttatctgtttttatttgtttaaaaatacttgagtttacca

SEQ ID NO: 386923 - DNA, 1478 bp, Cannabis indica
gcattgtcatccttatcaacttccattttgctactcgtctcatgaacatcccaaaacagtctgggtctcactttttgggcatacttcaacccgaaattgccattgagataaattgtttgctctgcatcttttgcaagtacaaacgcagtgtcataagtaactttgacacggatctgagtgatattgcatttactaggtgttccagcctctgggtctgtgtcaaaccatttagctttgaacaaaacaactcggtgaccaaatgaatatttcaactcccacacgttgcataaactaccatagcactccgcaaccttaccttcactttctgaaatagaatacaaaccactattctgagcaattctatggctatctttctcttcagtaagaaatcttactcctccaactacgcagccagagtaggtatttatctcaaaatcaggtccaatagctaatgagaaaagctcatctgagaccttcgttggctcagtttgacgcaaccgtttcacctaaatatatacatatatatatatatatatatatgttatttatagtataagcaatattaagaaaaatattcaagtcaggaaaagtaaaaatagtgactaacatgattcgccaaccatgcaggaaattcttcattatgcctttcttctaagttgacatcagatattgccttcaattccttcttatgctctctgaaaactaattgattaggatcattttgtagtaaaacaaaagttcaaggaggaaaagaagaagcaaatatatcacttacttaacataaggcactaactcgtctgataggagaagtacaaaccagtgggcctgttgcaacatttcacgagacaacttcacagatccctcgtgtccaaatggttgaacacgtggtttaacatgatgtgagaacacacgaaacgacggaagagtttgtttaggacctaaattgtcatctttttcactagaatatgtatcaatgtcatggccatatatggagcaaaatctaactgcttcattagcaatgtaagcctctacaatcgaaccttcaggctgacaattttttctcacatactttgtgagtttttcccagtttctgtcatagataagaataaaaaaattaataacatattcttcaagcaaatagaaaatggaaaaaccatttacaggttatactcaaatacaaacctttcaaatggatatgtccatcgaaagccaacaggtccaacaagttttgcctcatgtggtaagtgaacagccaagtgaacgatgatgtcaaagaaggatggaggatagattttctcaaacttgcataaaattagtgctatcctctcttgtagtttgtccaaatctttatccagtaaagttttggcacatagcttttgaaagaaattggaaagctcggtcagtgtaatagtaatatcctcgtgtatgtaatgaaggtcaactgcaggaggaagaagacgttgcaaaatcacatggca

SEQ ID NO: 386924 - DNA, 1941 bp, Cannabis indica
gggcgtatcatcaatatttttcgattcatacaaagaatttgacaattataacgctctgaccctttaattacaggcattccaaagctacacagtatcccatcagtccaatcaccaagtagaatttctttcaagcattcccatctacaccaacaaacaaaatcccatgaagataaatatatatatagacatgttaaaaaaaacataaaaaatgaagcttacgcatggttaatggtatcgagctccaagaaatggtcttcgcagccataaccagtaatctcaagctcgggtccaagacgaatgacagctccagcttgtttagctttggttattgaatgtttgatgttattcaaattgcaatcgaaatccatagcccattggtttaaattacaggtagctactttgagcagcctcatcttggtcgaattctagggttggaatatgtggattcggattcgaatggaatggattatataactaaggtttgttgtcgtgtaaggccttgcgtttttgacacgcgcgactgtgtgcgtctgtgttgggtttggtccagtcaaaccagattgacagtactgactactgactgagaattcaacaaattattttgagaacgaaaaagtatctgaaatcgaaatgtaccagggaaatcatcgaggaggaagaagatgagaatggtgaacacggtgaactgggttgggtctgaaatccatgttttgggcgtttagggatttctggtctaaacctatttctatatatataaataaatttttgtgggcaaaaaggaaaaagcgaaaagattcaatttttaacgaactcacagttggagtggcgactgagattgagtctcggccgctgctacaccggcggttaagtaagttatttgggtttaattgtaatattaactgttcgaatggcaccaatttcatatttacttaattattttttggaaattttaaacattttgatataaattaaccttttttatttttaaagtttcgtttgttctgttggttgtagggcgaggactaaagcaaaattaaattttagggcctatgaatatagtttagttattattgagagtaaatattattttaaattttgtgttttgtaaaacttattgattagattttatgttttgtcgaatggtcaaatgtattctgtattttttaaaatgatccaaataggagcttgaattcaattttcgacaatttttttttaatataactaacttgaagacaattcctaacaagaatatgtgcagaaaatttaaccagttttatcataacacttctaaatcggattattattaagttttattttgacaaaaaaccagtttagggtcttatttgtactattttagaaaatacagaatctattttgtcatttaacaaaacagatgatctaatctttaatttttataaaacacaagatccaaaatactatttacccttgttaaaataatagttctagtgctttggtgtaatggtaaagttttttaaaattcttaaaaagttcaaggttcaatcctttatagctacacattaaatatttattttaaaaaaaataagggtttccatttttacacttaaaagtaattttttttctacatttttatagaaatccgtataacaaaatcacaaataaaatccacataacaactcacgtacaaaaaactggagtaatccaaactgtaaattttaaagagaaaaaaaattaaaaaaataatatatagaataattctcaaaaaaatataataaaataaaggttgaaaattaatctctactttatctatagactaacaatttttcttttcacaacttcagggcctgaacgtttgtgggcccgaggcgcacgccttgcttacctatcctcaaggtcggtcctgattggttgctacatgagttgcaatgttgatttaggttgctcatcaaaaaaaaaaaaaaa

SEQ ID NO: 386925 - DNA, 757 bp, Cannabis indica
tttacccttaactaaaaactaaaaaaaaaaaaaaaaacacatgattgctcaatcatactaaataagcatgttctcttacaattacatacacataattctccatttttctttttatttatagatattattaaaaggacataaattaaagtaaaataaaaaacaaaagactagctagctataattatattttattagaataatatatatataacctagctaagaaaacacccactacaaatatcagtgaaaatgtcggccttattaaaatatataaacatatttatatagtgacacatgacacacattatcaataataagtatatacttaatcctttttttcttcatttattttcaacactagctagctttgtcaatgtcaaccatgaccaacaaaaattatcttgaatttattattaatagtcatgacataataaaacaaagaaaaaaacaaaaactaacaatggcaggtatatttattagtgatattctctataaattattatatattaaattatacgtgacttagtactttatattattagcgatacgacacttaagagggttctagacacgttatgcactagtgataccttttagtattttttttattatatatcggctcttctatcaaattttatcatacgtgacaaataaaatgatgatatatagttgtttagctagttgtcacattagcaccatgtgtgtataatttgacatattagttttttttttttttttttttttagcctatttttta

SEQ ID NO: 386926 - DNA, 662 bp, Cannabis indica
ttttctctaataccaaacacacttatttttactttaccaatcataaggcaagaaagttatagcgaatttttataattattattaaactaaattgtaaagattatgtattcaatatgttactagtgatatgggcactaaaactcatacctttagtatttttttcttttcaaatattcatattaatagcatttttaatagagggctagaaaataatgcaattttttttttttattattattaaaaagtgaaaatatatttttaatcttttagtaaatttgctttcatcttttatatttttaaaatagaattaaaatttttaaaaaataaaacaaatgataacaaaaataagttaatatcaaaattcgattaaacaatttttttaatatagaatctcttttgtacccaaagagatgacacttatggtcacttaaattttaataaattgtatttttgtgtagaaaattttagataattttaattttaccccataatgttcagaatatacagtgaagagttttctttctgcataaatatagtagaataattgtctcaaaagagaattacatatatcatatcatctatatgctatataatacattaggggctcgtttggaacgccgtattaggtcgtattatattgtattatattgaattatatttta

SEQ ID NO: 386927 - DNA, 958 bp, Cannabis indica
attttatgttttctcatttagacatttatttatattcatttgaaatggtatcaggtagcaatgtttcatgtattgccactgatgattcaatgaaaggtgcattagctgttgctggtggggaaggtcagttgcttgtatatctgccttcacagaaaaatattcttaattagttagttaagaacaaaacaaattgtttttttttcttcattctatgctctaaactctagtcttcggctaaagtctccatgaagctgggtaatatataaaaattgttgccttttgcttcgtgagttaaaagtagaaaatctctccatttttttaatggagaaaacgaaatcattaacgcttataatcttcacacttcaaagtttttaatcaattgtgaatattattatcgtagagaagtgcgtcgacttattattatatttcaattcaacaatttcaattgtgacctcacatggatttggtgcctgttagctaacataactttcagttagtttagttagttaattagttagaaattagttaactgtttactttacaattttgttttttctgctttggtagagctctgttttagctctttactttgtccacttgtattaattttgtgcttataaataaaggatctctcattaatgagagacaagcttttctgtcaatctttctctcttcttcctcttgctttctctggttctttccatcttgctttctcttgtttttaccatcttcctaatcttgctacagtcaaacttctacatggtatcacttgcctccaatggagtccttgattcatacctccacttctttcaatcctactaatcaaactggtcgtgccattgcttctttgcctgctctatccccacccatatggaatccattctctagctttttctcctcttctctcaccatcaaattagatcatgttaactattttgtgtggaagtctcaggttgtg

SEQ ID NO: 386928 - DNA, 1116 bp, Cannabis indica
aagtgaaattcgtgtttccacgtcactgccaggatgctgaattcacttcagcattgctttagcattgcttcagcaatcagcccagtttcagcttgtgctccttttcttccttgcttctttttcttttacctatcaatttaattcctcctttttcaacaaaataagcacagttaattggaaaaacacacccaacaatatcaatatttacaaaacttaaaggttagattactaaatagaaaataacactaaaactaattaaaattaagcaaaataaacacattttcactactctcctcacaatactttagtttaaaagcataaaaattaactctataacatagagttatcagcgttacatacagaaaaatgtttttaaaaaaatctaaaatcaagtccgaaaattccaaatctaagagcatcttcccttctctcaaatttcacaagtctggtcgatttgagcatctatagacattaaaacccctcatttttttatttgcaaaagattaaacccaaccaaaaagatctaaaaatcccaaaattttttcttgatggatcgttgaggtcgacaaaatctgaccaggacctggatcaaccgagcaagactgacagaacttcatctggaaagaaggcatctaaacacgaacagtctgtacccaccctttcacaatcatagtctctcccaactgctccaacctctcatcgagtccgagtgtaatatccgcaatcctcagtttcaaccttaaatccccaaggctttcaaacttccagttctcagaaattttgtcttggtcccctctttgctggagactgtagagcaaagcaaataatacgtaaagaagatggagtaaaacaccaaaaaagtggcgagaaataaagagatcgagttttgggaagaaaagagtataatgagagaatttgaagagttgaatatggtttgaaccaaacagcaaaagtacccgccattttctttgagtgattttttaagaaagagctattgagatggttagaaataagtgagaagaagaacgtgaggaagaaaaagaaaaaaaaatagtgtcttattttttatttaatttttatatatgaaaaatgttgggaattattttaccaggatct

SEQ ID NO: 386929 - DNA, 1836 bp, Cannabis indica
tattttgaaaaataccctttttctttttctacctaaaattgttttggtgttgtataggagggtcttgtatgaagagaagcagcagtaataaaacggtgagatttgcagaagatgtggttgaaccatcttcaaataacgaggagtatcggaaaaagaagatggagaagcaacctcatcatcctcctaatatgccattaaataggcaagttttgtatagaggtattattgactacaaacttggtcataagaactaacaggggtcaacatgtgtttttgaattagatcatgcttttgtaaattaacttcattgctatgttcttttgtaaatttttggaatatggaatcttaattggtacaagtgtacgactttcaattatgacggtcatttttttttaatttattttttttttattttttagcattggatcatcattcaatgtaaagttactgttgatcctacaagaaaaaaaaaatgtaaaagttactgtaagaattgatatgtaattatattacgttggatataaaaatatggtgcaattaatattgattccccttttcaaaagaaaaaatatatatttattgatttgatagttagacgctccctctcgcttgagaccctcttgttcccgtctaacactatgtttggtaggaggggaagatgggtggatggagaggggtggaggaagatagatggaacgagagactaaatcacttgtttggcaagaggaagaaaaatggagaggagagatcgagggagatccaaaccttcaaatttttcaaaacttaatctctccaaaaggattgtagaaaaagataaaatatattttgcaaaatacaattattacctttaaaaaactagtaaagttttatttttaaaagggtaattttgtaattttactaatcaattttttttccatcattcccacctcacacctaatatcaaacaataggaaggagattaacaatcattttcattcctcttactcctcatcctctctaacctctccatccatcctactctccttccctcccaccaaacatagcctaaggttttcttctttttggtctctttgtctatttcggccaaggaggtcgctcctagcctttgctttggccgaaatgtactaaaagtattaatcacaaaaattacactttgttgtgactaaaaatatttttagtcataatacttgttgtgactaaaattaaattagtgacaacttgtatttaagtactttatttttagtcataaataattttttgtggtgacaaaaagtcacatttagctacaaagaatttatgttgtgactaaaaatttatcactaaaatgattttagatggttggtagacgttggttataggtgtcgacagtcagtgggtttggttgttacagttagattcggggtcactaagaatgggatcttacattcttgttttctctagtatagcagttctggttgtggtggcttttggtctcgacgatggtatgtggtgagtggtgttggtcgccgacgattgggggccttagttcgactgggattaatggtggtggattcaacctttctcaatggtctggtggtggagctttgaagatggtatgtccttgctcgagtttggagtgtggaggcactactattcctctttttattttcttcattggttgacggtggttcttttattgcgtctaggctccggtcaggcccggccctgggcataggcgggctaggcctgtgcctagggtccacccagcccaggggcccaaaattttttttttcctcttttaaaattatacatttttttttaccgattttgaaaaatatcacattttttctaacataa

SEQ ID NO: 386930 - DNA, 2259 bp, Cannabis indica
gcttcctctttatgcacaaaaacttatgctctttcaataaattcataaatattctttacaaggcgaccctgaaaatcatcccataattctcccccgactgttgacaaatcagacgtgattccagcctgaagggctgttaattcaatgttatcagtcaggtttttgacttttgcagcagtcgtactgaagcgactcaagtaagctttaagagattcccttggttgttgttttatgtttgtcaaagataatgcctatggtcgacgatctcttgcagcctaaaactgctttttcaaatcctttgacaactattcctaggatgttatggaatgatttgtgcatttatcaaaccaaatgcttgcgactccaattaaggaggttgggaataatatgcaacgcaaattatttgaaacattgcttgctcgcataatagtattaaaattgttcaaatgggcgactgaatctatggttacatcgtattgcgagacatgtaaattcttaaatccttgaggaaactctgaatttaagatatcaagatggaatggctcagtttcttcgtctgagtcataccctgacaacttgtcatattctccatcttaatattttctaaatttattctccaattgaattactcctaattgaattggatccataggtttttgatttgcattttagttacgttgataacgtaaatcaagcgcatttcaatttaaatgatcgtgaaggtctggctgccttcggtttaatctctcgtggaaataaggtttgcgatgcctttgatcatagttacttacagacctggtctccgagtagcttttggactggtaactacgtgagttacttatactctcctggtcagcaaaataacatcaagatctacttccatctcgcgtttgtctactcaacctactatgcccacgggatcgcgattctcctgtgcttgagcttgcttcacctcacatggtcttcttcttcaaaagagattagacacacgtcccctacttagtaagtgtgcatattctttctatccgtacgagaaggctgttatgggtgtctcggggggagaccactggacctaggttggtttccaagatttttttcattgtcacaaagaaatccctggtttcttggtcgaggttgtctagcctcttcattcatgcgagatgattttggcatatcagttcgttcagtccattggtttgcaaatccatgggaagttcttggaacatcacgctgatgttgttggtcccttgtattatttgggttaggttgattatccattgggacatcccttatattccaaggttgttcttcttgagtattcagggggttcccttggttattttcttgtctcctgatcctggaaccctgagttttccctcgcggtctccttatagttggatcatattggttttgaggaattgtcccccatgcagccctgactgctacgactttttgctccaactcaatgtttcgtcagtttgatttagccaagtgttatggaagttgcatattctataattctactagtggtacatatctggtaggatcataggcgtcctcactccttctttttgggatttaatcaccaacaacattgaaattaccatcattccttcctgaacgtggtgttttagatgtgttggttctttgggaccccataggttttttactagtacgatgggttgtttcctctggacgattaccatagtgtgggttgttatcatccatttaatatgggtttgtatttgtgttcataaggatggatttttctgagtttttatgaccaagactctcaataaaaataccaaactgttaacacatatttttcgttaaccaaataaatagcctttttgcaataaatacactacagaatttaatagtaataatactaataataataataaacactagatattttatgtggtttagtagttaaaatctagatactccacgagtccatattattagagatcttttctagaatactgaatataaatcttaatatttgaaataatatgattttttctctatcttttgtcatcctctttcccatgaattctactcccatttataggtatataggttgccagttatttttttttgattgattcctttacaacttctaatgaaacgtggacattccacatatttcatttatttacacatgggataatatctaataactacccaactgctccttgtctttatcctttagatagttatgctgactaggaaggttgcatctcgtcaaacatgagt

SEQ ID NO: 386931 - DNA, 967 bp, Cannabis indica
aaaatattttgcacacaaattgatgatgatttgtcgatactttatcaatagtttagttaaaattttaatttctcatcgtaactattattggtcgacatattgtcgatagaatgtcgacaatattaaaaaattggctaaaataagtgaaaacttttaaacataaataaaggcgaaacaatcaggataacaatcatgaactttaaaagtaacccttaaatgttaaatttaaaagtctcgatagtttgggtgattcatgcaatacatgcacaatcattcaggcatgactggttcgcctttaaccatatatactttacaatgatggcacccttcggagaaccctagtggaataaagagaaacccgtctatttgaatgcattcgaacatcctctcattctctacccttttcacgttcaaattgttagagattttatacatcaatagaagataaattaagatcaattacataaatgttaccacatatatgcaatatatacactatatattatatatataagaaaggtagaagagatgaattacaacacatgtaatataatataatatgaagaagatatatatatatactcactgacaatattgagtgtagattagtgggggtcaccataacttgaacaaagttttacacatttgtccaaaaagcttatttttcctatctctaagcactaaggaaactctcatgaaaataattttgaaattatcaagccttttattctagcaaagtgatttgttgataaaaacttggttcttcttaatatgagcaccttagacccttttatatagtgtttaggatgtcaccatttaaaattcttactcaaaacctcacatggatgttatgaactcaatgagagtaaaagatatgtaactcatgcatacactataactcctataacattaagaattcaaatttagatgtgtaacacctttttacacacttaatataggtgataat

SEQ ID NO: 386932 - DNA, 821 bp, Cannabis indica
cagtttcctataatttcaactttctttttccatcaaaactgaccaaaaatataaaacatttattaataaaaaagaaataaattagggtctgaacccctctttctctttcataaaaaatgctaataatattctgcctcttctcctctctcttcttctcgcctcttctttctttctcttggcagatattattgctgcccagtttcctctcacctgcgtggattcaataacgagatgggttcttgtcaagtgcgattggaattgtgcgatgatcaatggtgctcaatcgagcgagatgggttctggtcagcttcctctcgccttcgtggatcactagacgagacccaagttgtgctcttcttcccccaacgtccgtcttgctctgccatgcatcactagatgagtcaccattcatggagatccgagctccaccaacaacgagatcaattttttcttatttttttgtatatttttttaggtttttacatgtctaaaaacttgtacagccataaattatttgtggagatactcaagttttagtttttatgttcatgaaacattgttctcgttttcaggaacaatggtggcctcagttgtactcgagtatacagatttattgtgtacatattcgtatcattgtaaactttggtgattttggcaaaatgattaatagaaaatattgttaacttaattaaaattattattgttatttagttgtatttgtatataattaatataaattaataattataatacataaaattttaattaaaataattaaatattatttttttgtagaaaaatatttaatatagtggcacttt

SEQ ID NO: 386933 - DNA, 3749 bp, Cannabis indica
ttgtgaaaactgcaaaatcaaagagttactaaatcaactcaaaggctacacaatcagggagatctctagagagcagaatgttgcaacagatgcacttgcttgtctggcgtgcagcaccactaccgacaaggcaaatttagtgccaatatagttcctagaggaacccaacattaccatcccagaagaagctaacatgttggatgacactccaacttggatgacacctatagcagcttacctcaaaattggagcctttctagaaggcaagaatgaagcaaagaagctaagaagaaaaaacttctaagtatctaatcctagaaagagtaatgtatagacagagcttctccatgcctctcttgaggtgtgtcaccaaagctgaagtcaagcggctaaagatagaagtgcatgaaggcttctacgacaaccatgccatggtgtaaagcctatccaagaagatactctgataggggtacttctgaccaaaaatgatcgaggactcgataaactatgtcaaaagatgtaacaagtggtagagattctcaaaaattcaaagagcttcacccaatgagctcacgatgatgcagtatccttggcccttcgcattgtgaggggataaacctaatcagtccactcccaaaggaaaaaggaggggtgtagtttgttgtcgtcgcagtagactatttcatcaagtggacgaaagctgaatctttggcaaaaaaaaaagctccaaaaaatccttgactttgtttttaagaacatcatatgtcgattcggactttcctagaagattatgtcagacaatgggaagtagtttgatagtgacatgttcactgatttctgcaacaaacatggcatcaacaaaagcttctctatcgtggcccatcctcaagcaaatgggtacgtagaagttgtcaacaaaaccctcaaggatgccctgaagaagcgcattgaggaagcaaaaggcaattggcttgaatttctcctagaggtcctatggtcgcataggacaaccaagaagacagccactaggcaaactctatttgctctagcttatggctatgaggggatgttgcccatagcgctagtaccagtgtctcacaagagatcaacctatgactaacaaacaaacatcaccctattgggagagtcccttgacataataaagaaagaagagatcaagccaacctaaagttgcaggcctactagtaaaaggtagcaaggcacttcaataaccaagttgctctgaagagtattcctaaacactaaagactcagcagcaagagtgttcagacctcactaggagggcccctatcaaattacagagataactagtaagggagcctacaagctgggaaggtacaacaagaacattgaactcgctctcataccaagatactagaatagagaacaccttcgcaaatactatcagtaaccagcttacagaacactactccaaattagcagttctacctactcaacattagagtacaaaagagctagtacccatagcctttttcgcgtggtctcccgctattcttcaacggtggcctctactattcaaggcaagcaggggtagtcatttgacatctagaagctaaatctatgtaatgtaagcttgtaaattcaatttatgtaagttgcacagcaacaaagacaaattaatgaataaaaatcaatgtttatggtctatttattatgtctaaaccacttgctcacaagattaacttcttaaagttactctttcagttccacatgcgtacaatgggcaaaaccccaagaaagaacccaggcaaggtctgtgaaactttgtgaatagcaagtgacccagagactagtctgcatggtcacttgagaggcacccatactgtacaatgcatcgaactagcacaaaaaacttatgcagagaaattttaacacttagaataaggtactaaacctgcctataagtcgtgcatgcatacttcggcttgacaaagtaaatccaaacccttacttgtcaaggccataagaagatagccatgattaaataccgcttggctagtcacacaattcatgataaaaaagtaacagggccaaacaatactagtgctcaaaaatagagggtctataggccaaagataagaacatgaaggccctagggcttaaaataagtagtgttctaaaaggccacagggcacatggaacatgaaaataagtagttttctaaaaaggccacatgtcacatggaacatgaaaataagtaatgttctaaaaacaaaaggccacgggccatacagaacatgaaaatattgtttatattatacagacatgatgttgaatagtactaatgaaaaatactgtctatgtgtatgcaagggtaggaggagccgagtctgaagtcgtgagatcaggatcgccagagtgtaggccggccacaacatcaccaagctgtccagcccgatggtcagtatcttggttgaccacctcctcagtaggtgggccaaccagcccctcatcatggttccctaatagtgacccctctcaatagggagggggctaatctgctcccaaccggctgtcaaagagcccactttcttgtgccaatgtgcactccacaaaagcttcactgcccatgtatgatatattagctctggggttacacagcttaaactcataagtgagtttggaggacaagtcagcgtactcctccattatggcctgctagccatcaagacctgccctcagtctctcctcatgctctacaacttcagacttcagcctagagataaaggcaacttttgtggtgttctcgttttaggcgcccagcatggtctctaggccaaaaatcatgctctatctctctacaatgagagactctatcttagacatggctttttccttccccagaagggaaagcctccatggtctttacctgttcccaaagagcattcgaggaaccccgggaaccatcacgtactcagcttagcttcatcaatgcctgaaagcaaaacaagacaaagttagtgtcaaactacaatagtggccgaccagcccctctttgggaatacaatggctggagagaacctcttagatgcatccatggccagccagccacatgcaacaagtcccttggttagccagcttacatagtgccaaaaagatgaacaaagtagaaaatacaaatgaccagagaaagatcccagaggccaaaaaatacaaatcaccatcaccaagctctttcagctgctaatcgatgaaaggaaaagctctctctatgtgactatgggctgcctccatagccctcttaccagcagctgagcttgctcctcgactgggcctccgagtaccttggcttgcaggtcatacgacaggatgccaagtaggtgcaggccatggtggaggaggaggtagagacgaccctgtatcatctccgccatgaaaagtctgggccaccttagccctcactcgtctcgtgggctcatctaaaggtcccccagtgagacctcttagcctggatacatatctacaaaaagaaagtagcaaagtcagaaagcaatcataaacattcaattcaagacaagaatatggcgctatcaactatcaaagaccattgtcttcagaggaggaattgtcataatcctctacaatttccttgcccttgcctctagatataggcagggggtgagcaggtcctgttggaattatatttatccaggatcctagatctactcacaagtatgttgatttaacaacctaatattgaacttcta

SEQ ID NO: 386934 - DNA, 1320 bp, Cannabis indica
tatatttttttatatatataatagcatgtacagtattcttttgattattcgtaaatttttaaattttactcgtgcaattaatatttgaataaatttattttttactgtaaattatttgattttttaaaaaaatttacgaataatcttaaataattacatcgtacaagattataattaaaaaaacaatagattaaaatacgtctctaaatgtgaagtatactaaaccaacaattcttttaaaaggtgtactataaaattattcattattatatatttttaaattttcactacaatgagtataattatagtaccactaatgataataattttcaaaatacctatataataaaaaaattgtgtcaaatattttcaagataagcaaaataattttttgacattagattagattagaccaccactctttttacaaggtaagtactctttattacctaattgtatactttttgttttaatggggacctaattggtaggtgtaaaagaatatacaatgtgaatatatgtatataaaaagtttcattatatttttttcaattaaaaattttttatattgaaaaaaaaatattcattcatcaaagatttgacccttagtcttgtactgtctaaataaattaaataaatatgaattaagtacagattttatttttgaactctaattccacgcgcaagaaaaacaaaaatagctatatttgaattcttctcacataaatacccatttatgttttttatagttaaatcttaaaaaaaaaaaaatgttgaagttttttcaatttagacagtaaaatatcattttactatattaggtaaaatattacgagaacagagaatataatattgaaaatttttagaatatattctcaaaatggtaggagatccatgcacttttttctatatatttttccacttccagatacttataattttaacttttgcatataacagtgtatatcatgatgttattattttcttttataaattttaaatattataatgttgaaaataaattttaaataatttattacgtacatattttttttattttatatatattggaagaaaattataatcaaattaattaaaatttaattaataaacgactaacaaaaataacattaacaattcacaataatataaacgaagataataaaaaaaaaggatgaaaagagtactcaaaccaaaaacgattaaagatataagcaataaaattaacaccaagatatatattggttcaagtcctatagattcatatgatttatggttatactctaattctaaaacactaccaaattttatttattgatt

SEQ ID NO: 386935 - DNA, 2981 bp, Cannabis indica
ataattatagaatcctcacacaagagatctaaaaagaaccattgataaattttatagaatactcatcatataaaaattattatcatcacagtatctcatatctcatttgtttagctgctatatttaaagtagatgttatcattggatcttacttttcactatattcaaagtcgatattatcaccgtatctcatttatagttatcaatattcttcctattagatttacatataaaataaaatcaaattaacaatgagttagttactcacattttatgtgaatcattattttataaattcattaattacttacgtatttttaaatattttaacatatgtgaattattttgttataaaattattactttttatggagaatgctcatatttacatttgcgactctacatattttcttgttgttattgaactttgtgtctaatgcattccataattcatctatttctcaacacaaattttgtgctgtaaaatgtccaaaacatgtcccctattgcaagggggccacatattttcacacaatgtaagcatcctaattaatcctaagtttggttttccatataaatcttcattatttgatcctgcaatggctagttgctcacttatttatttcttctcaatttcttttggaaaataaaacaagcctctttcatcaatgatttcattatatatatatcaagaagtgataacaacacaacatgaatagtaagagctcccattagatgatcaaatccaaattcctcttcagcttgattcagcaacttttagaatgatggctagttcaaatatgataaaagggatcataaatctctttatttccaaacatcttttgagcttgaaaatcatgtctttgggttagcttcttagcatgagttgaaaacccattcttgtgattatcttcaaaggaagaaagaaaagagagatctagctcaaaggatttccaaaagaaagttgaatacttgagaatgtgaaatttttttgtgcttgtgactaaatggggtcaagtgaaaaggaatagtccttaaaaaatcacatgctatatggtcatatcatgtggtagtccttctcatcaataagtattgtgtactcaacattgtgtggttaaaaacctctatgttgaccacacaatttagttttaagaaataaatcaaaataaaaaaaaaaaatagtacaaattgttacttgcaggatgtactagcttagttcaatagaatcacagaacatgctaatgaggtaccttttttgttgttatgattgaactctctatctaatgcattacacatttcatttatttataaacacaaaatttgtgctataaaatgtccaagacatgtcccctttgcaagggaccacataaatcttcataatatgatttcttttaacaagtctctttaataattaatattttgattattcaagtctatatatgatttttctttgatactttttcaattagtgcctaaaagttacaattctttttctaatatatcaagtagtgataacaacacaacatgaatgaaacaagtggagtcccatcatgtttttatcaaacaaatgatagccatataaatctcaattgaatgtatattcatgagacaatttcatatgcttttgtctttaaaaaaaccccacataacaagttactactcataacaagagaagaaatttcattcatctataaatagagtacaaaaaccacacagctaaatcatcaagtactcctcattttcacaacaagaaaatattttttgtgtactcaatacttactctctcaagaaaatacatatcatcatggcatttggattgcctagttttgttaagggcaagaaggctctccaaagatcgctttcgggaattaaagaagctgctttgaagtccaaaactattccgaaaggctactttgcagtctacgttggagaggagcaaaagaagcgttatgtagtacctctttcgtacctaaacgagcctgcgtttcaagaattgttaaacatggctgaagaagagttcggatatgatcatccaatgggtggactcacaattccatgcagagaagacatcttcattgaactcacttctcagttgaattgattgtaaatcatagaaaacataacataatttagcataaacaattttgtagatcatatactatattgtttgactacttgtgaaagttgtacatataaaaattgctcatttgaatctatttgtatatttggaaagatttatgttttcatatcttacttgattctgtttcttactgccattttctattacaagcagaatcttataaaacaaatgcaagtaactattgagatacttgttttgtatttaatgtaggcacattaaaataattaaaataaaatgataggacttgagatacactcaagtgtttagcaatttcttttttcttttgctggaacagttgtttaggttagcatttgaaatttacttttgtatgtatatagttgtttatctatattctatgccaagattttttactttgaactttttttgattttaacaaatttataccaagaatatggacaaggaattccaatcgcatcattcttggggacagcgtttatttgataacctcccaaggaaaaataatatttacaaggtaaaattataacatttagattttgttatttgttatcatctattggtgtaagagcttaagcaagatataagatcgatcaaaacatcttctgtacatagaattgaaagagctctcattagatgatcaaatttgaatttttcttcagcttgacttaaaaagtcttggaatgaagattggttcaagtattctacaagggacccaaaaaaaaatgtcttgcgactatccgacctaaaaaaaacctgatcaagtagagctaaaaaaaaaacggccaccaaaaataaaaaaaaaaaaacctgattcaagagccaaaaatccaaaaatactgattcaaaaagtagagcaaaagag

SEQ ID NO: 386936 - DNA, 6242 bp, Cannabis indica
gaggctaggacaaagcattaggctagcttctcaattaggggataccttgaatcaacctcaatgaggttcttgttgatatagtagaacgggtgttgtactacttcttcctcacgcactagagcaatactggctgcatgcttgttgatttccaagtagatgtatagctctttaccatctattggctttactaagataggtggcttgactagatgatgtttgattatttggaaggcttactcgcattcatcagtcaattcaaaccccttgttgcttccatttagtaaattaaagaaggtaacacacttgtctattaacttggagacgaacttgctaagtgatgaaagtctccctgtgaggctttgcacatcttttatcgacgacgatgatttcatgtcttgcaaggccttaatcttttatggactcacttcaatacctcttaagttgacaataaatctgagaagctttattgattggatgaggcacattttagagggttgagctttatttgatattcccgcaggatgttgaagcactcctctagatctttgatatggtcttcagattttttcgacttaactagcatatcattaatctagacttccatattgttccaaattttgttgtggaacatgcagtcgaccaatcttcgataagttgcacctacattcttgagtctgaagggcattactttgtagtagtaaagcctgatgttagtttggaaactcgtatgctcttggtctggtgcgtacatactaatctagttgtagccggaataggcatccatgaatgtcaagagttcatggttggttgttgcgtccaccagttgatcaattcctggcagtgggaaataatctttagggcatgctttgttgaggtcagtgaagtcgacagaggtcgtccactttccattttgtttaggcaacagaacatggttggatacccaaattgagtagaaagcttccctgatgaagttgttctcctgtagtctttcaacttcttccttgagagctttggcatgctctttgtcaaggagcttgtgtttatgttattaaggcttggagttaactttgtctatgttgaaggcatgacagatgaccttggggtcgatcccgatcatatcctcatgtgaccaagtgaagatgtcttgatttctccttaggcaagccatgagaatctcgctcaagtcctccattaggtttgttccaatcttgataatcttggtcaggtctaatgtgtttaggggaagttcttttagttcctcggttggaccaactccccagtcgagttccccaaaatgggggtcaatgtcctccccatccttggcgcacttttaagtggctttagctgccatctctatcttctccgtagtttgactttcggaggtcttcattgtctctctggcttttgcgagagaggccttgctcatccccccaagtgcaatggcaacagaggaggtcttgttcgtcccctctgaattcataacagcagacagcagaggatgtcttcttcacaagtgatagcaatgtattgtagcactctctcccagttccttgattgtgaaggagacaaacgatactagccgttgttggcaacttgatggaaaaatggtacattaaggagattgctcgaaggtcgtaaaaggaaggccttcccagtatcatgttgtacaaagacttcacgtccaccactatgaatgtcgccataatggttgtctgcctcaaggaagtgcctactatgagtagcagcttgatcttgccacatggaggaataccgactccactaaaaccacacataagttgctcgcatggttccaagtctaatagagttaaacccatcttgagcagggcttttttgaataggatgtttgatgaccctccatcgtcgatcattaccatggcgaccatcatattagctattttgacctcaataactaaaggatcgttttgagggtagctgacatgataagagtcttattctccaaaagtgataggttcatttccatagaactgagactttgtaggacactcagctacctctacgacttcaactcttggcttatcttgaagtgattttacatacctttctaaggccttccttgaattcccatctaagcaaggacatccaatcataatctacaacttgcctgcaactcgcacaggctgaagttgagcatttcccccaatcagagcttcaggtcgtacataccactaaagagcagcttatttctatttgataagaaattctatctcgtctcgcaactggttacactcgttggtgtcatgaccataattgttatggtaacaatagaatttgtccatatccttcttccatgactctttcaaaggaagaggttggcgatacgacactgctaactgagtagccgtatatatctcctctcttgatgtcaagagaatggagtaggtggtgaagcaaggctcataatctcgtaagggcttacccccagttttaggcttcattcctccgagggagtttccttgcttgccactgttattggctctttttcctccatttgaacctcctttcttcccattgccctacgccttagtggcaggggcttcggtgtctggcgacttcttcttgccaccctttgagctctttgttcaggtgatggcttcttcgagtttgataaagccattttctttatctaagaagtcattcatggtgtatatcaccttcagacgaaggttggaccatagtctccttgagcctcgctgtgagttccataagccttgcatcctcactaagacttttggtctttccgactgcctctaagaaccattggatgtagtccttaaggggctcatcttcctattggctaacatcccccaaataattgggttccatttagcattatcaggaaggagaaaactgattgccaaaagcatccactagatccttccatgagttgattgatctaggtgagagcttaaggtaccaccattgaggtaggccttccagctgacattatctctcacaccttgcagattagggtcttctctagaagttcccacatccaccgttcttctcttattcacgaggtcacacaagtctcttcttcttccaggtcgctcttgtactccagtctacctgggtcttgtagttgtctcctaaccatggggtcgtgaaggcaactctagtgtggcctccggaatgaactaaggatcgtctcgggatgacctaatgtgggagtgttcaatcagagcattatagtggctacttccctcaaagtagtctatagctggatcacaagtgtgaagagaattgaattgtttgctaaggttcaattgctctctatgtacttgagggaagtacttgtattgttgaacatcgggcccacgggcaaagtaagggcacaactcacccctttcatcttgaaagtacttttgactatgaattttctcattggtccttacacgccggatctcatagcctccaatttcaaagtagtgtctcctactacttcctttagcttgagtagcaggcctctttcccgttgcagggtctcgaggcctagtctctttacaacattgacaaggacttggtgggggaatcctattagttctctcattattgggaggtcattcaacataagggggaggacccattggttggcgccctcgagcttgtgtcctttgaagctcttgatcgaaggtactttccctccgagaagtctccagacctagtgttttcctagttcttgctcagttacaatgtgtagtagttgcataccgagcattcagggtttcaccttgagcactagttcccagatgacaagctgatcgacggggtgtctttctcaccaactcagatatacctctttcgtaagcagttccgtgattagagaggtaagcatccctaatacgtttagataggttacctttctgttgctcctactcaacgtgttggctatcaatgttcatgttacttattgagagagtctcgcaaatattgttgtcagtcacagtttttttgagtagagctaactaaggatcgacctcctcaaggtcctctatttccacgtgtctctccctaggtgggatttggttattgtttccaatcctgagagtagttggtggtggccttggaagatgagttgaggagctagtttcgaggcctactcctggcccttggggcgcaaaagtagtccctagagcagcttcataatgagagcaccaaaatattcataaagcgcgttgctggagtttgtctgtcaacacttgcagagcgcgttgccaccatcttgattcgtaactttcttgagttgtagctcataatgagagcaccaaaatatttactcagaaatctggactagacctctaagccacactcgctcgctagattggtgagaatatgaaaagttgtaaagtaattaatgagagacacaaaattttatagtagttcacccctatatcacgatagtaatggggctacgtctactttgggtttttatttctcacgagatggtaattatagaaattgtttaagaattagaagattcgaattttagagagagaagctttgaccttgtgggtagttttttgaatgaataatgagctaagggagctctccttttacagataaaggaggcccaaaaaaataggaggtaaatatttaaataaagtgttttccaccattgatgatgatctaatggtgaaaattagcttctggagatgatatcttatttttgatctctggcgggtcacggtgcgagatacccgaagcttatttttgtaactcgcttggggatgaattttggtgatgatagctttacaattacacctaggctgtcaaacatgattttatagagggtgtaaatggcttcaaaatgaaatttcaatggcatcaataagataaaaattgagtgagttattgttgttttattaaaggtagttcagtatccagtgcccagtttgacatccaacgcctaggttgatccagcgcctaggttgacatatgacgtcaacctagacgttgtaaatgtgtaaaaacgtccaaggtgactgctttgagatgcataagtaatggtttgtcaccccttagaccttttatatgttttggtaaagctggtcacttgttctcggagatactgctattttgtagaaacggaagactcgaaatttccaacttccgaatgagccaaaattgaagtggtaattttggctgatctgactttatagatcattgcacttgtgaaaaacttgatggtcggttaagatagaattacattcggataagcagaatccagtgaactaggcctttaaaaagatatcctgggcttatgttttttatgcttccaaggctttcaagtctttttaacttgaggataggtgtcttcccttattttttaccatgccagattcaatggtcacagcagatttagaatttgagtaattgaaggcatggtccaaagttgattgtcaacctaggcgctaggctcagaaccaagtcaacctaggcgtttggccatgtttccagggactcgagtttgtggttttctccacaagttcacttgaatctttattatttctaatgacggtagagatggccgaagcactttttgttgaactgaatttgaaataacccaagttgacaaaatggaaacctgggcgcaaggcccagtcgcaagggtcaacctagccgttgggtccctcttctactccttcaaaagttctgtttggtccccgaaaatagtttattttcaatattttctctagaaaaatatgatgctcgaaagaattttgggaaaactccattttttgtggcccaggttggcaaattgtcaacctaggcgccgagccctattttgtctgcctaagaattgtttcttctccatttgaaggacctgtttccccatttttatgaagacagattcaattcaaaaaacaaatgttgaattggaagcttagaaggcacccagatagacaaattttcaacctaggcgttgggtgctcgggccccttggtactcaaaaatcaacttgcttcgaatctaattctaatgcctcaaatatgtccatggtatttcaagtttatgtcccaatgaaatttttggccactttgcaataagacggttccataaactaaaacccttattgaggatgtcaaattgagcgcttagtggaaaccctaggtacccaggctggtgtagttttagctctcggaccttgtattaggttactccatgactgcatggtacaaaatactgaaagatagtgagttgga

SEQ ID NO: 386937 - DNA, 968 bp, Cannabis indica
cattgtgtgattaatatatgaaggatggtttcggtttttttgatgttatttgatttctaaacaggtgacacatggcataaaaattgagagagtctcataatctcactaattcaaatctctcaataagatccagtcacggagaaacttcacagatctggacacacgtcaagactgagagatatgtggaagtctacgtctccttaatttagcgtcccaaacacaaaagatatattaccactctggaacctggagtggtccaagctcacagactgcctaaataatgcctagacgagtactcaaagggcctatcgcggacgttgatagtccaaaagagtcacgaatgtctgccttggatacaaacccggatcgcccatcaacattatgcttttttttgacatagaattagatcatgtctcctgtgtccagacatggtagtgcgcgcacctcacaccttttttctagatgattattccaggcatttacttttcaaggttaaaacttttggcaacacgtgtccagtacgtacattggtcccctattgtcaagttgctccaacgcacgagcacaattccttccaagggatccaacattcagctctttttgcatgtattttaccccattagtgggctttttataaaaaccctaggcgggtcatgagcatttccataccttccctacaacctataaatacccttctatttccattcgaatggggaatcagaacctaaatagctgaaactctagtaatattattctaagctatcctcttcttcaaagagaaactcagaatatagagttatggtttcctgctaaaacactgtaaaaatatcacatacgccttttgaggtcaatagacttactcatggagtaggattaattaacacctaaaccacgtaaaaatctccatttcatttatttatgtattttattatttcttaagctcttttaaatatttagttttcgaaaat

SEQ ID NO: 386938 - DNA, 872 bp, Cannabis indica
ttttttctttcttctcacattctgtttttgcttaggttttttaggtttgtttgtttcttcttcggttttgtcttattttttccttggttttctttttcgtgtttgtcagagagctaatcattgtgcttgtgcttgtgttcgtctctttgaattgttggagatttttctgggttcgaagcctttctgttgaagtttttgtatctatttatttttttttgtgtttttttattttattttagagcttagaaagttttatttcgatttttgtatatatatttgaatgtatgtatttgtgtgatgatcagtgttgattttggttgtttttgttttgtgtttagtttcatctttttttttggttgatcatcttattttttttgtttatttatgcttaaatttttttgttgtgtttattgtttgagttttctagaaagtatacgcaagtatacgtctcgtttcaagtaataatagtgcataagtacgagtattttagccatagctctcttgatattgcttagaattagacgatttaagatgtttcgaaaaactgaaagagagatatagaacttttattcaaaacgtttttcctaacagtgaacgatttatagttaaaaattagcttgaaacttcagacttaattttcgaacatagacgaagcgtgttgagcatccaaagcttgaattttccactcaatatttcataaaacccccaaaatccataataaatccaccatattcatactttgatcatgtttttttctcattttaacccatatgagttacttgataattaaaacttggaataagaagaaaacaagctaaactcgaacaataaaacataaaaaactactaaaatatgttctaaactaccctaat

SEQ ID NO: 386939 - DNA, 1585 bp, Cannabis indica
tcagattactataataatatatataattatgggagataatacaataggtgtagtttttacctattaataagtatagtagtttatagttattgatttaatcaaattgctcatttttgaaaacttaaaaataattaataatttttttatttataattaatttcaaatattattaattatctctaactaacaaaactacacacctaactccaaatctaaatattgagaatgacaaaacacaaacatgaaaaaaagagtctgcgctcaaaatgctttgaacatattaaattgcagtatttttggaatagacaaagatcgacagaaatgcaaaaaatattaatacattgatctcatatagcaagaaaacaacatcgatcgcagatctcatcaaacgataaattgacacccaaacttcaccgatctacataattccacacattcgggatctcacacgatataaaaaccaaaaataaatcaccacaaatctaatccaacaataattctaacatcaacaacatatcaaatgaaattaagacaacagttctgagagaatcgtacctgcatattacacttgacaaggtcaagaggagtaatagccatgtgagtgagtccacagctgaggattccaccgacagtacaagcggcatagaaagcgagagcgtacatcttgatcttcctaccagactcaactggagaaggaacaacgaaagctttccttggagcaacaacaacaacttcgacatcggaagttgatggtgaaacggtggtggtagaacgggcctggaggattctctcgacggccatggccttagtggaggtggaagagtataggtagctagggattagagattgacgcgaggattaatcggagaacgtgacggacggcgaagagaggtgacaattttgagctctggttcgaaatggggaagaagaagaagatttggtggcggtgctagggtttcgcagtgagtattttgaaaactcaaaatgagtttcagggttattactctgattaaaaaaattggggttattacaaaaattaaatcattttgctttggtggataatagtcgtaaattttttaacctctgtttacaaccgaattcaaagaaattggcgtcttttttccactaaagcaaaatgtaaaagacaatttttaaattttacactttttccacagttcctcttttagcgtcacgctaattattttcttttagcttcgattatccactgaagcatataatatttacctattttttgcctcagtcaaccatttttggtgagacaatttaatgtgtgtacctgattttatgatattttggagaaaattattgttgaaaatttgttgttctgtataatcagttttgattctgatttgtcttcaagctctgttttcttgtttaagcagtcatgtttgcattggtttgcaagttcttgttgctgaagaggacgattgggaggaaatgctaaggtcactgaagctggagaagatgatcggcgatggtcgttttcactcgatatcattggtagcagtcaataatggtggaaaaacaagagaagaagaatgattttatgtttttttttttaaaa

SEQ ID NO: 386940 - DNA, 608 bp, Cannabis indica
aacctaggcttattgcctttattgtctgaactaatcccacaaatgtagggattatcttattcttggaagtaacgatgtccatctctaaaattttcaactcagatatcatgttcggtgcatgcgagttaatcacacgattgagctttggaaggatgtctccttatggctatgcttatacatcttactatgtacagttgatatggttcttcctaccaatctttgggggttgccaggattgaaatcttccgcacaggtaggaaaatatgaaactcgtgtcatccggctaactgccatgtcatagtgaaaaaaatgagataacagttgcccccaagtctgcgtgggaccttcctggttgcacgtggacttcattcggtctagaatcttatccgaatggatggcgcgtgtcttgacggttgaagttgatccaatgtgactttgattgagagtctatttggtgtttgagcattaaatactttttaaaagttgtaccttgaatcacgcattgacgggtgaatgacactacagaaagatggttgtacttcttgcaagtagtactaacgttcacttttggagggaaacccaaatattcaaattttaaatgatttatc

SEQ ID NO: 386941 - DNA, 836 bp, Cannabis indica
tagttagggtgttacaatcattgatgctactctggctaaggctaggggtgtgactaggagacctttgagattgatcttaagatgctactggtttttcctctataaagcacgatttagtcctgaaactattcagcatactttgttagagtgctccagatcgagaaaagcttgaaaatcttcaaggaaatatagcattggagttattattttggatgagttgaaccgagttaaagcagtgatatccaaaccctttgttggaagtgttcctcctgtcgtcctgtcgtggctgaagcaaaatcaatttttcatgttattcaatgggttcaaatgctacatctccttgtggatgttcttagaactgattgtaaactattgttgataaactcaaatcctgtaactggaatagtagtttactagatgatattttaatttgtgttaaaaacttattatcgttgagtcctaatctaactattgttcatgtttgtagagagtcaaatgaattggctcataaagttgctaagttaggattaggactagataatgagctggtttggatagtcctctaccttccatgtaacgtgttggctttatattcattgttttatccaatgaagtgcaggttttataaaaaaaaaataatattaaaataatcacatgtttttcaaaataaaagacaaagcacgtgatacttttatattcattgaatgacatttctatcgataaagtccttttggacaccctatattacaaaagggaaatttgaaattctatacttaataaacaataaaattggacccctaatgtaatactatacataatttgtaaagtgggataca

SEQ ID NO: 386942 - DNA, 1824 bp, Cannabis indica
gcagcaggcagttggggtaaggcgttgagacattatcttcctccctttttttcattcttcttaattctgccccctgttctgattctagggtcctttcactttggacaatttcaacaggtggccttgttgcgcgaagaggactgcctaggagacacgctggtgatagaactggagcaagtcaaggcggataaccaggacttgcatagtgctaatgagacccttctggccgagctcactgaggctaagcttcaggttaaaggcctaaagaaggagaaccagttgctggagggcgatcatgctcgatagactcgtctcatacggggtatgagggtcattcatgacctataccgggagacagtggagcagttgtctagagcggggtcctctgacccatctagtggcgcccagtcttgaactttggtaggcctcttggaattattgtttgtttgtttttttgtgtgtatatatgccctccttttactacaatttttaagatgcaaagataaatttttgtgtgttttgcctttttttgttggagatttattttgatagactttttagggtcttgttgtctcatcaaagcatttggttccagcagccagtgtttcaacctttcctgctagtctaaatcattttttggtcaatctagggatggtctcttggttttaccctttcattcccggagctatactacttcttcctaccacttaacctcttattgggaagaaatcccccattaagagttatcctggagatggtattatttcgcaaaaaaggagcctacgcaacttcacgtatcttcttgaggctttatttcttttacgaggttaagtcctacgagccatgcccatgattgctttacacttttaggcacttttcttacttttgttcttgtcagcctgtcattttagccaattatgcaacccgatggactaaacttataggaagtccacaaatatttgtaagaaggaattcgaacatattttttcctttccaagaattttggccgaatacgcatcttatctccaaattcgtacttaagtttagcctttgaggaaagaattcaagcatgtttccctgaagaagagttagttgaaatggcttcctgcttttggttgcatgtgtacatttcgaaataataattctagcaaacagacgtaagaagttgcagttatcagcaatcgagtgtaccatacccccaaatgagctaggaactttggtctcaaattctcgatcatttgcttggaatctagtttgtgtcctttgaagaggaagtataagtgcggttctgcttttactctaggaagcatactattcgtccaagccatgactttcctcttcgtgaccacttggagaggaattcttgaaagtgtagcagtaatctctcggtcttcatgagaaaatgttgtggggttgtaggtaaaaactctgttgtatggctggccctaaatgatactccatggcatggacctgtaagggaaagtataagccttcgcactataggcttctggtttcccgaagggaaagtgaggccttcgtctttgcacaggcaattttccttacgatgttgttcgtttgaataagcaagagtcatgccgaattctataatggcaaactttcgctttcacttggaaaggctaagagtgcacaaaaaattcaaacattgacttttccttcagaagccagagggtgaaacattacagggtgcgtgagagtcatgttaaatttttatggggcaagcttcgacttctacgaaggaaggctgaaattgcataaaaatttaagctttgactttgcttgaaaagatcaaaggaagaaagcatc

SEQ ID NO: 386943 - DNA, 1607 bp, Cannabis indica
tattgtaacatttagggttttctgatgatggggctttactcttagttctaggtccgccttccctacaccatttgaccttgctccggtatatcccttgtcgcggcttttcaggggtcgtggctttaccttcctcatgttatgatttggtaaaggggaaggttgttttaagtttggcctcgttttaaataaacttcggatctcgagttttgttttatttatgttataatggcgaatgtggattatctaagcgtctcatctctggtttctgactttctttcttcgagtattgctcctgggttcatcgaatccctgttggtttttgatactcctcccatggagggtgagaatgtcgatgttcccgcagacccggaggttgagtgcttaggtagtgtttccatcgtcccccgttcttgctcctagaatgaggcgagtatcagtggtcaagtgatcccttctgaaggggtcaccctagcggttcctccactgaagaaatctaagaggaaacaatcgactctgggaagttcttatttggacgttaaatcaagctgtccgtcagttttgacacagtcagaacgatttcttagtgtcttcttacggttttctgtcgggagttgaggttagactccccaagctgcatgagagggcagactcccctcaggttgagtgggtatgcctgcactcctactggtttgagtcaaaaatcagattaaggctgcccatccctaagttaattaaggagttccttttgcattactcaattgctcctgctcaattacttcctaacgtgtgggctatccttttaggtttaatagttttaggggataaggcgggagttcagtgggaagtattcgacgttgtccatttttattcattgatggaaagcgagcaaggacattaccatcttcgtcctaggaagaatcaagctctcattactgacatagagacttctcataaagggtggaaggataggttcttctttgctaaaggccctattaaatttgtttccgacgaccctacggccctattcatcaaccggagctgagtagctcctggtacttccttcgcccctgttgttaggatgtccctcctctttgttgccttttctatttctctctttctcttcttttttttattcactgctatgttttgatttttattttaacaatggtgttttcgtgcagcttccgccgacaacgcagagacggttattggagatatttttaacgagaaggttcgtaaggtcacatccctagatccgaagttttggtcgatcaagtttcttctttccagcgaagccttaattgaatcctccacctggcctcgtgaactcaagatccccctaggtatccccactccttatccttcttattttatttggcatgatttcttaaaatgcgcactgaagcacttgagttaaacacccgaaccagttttgatagtcttttctgagaatcattcccaccttgcagaaacctaccctcgtcatcttcccaaaatgaggctatttgaaatgactgtcgaggagatcgaggctcaaaccgatgctcggcggaaaaggcttatggcaaagtgtaacaccctaactagcataggcgtattacgtgatt

SEQ ID NO: 386944 - DNA, 1284 bp, Cannabis indica
tttgggtggtgagtgagtgaggagtttgggatgagcttgagtttagggtgtattctctgtagagagttcaagattccccctcaagttgcctatgtacccttatataagggaccaaatcccatcgtagttcagttggagggtagaatagtcattccactccattattcaaatgtgttcacctatcgttgtgggctatacacccactttctcgtggataccggtccatggcctaagaaagtgggaatagttgtaaccgccttggagtagtgtagtccattaatcgtgggcataaccgtttcaaggctagacttgctctaaatggactgtgcaacccacaatcgtgggctgaccacgtggttcaaatgagcctccatgtatatggacttaccactccttggaccatatcacaggtctaagtatgtctaaagaattgttgtgggttggcctacccataatcaagttaggttgtatagttggtcgtacagatcatatacactgtaatttaactaatagacgttgtaatttaactaaagcctattctataatttgggcccttgagttttcttgtggagcccatgaagggagtggcttgtacagacagcctggtggtcatcagctataggttatgggcttattcaactgggccaagatctaattagaaattttacccttacaatttatcccccactctctaaagtggtatggctattttagagagtagtttgatggtgtctgacatacgactttgttgtttgtagagactatgaaaaattcgtttatttcatatatagttaggttcaaggtgtggtgtgtggaggacactatgatttaagaggtgataatagtgctcatatattatatggtctgtagagataatatcatttttgagtaatgtaggttgtgtattcacaattttctcattttaataagtgaaatcctatgaaagtaggaattttatgttgatcgtaatggaaacgattaaggaaagtatcttgaaagatcttcagtgaattcctctagtcagccatttgcgttacgcgacttgctcgaatccctcgttgcgaggttagatcttgagcccgttcgactaataatcactttgagcatttatacttcaatttaatttggtattgtcttgccctactggtacattctggtgtgatattatgctcaagaacgaattttcttgccacgtgttagcttgccaagtaatcattagaataaattttgggataacaatatgtatatatatgaaaagaaaaaaaaaaaaaaaccctaaaagta

SEQ ID NO: 386945 - DNA, 2132 bp, Cannabis indica
cttttttttaatatgctgttattacatctcgagtaattaatgaaagattttatttgttgcacaatatttatattcccttttttctaatgagaaacttatattatgattataatattaaaacaatttaaaaaagaatgtgagaatacaaatctcaagtaataaaataaataattaaataaaaaaatgcttatgacgtgtaggattttggggaacaaaatctctaaataacagttgattgattatgtatcatctcacaaatatattattttagggtcacactgaaagtctcactgattgccaaatgtcaaaaaataaatcagatcggtgcaaactactctattgttaatattttttcttatttattattttttttttcagtgatctttaaagaattattttatatattattattttttttttaaaatttaaggtttagattggtctgacgttctttgaataatttttaagtgggttgttatgcagattttaattgcgatttagattactctattaattgctatgtgaattttgaaataaatttaaaatgtaaaaataaaaacatcccttaattttttttttttgcaatactagtaggtatctcccgacaacttttatgtagttaataaaatttcattatggagtatgagaaagaacaaaggaattgagagagaaagagaattactatgtattattatgtttaaagattatacaattagatatttatacagaagctcagttagttggaagtaactaacagaggtaaagatcctaactgaattggttaaaactagtacaagctaatgagttgaaaataacagaaaattagctgagatggacaacttgtaatagcccccttcaagatgatgtgtagatgttggatacactcatcttggagacaatattgttgaacggagagggaagcaatgctttggtgaagatgttagccaagttctgttgagatcgaagatggagaatctttagggacccttgctgaatgtcttctcgaatgaagtggcaatctattttaacgtgcttagtacattcgtgatagacggggttctcactgatgtgaattgttgctatgttgtaatagaagaggaatggatgtatattgagtgagatgctgaagtcctttagtaaagcaatgatccatgttacttcagaagttgcattagccatagcacggtattcaacttcagtagaggatcgagagataacttgttgtctttttttatttccatgagacaagagcttgccccaagaacacatagtaaccagaaatggaacgtcgtgtatcttgacaagttccccaatccgcttaagaaaaaaggaaagttgaaaattggatggggacaagcttgttcagcatatactaagatatttggagaggtattggaggggaagaaaagaccttgtcctggtgtgcatttgagatactgtaagacatggtgagtggcttgcagatgaggcaatcgaggacaagttagaaattggctgagatgattcacagcgtacgagatgtcgggtcgtggtattgtgaggtagataaatttaccaattagactcctgtaggtggtagggtcttgtaatggtttacctttgtccttgctaagttttaggttgggctccataggagtcgaagcaggtttggctccaagataacatgtatcttggagtaattgcaaggtgaatggcctttaagagatggaaattcccttcttcgttctgcctatttctaggccgagaaagaatctgacggaaccaatgtccttaagtttgaacttgttctccaagaaggttgtaaaatgtgtaatggctgattcattgttgctggcaacaattatatcatcgacttctatcaacaacaatgaggatatctggtgttctttttgtgaacagggtgttatcaaatagggattgtttaaagccttcagttttgagtgtggtacttaatttatcgcaccactgtctagaggcttgtttaaggccgtatatacttttgttgagtaatttgcacacaaaattgggtggtgcattatagccagacactacaagaaaaatgagtattaatgaggacaaatttcgttggtaaaaacccctgttttcgtcagtattcctcatcaatgaggaca

SEQ ID NO: 386946 - DNA, 1352 bp, Cannabis indica
ttgtgcgagtgagatagaacaatggacaaagaacaaacatgaaagtttttttttgtttttttttttgtttttgtaggtgaaaagcttgataataatgccaaataatgactcattaaatgattttgtgtctatttagttacattatatgttaatgagatctttaaatgttttaacaggattcttactaagtattgagaaatgctaaagggcaccagtggtgcttagcacttttttatgtatcaatattgttattggtccaactagtattagtggtgtctagcacttctagatatatcattttataattggctaacgatactctttaaaagttattacattaaagtatatgagatctgatacttaattatacaatatattaacacataagagagtgataaatactactaatgctttttaacatttcttaagttttaaacacaaagttataatattataaatgcagagcatttagaatgttaacttgtaattaattagcgatatttctttaaaaaatattatattaaataatatgcgatcctatacttaattgtaccaatagcgatattaataggtagaatagtgctatacactattaataccttttagcatttctcatataacaatatctttaatgaagcgttaaaataagaatattgctattagacactactaccaaagccgaccctaggcataagcgggctaggcccgcgcctagcgcccactcattttagggacccgaataaaaaaatacctttaaaaaaatatacatacttttttaataatttttaaaagtaccatttatctttatagtaataactcaattttttttctatgatccattaaaactaagggccgaccctgactactattatgaggtggaatcttaaaaataatactctgagatcgggtttggggatgagtccaagtttgagtctgtggccaacgttagggtctgcatcaaggtcgaggctagggcgggagtattggtatgggtttgggttcaggtccaaagtttgagttggggtcagatcaaagttactagttttatgtcgggtttaattacatatcaggatataagtattgaagttttattttaaaaataaataaaaataaaagtcgtttttagaaaatattaaccagacactttgtatttataaaacttcgaaaaataatttttacaagcctataatgtacacaattctaatataaaaagatattctaaaaaacatttataaataccaaaataaataacaaatatactacataattctaaattttcacccattccaattttgctaagaaaatatattttttttctttttttaaaaaagtacatatatatatttatacta

SEQ ID NO: 386947 - DNA, 815 bp, Cannabis indica
atggaggaggcagcatgccaatcaaagtgtatattcaaagatctccatacactcttagcatatttgcaaccaaatagagcgtggccaactatttcccaagcttgtcgacaaacggagcaagttgaatcggttataaccttccttcggacaagagctgtggcaacggggagggcgtcatgaataacccgccaggcaaagattttaacctttggagggagttgaagcgaccaaaagaacttcctccaagacgctgctgaagtagaactcgagttgagggcagagtcttcaagtgatgaagccaagtggtaaccggattggacagtgtagtagcccgaagagtgatggtgccaaataagggagtcatcgctgctgaaatagctcagaggaatagttaaaattctgtcaatatctggcgttgaaaacacttgctgcaacatatcaacattccattgtcgttcctctcttataaaatttccaacaacacaattggaggggcccgagtagtggataggcagaaaattagtgtggcccggaatccaaggatcaaccgcacacctaactgacccccacctattttccatctcaaaccttcaactagaagttctctaccccaatgaatgccttgccaagtcaatgaaggagaatggccaacatgtgcttccaagaaggtgttgttcggataatatctgcatttcagcagcttaccaagcaaagaatcaggttttttcacaaggtgccaaacttgtttcgcaagaagagcttgattaaaatggacaaagaacgaaaacccactcctccttctccctttttcttac

SEQ ID NO: 386948 - DNA, 979 bp, Cannabis indica
tttactagtaacattgcatggcacaaaggaggaagaatggtggttacttggaacccgaataccttttgcattaatatactcaagtgcacaagccaattgattcatcttcaagtgtccgctttgaatggtatgaattgtcttgttacatttgtttatgcttttaatgatgaggagggtagaaagatcttatggcacgacttgatggccattgctactcaagacccttgggtagtgttgggagacttcaatgatgttttggaacaagaagaaagggttggaagcagagtgcaaagcctcaactctcatgctttcaaagattgtatttcatactgtcttttggaagacattaagagtagtggaaaattctttacatggtgtaataaccaacaagggggagaccgaatttattcaaaattggatagagtaatggctaatgcaaagtggatggatttatggttgggtgctgaagcgatttttctaaatgaagggatttttgatcattcccctgctttagtgacttttcatcagcttaattgaaatgggaagaagccttttcgttactttaagatgtggatttcccacccagaatatgcaacccgagtacaacaaacatgacagcaattgcatttttctggcacaaaaatgtagcagattgttgccaaactcaaggctctaaaaccggttttcaagaagatcaatcaagagggcttcacggatctgcaatctgcaaccattcaagtagctagaaccgtaaatttttgtcaagataaattgctcctagaccctcaaaatctagtattgcagcaggaagaatcgtatgctaggatagcttttacacaagcttacaagaattaccagttatttctccgccaaaaggcaaaaaccagctggataagagatggagacaataacacagcagtattccatgcaagtctcaaagccagaaacaaccaaaatagaatcctatctattgtggatg

SEQ ID NO: 386949 - DNA, 505 bp, Cannabis indica
taaacgtttgcaatttcattgtttttttttttccgttcattagatggatacgttactagatacataataatcttttctaataatttactataattgtatcgtttaagcaatgattgtaatatatttttttataactgcaatgattgtaatattataacataataattatcagtttgatatactttttaattgtacgatttctcgtatgatcagcaatcgagcgatatatatatttatatatttgaacacatcgagtgttatatatgtacgttatttattttttttccaaatcagatattttatatcatagttgtccaatcaaaactgtagtttaattgatagaatttatcatggagcatctattaggcaggtggtgttttgcaaatgtttaaccgtttttctaataataattattatgttaattgttaaatataaggtgtcattttaaatagggaaaaaacaaaaaaatacaaaaaggaaaaaaattacaaaaatactttgggcc

SEQ ID NO: 386950 - DNA, 592 bp, Cannabis indica
gttcattcacttgtggaccttgtggtgctagttgtggtctgacttatggctaataaaaagcttgagatgattgtgagaattgccattgtggctgcttacaaaggttgttgactctaattattgtataatttaacaagtgcaaataatttagtaaacctattataatttggataaataagattttcagtatcttctaaaacagtttgaagttacactgaatcaacattggattcatattgcgcactgccaatcattttcgtaatgtgattatcttcataatataaattaccacacttatcattcttgaaagctactcccttgaaattctaattctttccttttggcgataccaaaccttataactcttgtttatacaactcttaaacaaatgttcctttatattgacaattttcatacactctatattaccacatttaaaacaaggacaatgaactaaattaagattttttgtactctttgcacaaaactcgaaaaaataatcaacaaaacattcaagattaagttcaattaatttaggtggcgtttggtaacactttttaattaatttttttgtttttaaaagtagaaaagt

SEQ ID NO: 386951 - DNA, 611 bp, Cannabis indica
ctaatagttttagttcccctttttcgtagcaatttatggttcattaattctcctctagctccctatgttgcaaaactttaatatggtgaagtttgctaagatgatgataaataaatttgtgtgatgagttcctgacaaaaaaaaaaaaattatgaaggacacccagtatttttataagggaagaacccgaaatggaatactgattattgaattttttttgcgttttcatttagattcaaaattgatatttaagttattcaaaaaaaattgatatttaagttcttaaaaaaaaataaacttaaatattaagttcaaaattttctgaatttgatgtatatttttgggttgaataaagaaatatagttgttggttttattaaagctcataaaatgtttccataaataaaaaattaaatgaaatgaagtgaaataaaaataaaaataaaaactagaaggagagactactgattttatttttcaatcactcaattatgataattttacctagaagaaggaaggtgataatgaacaataaatgtgatctttaacatataaaaaaaattaaaaataaattattaaaagatattcttacatctgtccaaaagtaaaaaa

SEQ ID NO: 386952 - DNA, 1131 bp, Cannabis indica
atatatatatatatatgagtaagatcaacttatccctcaccaaataattaaatttgagaagtcatatataaaacaataaattaaataacattgatcttcattatcatcacttacataactatttaagggctcgtttgaaacgtcgtattaggccgtattgtattgtattgtattatattgaattggattatatatcatatttttatatactatgttaaactttaatttatactaaaatattatatatttaggtgtccataaaaattaataccacatatagttttacataaaaatattacataaaatacaattcaatataatacaatacaatacaatacgacctaatacggcgttccaaacgagccctaaatgatataaaccgtccatttaaaactaactagatacaggaaaaaggaaaaaagatatataaaaaagatcaatgagtaagataagaataatatggtgtcttctcaactcccaggatcaaaatgggttcttagaaaaagaaaataggaggtgagtttacaaaatcaataaaaaaaaaatacaaatatttaattaatatcaaaagacccttagttaataaaataaaataataataatcattattatgtttaaacaaaagaaagtgaccatatgtagtaaaacagaattgcagagaaagaaaaagaatgcagaaacgaaaagaaaaaaatgaacagcttactttattgaattgaaagaaattagtatttatacaagtgtaataaacgcaagaaaagccaaaacagaaaaattgaaataacagagcagttagttgagaagacacctcaactaacttttaaccactttaacaaaacacttagttatctgttacatctcccctcaaactaaatggggtagagaccatttttagtttggattttagataagtaaagcgatctgctgagaaaaacttagtgagaatatcagcagcttgatcgatggcaaggacatagcagactaatatttgtttggccatgatttgatctcgaacaaaatgtaaatcgatctctatatcacgacaccaaaaatcacaattagtgacatttttattagtggcatttttttaaaagatgtcacaataataatattttaatgacatttgttaaa

SEQ ID NO: 386953 - DNA, 1063 bp, Cannabis indica
ttgaaagataataagaaaagtttgtacataattaaggtaatagatcagaagcttgaaaaataccatcgggagagaaatataagctcagcgccaactagtggacagctttgtttgcatatcgttcaacggaatgtaaagaaatattataaattatttaaaagactcttatagtcatgaaccaaaaactaaattctgggcatatgcaaattactctcaaaaacttggacataaaatcagatgtctgtttccagtagaacctgatctcattggtgtttatctatccaactcaatgcatcgcctttgatatcaatgattccagctccttcttccccacggtgaaagcttttaggacttagccaccattatcactgttaatttagaaacttttcctggtaacgtgaacatcaatgtttgacatgtggcaagaaacataacatttcggagttgagtagtctccagtcatagtagtcgacctaggtagggtccttagccatgcgcccaaattgactctgggaactccgaaatgggtgttcaaatttcgataagttgtttccaactcactatattttagtatttagtacaataaaaatatgaagcaatcaagaccaggtcttaggagctaaaaatatatgaatcagcacctcaaaaatcaacttgggcacttaggatttcacccagcgcccaagttgacaactcctactagggtttcagtttttgaggattgtcgtagtgcaaatgggtcaaactttgcactagaacatgatctggatatatcaaaaaaaaaaaaatatttgatgcatcagagttagatttggagaactttcatttttgagcacccattgcccagaagcatcaaatcaaaaatccgacatgtgcatctttttcgtctttgtaaaatatggggattgaattatatattatattccatagaatagtatatatttatatacaaagttatgagactaaataagaaactactaaatacaatttacactgatttttacagctaatattctaatactccccctcaagctagagcatagatgttaatcatgcccagctt

SEQ ID NO: 386954 - DNA, 1025 bp, Cannabis indica
atttccctttgaacttttgtaatttgacttaactcctacttaattattggcctatgcttttcctttttcattaattataataaccatgatacgtacacaaacattcacttaataaaaaattgatgatatcttaaaaatggtgatcatgttgagtgtccctttttttgttctattatttctttattaaagagatgaatttgaagaaatataaagacgccaccgcgcaccaaaagataaagataaagatgatatgtatattataacataatttacatgatacgtataatgtgacgagttgaccaaataaacataaatgaaactgaaatttaccctttttaggagatgtgtacagatgttgtttctgctaaacttagcaaccgtttcatctcactcgttttggtttattacgacttgacttaaaatacaattgcatataaatttccaataaatagaccatacatattaatttagaacaaatagtaatacatagaattctggaaccaaaagataaggttttcaattgtcttattattctcctcttttgaggttcatggtttattcttcaatcaatacctctgttcgaagcttcgatcaatttattttttctaatgggtagtatcaccatggaatggtctgcaacatctgctacaagggcttatcttgatacccttaaattggtcagtgttatattataagcaattttgttcctttggttattatgaactatttgattttgataaatcaatgttgtaattgattaaattgtttgttattaggtggggtttcgtatttgtagattgattgagataaatgaaaatttgattgtgcagttttttttagacaatacattaggatctaaaaaggttaaagattttatttaaaaaaaaatttccctgtttgaggtggatgaaatgaaactatgaaacaacagattattgttacatggttttagattcttctaatgagtgagaagattaaggatttgattgaattcttattttttattgaaacataataaacattga

SEQ ID NO: 386955 - DNA, 378 bp, Cannabis indica
aaaaaaaaaaattatttcacctccaatagccaattttatcaacttgacggtaacttgatctagtgaccaaataatgcaaataagacttcttgttaagaaaaatacatataaaatttcgttttgtctcaaagctattttttttttttattctactttcttactttaattttaatttattttattgagtggttaaattttagctgcttgtataattttatttctctaacttatttcttactaaattactttatagattagctcacatttatattttaggaactcaacagtgctatagaaaaagaatattaataatagacattgacatcaataatttttgtttaagaagtgaaatgatcattttcttttagcttggttaaa

SEQ ID NO: 386956 - DNA, 865 bp, Cannabis indica
gagagagagagaggttggggtattaaacaccaaattacaaaacttgcaattttcaacttatgaattagcctgctctgaatttaggagcaaagttaactgtagccaattataacataactccccattactgacttatggaagcgttgtaacatattcagtatccttgcccagtacattaaattaaaaaacagtaaacatcagtacccatcacttaatctacttttatacatttaaaaaaatctaattttacacattaaaaataaataaaaaaaaaaatacaaacatagatctcgatacgaatgaagacatagatgaccacacatacacattaaacaaattacaatccatgaaaaacaaagattagagaaagaaaaaatataccttgttgttcaagggccatcatgatcatgaacgtgatcaagaacaagacgattcagatctccctcgaaaattttccacctaattaatccagataaaagacatttataaaaatcgcaaaattaagataaggagaaagaatttagaagagagtgggagtggggggagtgggaaagagtaaaaggaaattacatgctatgaaggcgaaggaaaggaatcggaagagcaaagaaataacagttgttattgttcttagaaacctaattgagaaacagagaaaggaattataatagagacgagaagtaggcctcaaggaactctctccatactttctcttcgtatcgccgtaggaaatgggctaacatggaaaacggcccaaatacattgattacgttaatgaaaattaagtaagtattcctgccaaaaataaaaaattagttaataaaaattataaaaatttacttattacatatttatttaattttaa

SEQ ID NO: 386957 - DNA, 624 bp, Cannabis indica
aactatatgtttgtctctattgcgatttattgcgacgaaaagttgttgcaacttcatttagtttatcagagacaaattatatcattcattttaatttctagaaccttattgcgatgagtaatggacacagtagaagctatattttctatataatttatattgcgacgataaattatcagaaatagaaatggcggtaaacttgcctccaaaatctattgatttattgcaacaacattttgccacaatagaggtcaaaatactttagagggaacaattccgcataaaaagtttctgcgccaaaaaatgaatctatgaaatagactattgcgacaacatgttgtcgcaatatattatgcaaataaaaatttctgttgttttaataaaatgagcagaacgatggcgtttggtatacctacagtgacaacatatcgtcacagtaaagtctggacttctatttaacccatgatccatctttcttctcatccatcccattctttttctatggttctctccacaaacctttcacatgtccacatccacagtaaggccttcccaaaaccttgtcctgtgcaacctcagtccaagacccatgagctcaatgtagtaattttaatggtgtttagt

SEQ ID NO: 386958 - DNA, 953 bp, Cannabis indica
cttcttcatggtgacttttttggctctgaccatcggcctctcattttaaacctacatcaccaagtgcattctacatctcccaatccgcgttttatttttgacaaactttggatggctgaatttggctttgatgagtgtcttcgccaggcttggacttcgggtcctcacattaatggttgtgatccaatcataagcataaataaaagacttgaacagtgctcatcttaccttcgacagtgggaaaagacccttggcccatccttaaattccaaaataagggacactaaaacacgccttaaaaacgtgcaaaactgcccttagccgactgatgctcagcttatgcttgggcgaaagctggagaatgaacttgatcaactcttatataaagaggaagaatattggaaacaacggtctcgtgtaaattggctaaagcttggtgacaaaaatacaaaatactttcaccaatttgcttcctctcgaagagcaaaaaataagatcatttctcttcttcgccctgacggttctattgccaaggataatgactcgttcgctcacatcattgaacaatatttttctcaactctttgctagtcagaatcctaatgatgaactaatggagcacattttatcaggcctaactgagcatctttcggagtcagaagctgagtccctcaatggcatttatacggatgatgaaattaagagggctgcttttcaattggccagtgataaggcaccgagttcgaatggctttaatggcactttctttcaaaaaaactagcatattcttggccaggatgttctccttgcagcgaagggctttctcaatggggatggaaaccttggtgtaatgaataacactgttattgtgcttattcctaagcattcccatcctcaacaaatcactgactgcaggcccatcagtctctgcacaaccctttacaaaatcatttc

SEQ ID NO: 386959 - DNA, 1327 bp, Cannabis indica
aagtggctacccctacctgacatcctaggcaaaggccattgttggagagtgatgggagaccatgcttaaaatccatggtctagctcttttaaactaactctttctaatgagttaatagaacaactactggatagtagaattcatataagccggtcattgttagtacttctggaggtgctccatattcaatatcttggtaggagaaccaactccatgttctcattgtaccttcccaacttgtaggctaccgtacttgttatctgtgtaacttggtaggggtcttcccagctaggttcgaacactccttttgcaaaatctttgttgttcaagaatgctcttcagagcactaggtttcctatggaaaacttactttccttgacttgtttattgatgtgtcttgcagccttttactggtaggcatacaactttaggttggcttgatcttttttttcttctacttcctcaagggattctaccagcaagatgttatttatatctaggtcatattttatccttctgtgagacagtagcaccagctctacaagcaacattgcttcatagccttatgctagagcagatggagtttgtctagtggccatcttctcagtggtcctttgcaatcagaggacctttgggagcaattcttgccaattaacttttgcctcttcaaggtgcttcttcaaagtgtccttgagagtcttgttcacagcttctacatgccaattttcttaaggatgggccatggtagagaagcttttaatgattccatgtctattgcagaaatcattgaacatgtcactatagaactgctttttgttgtctgaaacaatcttctgtggaagtatgaatcgacatatgatgttcttgacaataaagtcgacgactttcttgataattattattggcaagggttcaataggtgtcatccaagttaaattgtcatccaacatgtctacttcttccgagatggtaatgcttggttctttcaagaactctattagcaccaagttttccttgtcggtaatggtgctacttttaagaagagcaagttcatccgttgtggcattctgttctatgaggatttgcctatttgtatatcctttgagtctacttagaaagtcttgaatcttgctcaaataggtcatcattctttcacctcgagctatgtattcacctaggacttgatttacaacaagttgagagtcgcttatatgtctaggtggttagcccgtactttgtacaccagcttgaggccaacaatcgaggattcatacctagcctcatatttagaggctttgaagccaatcttgattgctctgttaagttg

SEQ ID NO: 386960 - DNA, 902 bp, Cannabis indica
accgccgccgccgccaccacaacagcaccaccaccacaaccacaagcagcaattaacaatccgacagcaacgaaacctgctcagctccgacaacaaccgtaccgaccacaaccacagtaccgaaaccgtcacaaccaccgccgtcgtagcaaccgcaacatctgctgctgctgttgtttctggacgattctcttactcctcttactcggcttactcgccgccatagctgccgctgccgtctacgtactataccacccgaacagacctcaattcaccgtcgattcactccgcattactaagctcaatctcacaacttctccagacacttcttcatctcacctcactactcttttcaacataacgatctcatcagaaaaccctaacaaccacctcaccttcttctacgacgctttcaccgtcaccgcctctgccaccagaggcggagacatccaaatcggtaacggaaccatccctgccttcatcagcgacaagaagaacgagacgagtttccgtacgatcgttgcagcttcgcaggatctggatacggattcaacggctgcgattagatctgatctgaagaagaggaacggtcttggtttgaagattcagatggatacgaatgtgaaagtgaagatggagagcttgaagagtagtaagaaggttggaattagggttacgtgtgaaggaatcaaaggtgtggtggcgccgccgaaaggtaagaaatcttcgccggtgattgcgtcagtttccggcgccaaatgtaaggttgatcttcgaatcaagatctggaaatttacattttgatcttttttttcaaaattatttttttttcaaatcctttcaattatgccaattttttttaatttgattatttttgagaaaaaagaaaaaaaaagaaatta

SEQ ID NO: 386961 - DNA, 1645 bp, Cannabis indica
attcgatacacccatttattgtctattacatgcatgccatgatggtagggaactagaacccaagtattatttttctttagagcatagtattcttcccccatggctttattccataagggattgtttaatgccatttttaaagaagtaggttctttgagataacattcatagtcatttaactcagctgcaagggcttttggtttaaagatgccagacttggatcttgtggtcatagggtgtttggatgtggtgcttgagtcatgttgagcattggtagggatggaaacgggcaaggcaggttgagtgggaatattggggtcaattcttggtgatgcaggtggctgtagaggaatgtttacagcagtggtgacagcagtatggtgagagagagagattggctcggttcttggtggtgtaggttgttgcacagattgtgtaactggtggtgtgatattgggattgaggagaggcacattagatggtagagggagatactgaacagtaggagtagatgagacagacttggaatcggaagaaaacagttgggaatagggaaaacatgtctcatcaaaggtgacacttcgggcaatataaattcgacccgaggaatgtagacatcgataccctttgtgttgaggactgtagcccaagaatacacacatggaagttctgaaatgaaacttgtgtttgttgtaaggacgtaatagaggaaaacatgcacacccaaatgtttttaaaaaggaataatcgggtttggagtggaacatattttcataaggagagatgtattgattcttttggataggaagtctattaatgagataggtagaggagacaaaggcatcccaccaaaatgataaaggcaaagttgcttgtgcaagcaaagtaaggcccatatcggtgatgtgcctatgtttcctttctactcttccttgttgttggtgtgtatgtgggcaagggtgtctaaaaatgatgcctaagttataaagaataggcttgagaggtctatattccccaccccagtcagcttggactgatttgattttggtgttgaattgccgttcaacatagttgttaaagtgtgtgaaaacactggcggtttcagattttgcagtaagaggaaaaatccatgagaatttggtaaaatcatcaatgaaacagatgtaatacttaaaaccttcaggtgaaggatggggtgagggtccccaaagatcagtgtgaactatttcaaatggtgcatgggttctattttgtgatgagggaaatgtaaattggtgaagtttgccatattgacatgcatgacagagaggcatttcagcactagtaatattgagaaaatggagaactttattgagaacttgttgattggggtggccaagtctattgtgccacaatgatacaagtttagaaactttattacaagaattgggaacacttgtagtagtagaatttttagtacaagatgaagtagagacagcatgtgcttgacagaaagaagcatttcttgcagcagcaggggctgggagatgctgtttggactgtggagtcttgtgagtaaacttgggtgctatttggtagaggccatctttaagggcaccctgaagaagagggatcttcgattgattgtccttgacaaaacacaaat

SEQ ID NO: 386962 - DNA, 944 bp, Cannabis indica
tttttgttatttaaaaaataattgtacatattaaactatgtgataatctcacataattcagaaactaatttggtattatctatgtacattatacataataattttattatgttaatttgattcgtctaacatatagtatttttattgatgatattaatttttattattattcgtgttttcggtaagagacatgtggattctaaatagaagtcaagacctatcagtgggcccaaacaacatggactaggccgagcccaacaccaacctagccttctgggaaagcaatcacacttctcgcttaggcgagcttctgccaaggttactctgcatctggaaggatcctagttccgtgtatctggaagaactctttagcatgtatctagaagctagccgtagtttcccgtttactgttacgtgcaaaataagaaaatcactttccttaaatattggacaagaataaatatcaagctaaaatacataattaaagatcaaataattaatatcgcattaattatccataatcaagagatacagtatgaatagctatgactgtgatcaaaatgccaagtcaacatacagctactgcctcatgggctagacttcacttgataagcacaaagtgatgtattacttgtaaactccccatcaatgggaaagggtaacgaagtatgacctccactactctataaatacacattgagtccctcatacaaaatgttgaaattttttgcctcacaagctcgagaagagaatagagtgctcataataatacatactcgtggactgagactcattaacgctccaaccacgttgtaacgccctaatgcttaacgtgccgtgtgacagttagtagtcccgtgatccgtaagggaaaataccgagtaagctgtacaatcccacatcgcctggggaaggtcaagtgggatgattcagagactgtgtag

SEQ ID NO: 386963 - DNA, 2746 bp, Cannabis indica
cacgctttgctagtagtaacccaagaaccagtggcgaaactagtactagtggttcaactagtatgggtgcttggagccttgagcatatttgtgcaggggccatactctctctccgggactacttcaaggattacataaatcacatcgaggtttccccattccagttgactcccattgcctacaaggttctcgctagtttgaaagtattgtacaaaattttgaattggggttgtcccacacccgtagagattgcgtatctttactcagttaaagtcgttccatcgaggaagaatgccgcagtgggctttttctgtcttggtactcatgctagcgagccaaaaattattgtagacctgccaaataaggtgtccttcaaggacaacttcttctggatttctagtctctcccccatgggaacaaccacacttcgcaaactccataagtgattgttctcttctttcttacttacatcagttttccttttttttaagtactcgactaatgttttgtttattctgacagctcttctaacgagacctactcctacctccgagatggttattaggcacaggcttcttatgactctcccctacggtcttcgatcatgaaaattcctcttaaacaaagtaaacttgcgatcagcgggccttctcggtgacaaaaaatacacatgtgattacaagattcccaagtattcctcttggcagcaaataatcgttccacccgaggatcaggcctgggaccgcttggcccaagcacaataccttcaaagcacttcccctcaggaattcggtgaaggagcatcccgagataatcaatgtggctggtccctagtgtacttagggctgagtgcaatacaggagttaccttccaagactcttgttttaatttttacacttggaatcccattctcatggaccttattgctcataaatttgacaattggtatcctatattccacgtccagattaactgtcacgagtcattttacggtatagccgagcaatacagtactatggaagatagggcaggtcacatagatgcgagttgggatttagaaccaatcgagccttttgatttattcaaaattacagcctatagggattttagcgaataatatggtccttctaccccttcttctagtgatagctcgccttctagtgattttgttaaatcccttaggtgtatactcttcccctttttaatcgtattttataatgattgtaacgcctcgtcttgtcttgtagacatgggttacgaagacatcctagatcgtaaggggaagaaaaggtcatccaaccctggagtccccactgccgccgaggtggttcctcccaagaagcaaaggaaaaccactactcaaaagaagaagttaccggctgagcctattgatctcgaggtttcggacaacgagatcaaaaagcaagttcctcctccagtcatttttcacgccactgcccctcatcccaaggcgactcccactaccgcttctctgaggcagtccatcgacaccctgtcagtcgcagctggaatagttggttctgagtttgccaaggcatacggggtcacttgttccttccctcagattgggattttctcaatcttaggaatccatgctttcaaacaccttggactatcacctcatggtatgttggccttgttagtataattatactctctttttatacttcttttatactcatctatttgtgattctccaggcttcctttgcttcttttgcctcaaatcgactactttttgagcgggttgaatatttgaagggcgagactcacaaattaatatcccaatgcaaggatgtgtgtgagcaacgacacaacgcccaacacgagattacccccctcaagcaggaagccgagagagcgaatgaggaagcagagacagcaaagaaggaagccgagaaggcaaaagaggaggctgataaagccctcaaaatccaagctgacgaatttgaggagaagcttgctgagaaactttccgataaagaaatggagatcgtagaacgatgcgacaaagttggtttttgcgatgtataccgggcctggctttggaaccctaacatggataccagcttcttggagaaaaaggaagaggagactttagctccatgcgagaagaccaagatggaagaggacgatgacaaggttgaggaagaagaagaaactctgtccaagtctcccagcatgtaggcttggtttttctttattgacaatggttttgcccctagtggcacttgtttgtaaagacatatttgcaaggttggacggccaactttgcttttttttttttttatgcctcacacttttaagtatgaatttcattacgcggatgttttcttgcattttatttacaatataaactatcacatgcataaagtttattaggggtttccattgattgttcttcctttcaacgttaagtagttaatttcctactttacgtgggagcaacttatatgcttattcctcaatctgcgaaccgtcatcaattccatctcacgatcatcgggaatgattccattttaagcacattcaaatatatttttaatgaaccttgtcattttatatatttctttattgcttttgtgagtagttaaaatttctactcacgtgttgggtttaagtattttttcaagacatttgaatgtctcgtttagtactttcccctagcgcgaaccgttagtattcagttttatacacttgtaacaccctaactaacttaggcgtat

SEQ ID NO: 386964 - DNA, 1852 bp, Cannabis indica
gataaatttaataacattagattataaaaaaaaaattctattgaccaataaaatcattcaaaaaaaaattcctttttccaaacgattatacttatttggttgaaagattcatggcttataatttctgcttgtatccataactttcattggaatggatgccaattttatcttatgacacgcttatgcatgattaccagggtcctattttcttgtcatcacgattcacgatcatccaaatatttgaaaaatattatatgtagaaaaaaaaaagaaaaacaaaagaggaaactgtactaaaagaagaaattaggaaatgatagtacttatttttaaacggtatattaggaaaataaaatgtattttaagggtataacaatagatattttcctattagtaaaaaaaaaaaaaaaaaaaaaaaaaaaaaaaaaaacctgatttttctatttctcagtatttgttttagaaagttttcacaattattgtaaattcaaatgtcttgatctacatgtgcaggaggttaacatttctaactataccttcagggaaaaaggataaaaaacaatgaatatttaaaattaaatttaaaaagcaagataaatctttagatgtagaatttaaagtatcagacactcgtaacgcatcagtttcaatataggtgatatgtaattgttcttgcagtgcccaattgaggttatgaaaaatgactttagcttccatttcatccgaacgaaaaatatccttgtattgactttgaaagggcagcgataacatggccatagtgatcttgaacaatcgctcccacacccaaaaattttgatgcagagtcaaaggccgcaacaatgttcaacttcaaccctgcatcatttggtggctgctatggaacaccttcagttgggttgcattgataactattttatttttttatatttgaatgagtcgcattgatttttttcatcatatttttatttaaaataataaattttttaagtatataatgattctttttctaaaaagaaaattataataattaattttattctcataagtaatggtcttgcgattaattggaggcgtttaataaatgattatgttataccattttctgtatgtacatgagcaacataatgttttacttttatccctattgacatacaataatcattaaacgcttgtgatgtaaattcaccagcattatcaaggcagactgtcttgattgcataatttgggaattgtgcttgtaatggaattatttgagcaagcaatcttataaatgctacattgcgagtagattataagcaaatatgtgaccatctagttgatgcatctaacaatactataaaatatctgaatgatcaacatggtgggcaaataggtccacatatgttgccctgaattcgttcaagaaattcagggattcaattccaacttttactagtgatggcttaatgattaactttctttaagaacaagcagcacatgagaacttattggatagtagaattatttagttcttcaatggatgatcatgagttctatattattctatgcatcatgattgaaccgggatggcctaaccagtcatgccaaataataaataattttttttggtttatgaatttctcgttcacaataacataagtttatattgaatttatacgtgtaacgtacaaacttgaagacaaaccagacaatttttttaatatgcattttttcttaaaataatagatgtaatgcaaagatatccaatattattttcatctattgtctcaatatgatgtccattacgacgtatatctttaaaacttaacaaatttctttttgaattggtagataagaagacatcttctataat

SEQ ID NO: 386965 - DNA, 1843 bp, Cannabis indica
tttcgtatataatgcttcatcttatagtgcatttagttagggaagttgagttaggtgggcccatgtatatgaggtggatgtacggatttgagagatatatgaaaatattaaagggatatgttcgaaatcgtagcaggccagaaggttgtatagttgaatgttacattgcagaagaggctgttgagttttgctctgaatatgttagtaatgtcgatgcaattggtatcccgaaaccaatatctgatgaaaacactagtagaggagtcggtgctggaactcctacattcacaaatgatgaagaaatttatttggcgcacataaatgtactggagaatacttcggtggtgaaaccttacattgagtgagcactatattaatagttatatagatttcaatatatttgcttattaaaatatcaaataataactttattgtatggtatacagtgaacaccttgaacacttgaggagtgtcaacacaacaaggagggacaagtggatacaagatgaacatcataaaacttttgatctttggttaaaacaaagattgaaaatgagcttagaaccaaaactgtgccagaagaattgaagtggatcgctaaaggaccaagaaacatgccaataaagtacgagagttatctggttaatggacgtcgttttaacactaagtctcgagatgatattcgagttaatcaaaatagtggagtctcaattgttgcacagacaatgatggtttctagttctaaagataaaagagccgtgtatggagacatgtcatattatggaaccatccaagaaatatgggagcttgactatattaagtttcgagtggctgtgtttaaatgtgattgggttgatagtaacaatggattcaaagaggatcgaatgggttttaaacttgtgaatttgagtaaaataggccacaaagaggatcattttatcttagcatctcaagcaaaacaagtattttacataaatgaccccatgaatgatagttggtctatagtagtgtccgccgaacctagaaatataagaaccaacaatgacttagtcacagaggtcgacgacattgaagagctccaaataattgataaatcatttattgatattgatggtttggatacaagagaaataacaacggggtcttattctcgagatgatatggatggcatatggattgaaattaaataaccaaattaaagtaattgtgtaactttatattaatattgatactaaaagtgtttctaaattcattgctaattgtactcatacatttaatgttcttatgcagagatacatggcaaatgatgaaagtgacacacctgtggaggatagcgcacccaatgaggataagcaacccgaaccaaagaaattacgaggtccatcggtgtgtaaagaggtccttaagtggcgaagtcaagggttaaaagttcctctaaaatggaatgaacatggtcaaccgattggagatcattgtaggatacttcaaacttatcttggccaccttgcacgtacgatggtgcctataaattttatcgattggccaagtgtttcagacacagtattgagtaacctatgggatgatatcgaggtaaaagtacttccatgtagctacatttttttttaacatgatgaattgttcaaactttttttcattaagatgcattgtttacaggagacatttgtagttgatgcaaattgtgatcaagcttttatttttgagtctatcagccataaatggagggatgacaagtcatatttgacttcaaatatcatatatgcctacttagaaaatccagaatatgcgaagaaaaatccgactgcattgacagagccaccaaaaa

SEQ ID NO: 386966 - DNA, 909 bp, Cannabis indica
tcttttggaagtgtactctaaagatggaggagtacaaaatgttccaggactcatgtggcatcgcatgtccatccttggggaattagtctctcaaagtgtgtacggctttagagcgtggagttggtctcgcatttcttgtggagcctatcttcaacttagaacatacttcgcagaattttgcgttaaagctagaatagttcccttccagctccttccagtagcctacaaactactcgcatgatggtttatattctgcaaatctcagggaaagccagctcctacaaactttgtatttaaacattaaacttttatagttatatacatatacatacaaaaattcgagatccagttttaaaatttatattcatgttctgaatacattttataatcatgtcgcacagtgactacaaaataaagcccaagtcgtcctaagatcaaactctccatgtcgaaccatcttgacatgtacaatcatccctgagctctggactcactgctgctcaaccttaccctttcccttacctacacatgtaaataatatctgtgagtcaacaaacttagtaagaaaagtatgtataatataatatatattatcgacttgcatttaggcatccatacacctatccacaaggcttaacaaatgatcaaaaacgttcttaatagaggtatgacctctgtaccatatgcactgagtacaactattgtactagtattggtagggttgaatcgtacccgcgtactcttgagtgttgtacaccctttgaacagcatatattgtaccaatgcactcagtaacactaccgtactagtgttggtagatatgaaatcacatgaactgcatgcatataatacacatacacatatacatatacatgttctatactaatcttacctcgtttccaaactcaa

SEQ ID NO: 386967 - DNA, 823 bp, Cannabis indica
ggtaatccgtttttttttttttggatttgtatttgcattttctttattttattgttttggctttttgttttccaactttgcaatccactgatttaaattacttaagtaaaaataaataggattgtgctataagcatctgtcacttgttgtgctctgactctgaggcaattatgtcccttagtggtattctatagttttttttttcttcagtttacttcaactttatcttcttttttctctataaataactaattttcaacttaatgttcttgtgagaaccttcataaattgctctctcaatctaaaaaataacttgcttcttctttattttgtgtttttttaggattcaatatggatccgttaactgatagaatgaaagtaaaaatgactttaactgatgaagaacaagcagtgttcgagtttgatgctggaggagttattgatgtttaatcagcctcgaatgatgattttccaaatccaattactaattaaactagggaatagatccgcgcttcgcgcggttttaataattttttaaaatcttatattaaaaaaattaattctaagttacgaatgaaattttaagtctaatacttttttaattatttttttatgaataatataaaattatataatatattatgtaaattctctcatttatttataattagaataaatattaatcataatatagtaaaaataatggtatatattctttttaaatgaatcagatattataatggtatatatttttaagtaattaaaaaaaatattatttttttatttattcatttatagcaaacttaattttataattatatat

SEQ ID NO: 386968 - DNA, 592 bp, Cannabis indica
atgtagaattctgtaagaatgcaaaaaaaaaaaaaaaaaaaaaaaacaaaaaaaaaaaaaaactaatttttaaggtgtgagaatgaaaaaaaaccccttaaaattatcccttcaaaatttgtctatatccattagttcactattgagtgtatgcactggaaggataatatgtaaatgggattatttcctaagtacataaaaatggcaacagatttacaattttacagatttactattttttatatataattttttacaaatttatttttttttatatttttacaaaaatacaaagtgttaattttgaaaaaccgttgtattggcgttcctgctactagaaaacaacgtgaatgttttttacaacaatacaaagtattgttattctattgtttcaaaataatgttgttttaacgttactgttacagaaaatcaatatttttctttaaagacaaaacgagtgaaaaattgtaaaaacaaagaacggtcaaaatataaataaacccaataattaaacccaaaaaattaaataataatttacgattaacttacatatctctccaacaaactataattttacacggcttcattcaaa

SEQ ID NO: 386969 - DNA, 765 bp, Cannabis indica
ggaaatcttttccctgaggatgccgaaaatgcaaatgcagatgaagtcacaaatggtgctgctggcaaggttgcagatgatcccaacactccaaacgtttagcctttttaatttctcttgtattatcgaacaacgtatcctttcgaggatacttcttttacacttatttagcggtacatgggtacttgcgtttattttaacttgtgtttttaattaacaataattttatcttcgcaaaagttctacttgatctattcacagcttggtgagacaatttttgaagtatataaacttgcaaataatgcagataaaaaattctaaaaattcaaaaatttcattaattaatcaatagtgcagtattgatggttacacccgctatacttagtatattctatgaaataaattgactaagtataaatacatgcgagtacaattgatagtattactttaaactttctccattccaagcttttttaaggactatgtcgtcaggtttggacaatcggtaagtcgcactgccaattttttcagcgattataaagtaacgtcccattgtttgagattgataaatctatagccccaccaactaatatctcacctcgaatcttgagtaactcagaatcttctaattgtacccctctaactctttcgaataaatttgacagaggcattagcttatgatgttttcctacagagaattcaataccattcctatgttgggctttgtggctgaataaaattctatttcaatgtaatcttttctat

SEQ ID NO: 386970 - DNA, 1322 bp, Cannabis indica
aaatcattagacttctgtcaaccttcctttaattacacctgcaacaacttctacttcgattattcctttatcctcttcacaagtccccccattattcctcaaggggtctagacttctcgaaagagaacttgaaactcaaatgggtcaagcttatttggatgcgaagaaacccaaaagacctcctcacttatcaagaatgggtcgtcttcaacaacattgccaaaattacacggtcgctttcttctaagcctgacatttctactgtttacaatgctcttgttgctcctagttcatccaccatccttacggggttgttaactccatcttctagattaaatcatcattttcctcatcaaaagaatttgtgtaatattgtatatagccctactcctatttagtccatcctttctgattctatagtcgttcacattgaaagtcaaatcagcattcctgataataggattgtatcgacttatgcactttcagatgctaaagttcttcaaaaacatcttcatggtagtgtaatggacactcctacttattttccttatgaattgggcaatagtccttcaatcactactatgctccataattttttaatcttcccaacctttaaagttcttagtagtttcaacaatgcattcaacattcctttcgccaattgctacattcaattgacaaggtcactaaatttccattcagttcaaccttctcaacctcttcccctagtatatcttgttgactagtggaaattatttcggtaacttctaataccttgggtaattccattgcccctaattcttcctcttcttctatagttatgatttcagactctaagcaaatcatcgtctctatagctaaatccccatccattcccaatcctctgcattcatccattgattcaagttctcatgagatcgccactgtttcaaaattaaacccactagagctatgctttgctgagccgacacgaaaggtggtttcgatcaactccgaaaagagactgagtgtagtcttgcaactatatgattttggacttgctactgctagaacttatttattgggattttaattactaacatgtatgttgattataagcattataatcatcctaaatatgaacaactgtaaaacgataattaaacacgtataaatttgagaaatcttagcattggttgcagtagaaataatatgacccctttcgttctttactctaactattgtttctttctgccgttaaaagttataacaagtactgaacatggatgctcctttgaattgttaaacaccttctaccagggcccaccttgaaatttagtggg

SEQ ID NO: 386971 - DNA, 628 bp, Cannabis indica
ttttggagctttgctcgcataaactcctcatatggtttagcaatttagtcaatcggtttttcaaaaagcttagcacaaaacttttcaaaatgcccaataataccacatatgaagcagaaagttggtgctctttcgtatttgaaggttgcccaaaatgttatcccatctgttttcgtcaaacgcagccttctccgtagcggtttgttaatatcaagagttacctaaactctgaagtagtctctccaaacccacacaaagttcttttgatccgactccacaaatgaccccatcacattagcaacattttgaaggacacttttagacatacaacctggttgcagatcataaaccttgttatcccaaatttggcactctacttagagcatctgttcggatcaacatgccgagtaggatgcctcgctggcatatccaaaatggaatactcaacgagtcgtgcagaatgagcaacacttagcgaattcaactaaatgcatcgtgagtcaccagctcaatccctataactcagtgatcaacttacgtggatctggcatacacacgatcccactatcggtgtattcagcctcaatcccacgatccttgcattcagcattgatcacacgatctttct

SEQ ID NO: 386972 - DNA, 946 bp, Cannabis indica
tcccaaactttcaaaaggaaagagttcttttccaccagattgagttgtgaaagccgtagccgtccccgaaccactccaattcgcacggttagcctgccttttgttgtgtcaaggtttgaaggaaagttaaaatatcgaaagtatttgggatggtttggatctttaaacggatcaatggaaataagcctctcaacacgtgtagtgaccaagtcactctccagccaatatagcattccattacatgaaatgtaattttcattatccaattttctcccaatgagggagaattcccatctactccattctctagtatcaaaacaaaaggtcatagccttatattctactctagtacctctttcttccttgttctccttataccataataccatgaccttgtaacttatctcactcctattattacttctcctaaccaatccaccacttccttcatgtgctagagatcctaaagattcttgtgatgttatgggagagtacatagggagctgagtcaattgtctggtggtggattacatataagaaaatgcttatgcttcttactactacagaaaagtaacaacaaatcatctaaagatgacaacaaaaacaatttctggggttgtaggaagttgaggtaataattcattttccatgctgtagatggtgaaagaaggaaattgatgagaaagtttggcttggtaaaaaaattagtcttagaaaacttaccatagaaagcccgagattctggtgttaagaaacgtaagaatggtatttcatcacaatgtatatgcatatagctgtttccaaagagtagtgtaactggagataacaattgagtttgttgatgataaagcatctttccttgacgatactccttggagttaaagagagaaaaccagtatttgcataccctacgacattgtaccagggattgaaaatcattaattct

SEQ ID NO: 386973 - DNA, 638 bp, Cannabis indica
caacaactgagaaccttcgatcagctaatatattcttggcattctttagtagtcgtgttcaaccaaatccctcttacaaaaggaaacaacttcttgtgctcgacctcttctttaacaaaatgctccttctcctcgttgttttgatcttttggttcacaagaacaaaactcattgacaattggagatctatagtggactcccaaattttgttgtctcttcacagccatcttggattgcaaaggaactacatctagtacctcaacatcaacataaggaggtgaaatggattcagatattgaaaccaaatccaactaatcatctttttactctctcgggaagcatacacctttgtgatgttttttcggatttgatgcccttaataaaatccattctaacacaatttgatttgttatcaatagaatattagaagtcatttatgtttacatgtacttttcatgtttatggtttaatgtatacaatttctattaagtccagaacatatagttattcacaattacagtgatgtcaacacagtggaaggtaattgtgattatatgcttcaaaagttaatgtccaatgattcatcagtgcactggatttacactgatgtaatagtcagcgataaagcttacttacac

SEQ ID NO: 386974 - DNA, 573 bp, Cannabis indica
tgaactactataaattattgtatatctctttatttatacttaataaatatttcattctcgccaatctagcgagcgggtgaggcttaggaatctttgtctaaatttttgagttaacacaacctcacacatgaataaaaaaacattcgatatgtatatttaaattattaactaataattcaacatttaaacatatatgaaatcgttcacttacattcataattaaaatgtctttacagacttttcagggcataatcataacagtgtggtggctgatttgtttcatgtatgatattgatggctgatatgtgccattattgttagatggttgggccatgtatgctagttggaagtgccatgtaagatggctaagttgtggcttctgagattatgtgagactttgtagacattattttgtttttaaaattttaaactaaatttaaatttttttaggtacaaaaagactatttagggtgcgtttggaaagccacaatgtaattggaggtaattacacaatttggcatgtttgtctgaccatgtaattacactgtaactgtgtaattggaagtaattgag

SEQ ID NO: 386975 - DNA, 1554 bp, Cannabis indica
gacttgcaccactccaatgacacctggccataagctctctaccatggacagtgatcttttttctgatcgcacactctatattggtattagaactgttgctagcataaaatgaaaagcgctgccaaaaataacttttcctggcgcgtaaatgcgctggtacaagttagattttagccattacaaatgtgcgctggtaaaaatttgacctctttgccagcgtagtttgcgaaatgcgctggtaaaagttacttttaccaacgcggtagcgaactgtgctggtaaaagtgacatttcttgtagtggcactatcaaccttggactagtcttgaaaccagctaagcttctaactttggaaggcttctctaatgctgattgggcatgtaatttagatgatcgaaattccaacactggttactgtgttatgcttggatcatcttatcacatgagggtcaaagaagcaaacgactgttgctcgttctaacacagaatcagaataccgatccttgtcttctactgctactgaagtagtatggatctcctctgttttacacgaacttggcattacacctcctaccactcctgttatctggtgtgataatcagggtgtccaacaacttgcctctaatcatgttttccaatcaagaaccaaacacatcgaagtagatgttcactatgttcatgacttggtttctcagaacaaaataacagttgcttatataccgactgaagaacaaccagctgatattcttacaaagcccttaactcttcccaagttcaattttttatgtcacaagctctcactggagtaccctccttcgagcttgagggaggatattaaagagtttgttaaataaatagttatagttgttagttaagtttgttaaaagtctgttaaaagttagttacactttcttttccttctttagttaagtcggtctgttatttttgtgtatatattctttctttagctttgtaataattcaattcaataataataaattcagattctcttcttttctctctataattctttctgccacaaccctcaataattatatcaaagctagttagttaattagaactgttgaccatgatgtctaaaaaaaaaaccctatatataatatatatatactccttaaatcaaaatttaaaggcaatctttaatttgaaaaaaaaaataatagggtgatcatcatcatgtcaccacatgtttaactataaaagcatataaagccaatacattaattggattaacataagtcatcaagaatataataaacttcgaattttgcatgcaattttaaatatttcatacctatcttgaatacatgctaacttgactatttcataaattagcatgcaaatcaaaatttgggctaaaaattgagcttgattatattatattatggcaactttttaaatatacctatattctataaaaaggaaaaaggagagtgaaacgagtacaaataataaaatgtataaggaggggacccatgtctacatatataaacaatatatatatataaatatatatatatatatatagagaga

SEQ ID NO: 386976 - DNA, 1397 bp, Cannabis indica
gctcttagaggacaggcacatgactaggcccatgccattttgaacttagcaaaaaaatttctggatgactacaaccttctagcatcagctctgtctcctctcacccatcccggcaggtcctcacctcctacatcttggtcgcctcctgacccgggtcgcctcaagctaaatgtggatgcagcaattcccggggagagatcgaaggttggtttcgacagtgttatccgaaatagtgaaggcctcgttgtagctgctttggcttctccttacaatggagggggggggggggttgcttgaagcaaagtccctccgtctagcgttgcagtggtgtattgaagaacatttccatatccatgagatagaaacagactgcaaggctttactgatgcgttgaacttccccaaagatgacatttcggcttttggtgacattataagacaaatcaaggacgctttgtctcacctccctgttgcccaagtttctcacgttaaccgctcagctaatacatttgcatataggctggctcgctgggcttcgggaatagatgaagctgctatttggattggcgatgacccttgcaatcttagtgattttctttctctctagcgggcttcctttcccttaaaaaaaattatgaatttttacaaattatatgtgtaaataattaattatcttaactatttataatattttaaaacctataatttatcgagtacataatacaattttttttttataataagttaatgcgcataattattttttctcacatcataattaccttttttccacaatacaactacacccaattagtgttttttaatacattttttttataccacatgcacataattaattgtacaaattatatgatactatttgtcaatttttactagattattcgtgtaaataattaattaattggagagagagagagagcattattaaataaataataaaaaatgatataagttggtggtaatcaaatatctgccatcccataaaacatatgtttgactatatggacaataataataattatagtgtgtttagtggataatggcataatctatctccacaacacaatgtcatcatatgataaaacactaaataaagatacttcctttggtacatgcatgactacatgtatatatatggatatcattttgtgaagtactttcacggaatgtcttctgtggtatattagatgggtctcagggtacattaaatgagtatcagggtacgtttctactttttaaccctaattaccctaattacccctagatcaatctcagccgtcaaattaaataactcccttatttgacggctgtcgtacatcacggacagggccggtcctaggcataggtgggctaggcccgtgcctagggcccacactt

SEQ ID NO: 386977 - DNA, 1658 bp, Cannabis indica
gcttgggatcctgaagttaattttaaaatggaaggcatcagaccagtgccaatttggattcagttacctgatctcgtattgaagtcttggggagagaaatctcttttaagattgttgggcaactgggaaaaccacttcaggttgatgcaatgactaaagaaagtaataagttgagctatccgagggtccttattgaagttgctattcagcaagattttccagagagaataccatttgaagatgagcatggttgtgatgtatttgcttccattacttatgaatggaaaccaatactctgtcatcattgcaagggacttgggcatgctactgttgattgcaagaagaatataggaaaagagcaacaatgggtgattaaaggttccaaacctaaggtagatactgctgtgaataatgaaacaaggaataaagaaggggtacctgatgtgcaacctgatgtagtggatacagatggtttcaagcaagttactaaaggtggtaaatctagaggaaaagaggtagctgctgagactcaaatagatagctcatacactgctttggaaggagtttcggagcaaggtattgaggttattaatggagcagatgcaatctctattggaactcacagaatccatacaatcgacaagacaagaggagggggagtacctcctcttggagatggataagatagtgtgctggaacgtccgagggatcaacgacctaaacaagcaaaaccaagtcaagaacatgttacatgttcataaagctgggcttgttggtctcctcaagatgagagttaaggccccaaagcttggggccttatatgttaacatcttcaaagggtggtgttttactttgaacatagtgtggcatgaaggaggtcgaatcatcgtggcatggaatctgttcagcttctcggtgaacattctcaaatgtaccagccagcttctccatttacaagtagctactttagatggtaagtttggttttctagttacatttgtttatgcttttaatgaagttgaagggaggaagttgctttgggtagatctaaatcagttgagaactcaagatccttgaatggtattgggtgattttaatgacattttgtccaaagaagaaagagttgggaagagggtaaaatacaatgcagccaccgattttattgattgtgtggggcgttgtcaactagaagatatcaagtatagaggaagctattatacgtggaacaataaaaggaaaggaagtgaaagaatttgctcaaagatagatcgtgttttagccaattctcaatggttaaataatttttctaatgctgaaactatttttgcagcggaggaattattcgatcataccccgtgcaaccttagttgcctctgtcataaatctgctgatgtaagctcggagaggttctcttggtcttttcttcaattcgaccagatctcctaagtgcaacggaagttggcgagaagaggagaattgtgcatggaattctgaggataaagccttccatgagttgaaccttccgagtgccaacttgaaataccattgctgggcggcctctgagagggtggcaggaaaaactctgcaacatacatctcctcgtactccttgcagttccatttacatttcaaaatacttgaggtgggataagggatctt

SEQ ID NO: 386978 - DNA, 1068 bp, Cannabis indica
tgacacgagactcgaccctagacctcgacccgaaactaggacccagaccgagactcgagacccgaagtggaacaagtccgagaatcgagaccgggatcaagatctagacccaggcttaaacctgacccatagtcggtgtcgcatctaggtcccagacctggactcaaacctcgacctggacccggacccgaacacagagccaaaccggtaccctctgattcgaaaccaaaagcataactgaaaacggactgggacccaagaacggtacaagaataggacctcatcccgaacctagaccacaaatcataatcgaacaaggatgagacccaaacccagacaagactcgggacacaaacctgaaccctaacacagaattacactcaaacccagacccaagacccggacctagattggggacccaaaccaagactcaaaattgaaatcgagacccgaaactgagactgggacccaagacccgatcccggtcttggtcctaaacccagacctagacaaagacatggacatggaccgagactcaggacccaaacctgaacatgactgggaccgaagatttggatccgaatcttgacccaggacccgagacctagggcatggacccaacccatagtcggtgtctaggaatcgtgccaggacccaaacccaaacccttaccaggaccgaagactgaggacccgagactcggatgaggacctagacccagaccgggacccgaacctgaagccagaattggaccgggacctagactaagacccacagccgaactcgaaccaggattcgagacccatacctgaacctagacttggacgcggacctagatgggggacctagacccaacactcgggtctcaaaaccaagaatcgaattggaacctgggactcagactcggacctagacctacacctagacacaaaacctgaacccaaacttagacccgaacccccccaagaacctaaactgggatcgaaatccagacttggacctagagtgggaccaaacctagacatggacccaaacccgaaatcagactcgaacttgggacccaaactc

SEQ ID NO: 386979 - DNA, 1130 bp, Cannabis indica
agatttaaggacttttgtctaatttcatttaattttactgtttcagtgattgtttatgtactaaaccatgctctccagactttgatatctaccaaatcatgtccctcaaactttgatactaaatcatgccccctgaactttcatctatgttagaattttcttactaaaattaaataaaagtctttaaatttaacaatctcaatagttcagggaaaatttttaacggccaaaaaagtttagggagcatgatttagtacatttcaaagtttgggggggggggggggggaatactaattagccatatagatacaactatttttgaggaagatagacaatttgactatatttttgttgttcgaaattcgaggagggaattattagcagttattgcttcttattcgtaaggggtggtatctctttctgtagtagaagtgatgcaaattaaggaggttcttagttcgttgaaatctcagagttattccagagtggaggtgaaattaaatagtcatgttgtttaagagtgatggagatgatagtaacattctatttaagagtaaaattgtaaggaaagcataaaaaaaaattctttattaaaattactgtagtacttttttttaatataaatatttgttaatttattaaatagaaatgattttagtatttggtatatttagtaatttactttatttttttcttaaatctttcaaaagttgaaggaatttagaaggagaccttttttcactgatcaaatccaccaaaggagaaaggaagcaagagacccaatttgttattgaaaataattaagagcaattccatcaacttctctatatatttaaaatattttattaaaattctatttttctctacattatttaaataatatatttataatacatataataaaatttaggggaattatcccatatactgtttttttaatttatttttttaaatttacggtttgagtttctaaagtagttgcaacgttagttgcaataggagtttttatacgattttttgttggaatttaagttgcagcgctaattgcaataggaatttctacgtaaaattccgtaaaaatgcaaaaaaaaaaattattttaaagtgtaaaaaataaaaaacacccataa

SEQ ID NO: 386980 - DNA, 620 bp, Cannabis indica
gataacaaagaattaggaaaaaaacttcatataaaataccacttagaatgctttgtgcattcttttatattaatatatagattattaatattaattttaagttttatataattaaacgtaataatttttaaaaagtattgatattcaatcgcaaaatgacatatttagagttgttaggcattattagtgcccaataacattactttatcataaataacatccctacttcattcctcaattcctcatagaccgacgatgacttgtctttcttcggcaattcaagatttggagatatattttcttggagaagcaattcagtagagtatcgataagttagtgtggtcaagaatttatacccaattgaatgtaagggttctttatttataggcagggacattgggcgtgcttccttcagctctagttacccaattgaatctaagtgttgaaccaaaactcaaacatatagcacacgtgtcttttaactccgcatatatttaactttagtaattattttaaacattaacaaactaatcccgcctttttaacatatctaaatattttaaatttcaaatttaaatcaaataactatttaaggtgccgtttggtaacatttttatttt

SEQ ID NO: 386981 - DNA, 764 bp, Cannabis indica
aagttagtttcattaagtagattataaactctaattttattaattaggctagatcactcatgaaacacataaaaaattaagcactaatattaaagatcattaaagaaggaaagaaaataaggaaaaatagaaagaaaaaaatggccgggaaggctgtaaagtatacatcaacaagtcggatatctcttaattaaacttcaaaagcaaattaatgattagttagtggaaatgcatgtatgtggacaaaaatgttaagttataattataagaatcatcttatcacttatcaaaagagataagaagagaatctcataggaaacaacaaaatatttaagtatatttgaagttgagaatattaatatttacactaataaaatagttcacatgaataatatattcaactcatttacatgataaagttcatacatgataaatcaatcatattcttcttgccatattagaaaaaccaaatcatattgctgttgcaattcaagagcaatactaatttcttatttattaaagaaaagaacactatattaatgataaatgattactattttttttttaagaaaatatctcctttctttttattgtcatcatttgaaaaaaataaattatcaacttaaaaaaattaagtaggtgaaatgagaattttcaagaaaaatgtccactcattctaactataaatctcttagatcaatcattttaatcataatgtccattttttatatgttattgtccgttttaagctaaaccctcataaa

SEQ ID NO: 386982 - DNA, 1147 bp, Cannabis indica
atatttatagttaaattttgtttcgtaacaatcaatagtaatacgagcattgttattgggtactagtggtgattaacactttttattggaggcgctacacgattagttatcaatattctctaaaaactattttcttaaattatataagatttaatttttaattatactaataatagtatgacacaaacaaaaatgctaatagcatattacattttaacaattttcctacatatttaatcccctttaaaacaaaaaaaaagaaaaaaaaaaccaaatttaaatcaaatttggttgaagagataataaagagcttggaggcaaactttaaatattaaaacggctttttgggtagtgaaccatcaatattgacttgatttcattgtcattcaaccttttgaataacatgcacttaattaattgtttattgttattattattattattattattattatttatgatatagtgtatgtttttattttaatttttctcatatagattccatgttgatttgctactatcatatcatgtgccatttttcctaaataatgtgatttttatttacctaatatttattaaaagatttaagatttttagttttaacagttgatatgcatgatttctcatttattcattcaagttaaaaacctaaaatttttcatacttctttcgagttttactgcatgtggcttattgattttttagttgaaggtactattaatttttttttttttactatggtaagcaaagtggttagcttattttttgttgattatgattaataagcaatcagggtttgtcctattagtgtacaagttgagctactgcatagggctcccaaaaaataaagggcacaatcttttcaagtttttatttttttatgaaccaaaccttttaagggactaacaatttatcattggttaatcccatgcaaaaataaattatttcgagttttcagtattttataaggtatataactatatgatcaaatatttaaaaatattattttaaataacactttttttgtcgtgggcttaatttttaaaataaaaagagagctaacaaaatattttatataataaatttgtccaatttaaatataatttcttttaaataaaaaaataaagtctttgattataattttttt

SEQ ID NO: 386983 - DNA, 2530 bp, Cannabis indica
ttttctttttctttcactcattataattagattttgacacattattagctaaccaaataacaatctttataaagttgtcagacaatacttattctttgttaattatataataaaaaaatgtgctgacatacatgattcaattgtttttattttaggatatgtaaatttattttttaaattttaataggttggaattgaaattcttgttacaactttgaaaattaagaaaagaaaaaagtcttatttcagtataattatattgtccttgaactattcttttacaacttcataatattgaactttgtacgaatattattcatttaaaaatgtagaaatatgaacttcacaatcatatgtaacaaataataaattttaatcatatatattttttttagaaagactttctgtgtatatatataaatgtagatataggaatatatgtatagattgtgtggtgtggcatcaacatttatgggtttacagcattttggccacatggcaagttggctggcatattatatattcctgcaaattcccatagtaataggtaacgaagatgaaccagggaaaatataataaaggaaaaaaaaataatatatagtatctatatatatagagttggtggtctcatccaataatccaaacttttatcttcctctcactcacacaccctattgatcacttgtattgattacccttttctaagggtacacatataaatatattatataattttttgccacctcactatactagtttaaatttgagaaagagaaagtacattgttattaaacatcagtagtgcttagtactttttataagtgacgtttttatgattgattaacaatatttttcaaaagttattatcttatatcattgctattgtgttcaacacatcctataggtgatgtcttacgattaattagagatattttttagaagctattatattaagttatatgagatttgatatttaattacaccaatagcgatatgacaccgaagaaggtgctaagcaccagtaatgccttttagcaattctcattatcttaagatatatgagattcgatatttaattacactaataacggtatatgacaatgaggagtgttagtattgatataattaagtatcgagtctgtagtatgttaatgagagagaggcattaatacaatattagataccagttttaacatcaattatattaatgcatgtgtcccttttccattttgctgatcaataatttatatagaaatgctaaagggcattagtggtgcctagcatcctcctatgtgttaatattactattggtctaactaagcatcgggtctcatataatttaatataatagcttttagggagtcttgttagccaatcgcaacgcgacatgtcgagaaggtgctaggacaactctattggtgtgcaatttttattaaagttggcttaaaatcaactaataatatttattttgccgaattgttacaattatggtccaatatatttggtgcaataacaacaaaaagtatataaaaaatgttaaataaataaatatataaaaaatgaaaaaaaaatggaaaataatattaattggttgtaaaagaataaccataataataataaaaaaataatatttattgtggtttattttattttttgacaaatattgtggtttaatttaggttattattccctaatacaatttttacatccctgccaatttgaatatcattggtttgtaaactattacttttataatactttattagagatgctttgagataattaataatagtcttgcactgctagtgataataaaatttagaataattagtattttatccttaaaactttttatactattaaggtgttattcgacttgttaataatatcacttaaaatataattttactaataaaatctttctattatattttatttaattttattgtgaaatgagtgaagtgatgaatgataattaataaattgatataaagcaaacaccaatcatcatttttacgtgaatgaataataataaaagacttttttatatataatataatttatatttatatatatttttaatttttaattttttaatcatttttttaattttttaatcattgaagttaaaatggtgaaagatatttaatttgcattgatttattaactactatccattacgtattagagttagtctcacattgttaatgtgtggaaataaattattatatataagatgaatgagctactctttcaattaccaattggttttaagataaaataccgcattcatcttatcccaaactctaacattacctcataatttaatagtgtaaaaaattgaagaaacaaaaatgctaattgtttcaaaatttatcaaaaaaaaaaaaacaaactaaaatttagaggatttgctacctaaataagctaatcatgctatacacttgtaatgaaattggaaaaggtaagtcctataatagatagattaatgaatatatatgatagtgaatcatgaggatgattattgtta

SEQ ID NO: 386984 - DNA, 1217 bp, Cannabis indica
aaatactttattacttctgaatttaattaatggttattactattaaggtttaattttaattattcaaaattattctccttttaagtgtaatatttattgagatttaattgtataaatagtttctatcaattattttcaatcttgatttagtccaaccacatctactaaaactcttttaatatatttaaatcatatctcaaatcgatttaaatagttagttataatttaatacacttaatagattcaactattgaatgtttaaatgtgagtttatttcaattagacaatctaattgattgtatgtgtttctactaatgatttcttaatgaataatttattatacataatttgaatggaattccatatccatctatatgtttcaataataattcaaatcactcaattaaatctcatttaatccttaaggttaactttgcacacataaatttgaaaagtaaattaactttattaaaaaaaacataaagtgttcaaaataaaattatttaaataaacaaacttcaaatatgcgaataaaatttagaacagtaaatttaatgaattgccttcaaaattttaaactaaagttaacttcttcattgctcttctaaactcttcttccatctccaactttgtagaagtctcacttcttcaaatcgtctttgtcttctgttcacaaatctgcaagcaagagagaaaataatgtcagtggttttagaacaattcaatccaccattattttttaagacaagaagaaaaataaatcatatttacctttctctttggctttgtaactctatcaaaatgtcgatcttgttaggatgaaaatttctcttataggccaattgatcatgagcggcaccgtacttttaggattttatgccttgaataaaatccattttaaaataatcttatcttctgtcaatagaagattagaagtcatttagtttacatgttattttcatgttaatggttttaatatacaaaattttgttaaattcagaacatatagttgttcacaatgacagtgatgttatcacaatagagagtaactatgattatatgcttcaaaatacttagtcttatgattaattagtgcactagatttatactgacgtgataataaacgataaagtttaattacacttgtataagtggaaagtcctttccagggcattagtgaagtatactagtatcagatgtatgtgttgggttttatg

SEQ ID NO: 386985 - DNA, 1116 bp, Cannabis indica
tacataagtgaatgattttgttaaaatttattacttgtctcatcatataatttgtgacctaaaaaagaaggagaaagcgtattatatatataaaaaaaaaatagggtaataaaagactaaaccaataccaaaatagaaaagtttaaaaattgaaaaatcatcaagaaaaaagattttgaaaaaaaaaaaaattgacaaatctgtgcaaaaaaactcatcatataatttgtgatctaaaaaaagagaaataaaagacattgtcaaacgatataagataatgaaagactaaaccaaaactaaaataaaaattaacaaatattagaaattgaaaaaattctcactgagaatagagatctaaaaaaaaatgacaaatctaaaaaaaaaaaaaaacttatcatataatttgtggtctaaaacagaaagaaaaagaagagttattgtcaaataatatagggtaataaaagtctaaatcaaaatagagatttacaaaagtaattgatacaattgaataaatatcaccatataattataaacggaaagaactgtgagaatatatttaaaatagtagccaataaatttataaaagactatatatattgatattttcttaattaatttttatttatatattgggtttttttaaaaaaattcttaaattacgctattaataggtctttgattgagatacaattaaatttagtgttttatttaaaaaaaaaatctattgtattttttatttaaaaaatgagaaaaataaaaaaaatattttaagaaaaaatgagaaaatagataaataaaaaaaatttagaaaatagataaataaattttaaataattaaaaaaaaaataaaaaaaaaagacataaacagattttaagccattttaaatcactacgtcaccgtgttatacttttctatatatagataatcaaatactatcttataaagtttagactgaaataaagtttaagaggtttattttaaatgctaattcctattagctatattttggtttatgttttttaaggaattttcgtgtttggaattttagtattcagatactaatattataattaattaaataaattgaagaataagaatcttgaggatcttgtaat

SEQ ID NO: 386986 - DNA, 761 bp, Cannabis indica
gcaaaatgaccttattagaaagagttgttgaaaatgaaataatgatgaaattcccatgtacatacaggtttgggtaccattttgtagaaaacacaacatagagccaagaaatcctgacagttatttcagctcgaaaaccgacccaactaagaacaagaagcttcctgatttcgtcaaggatcgacgttggatcaaaagagaatacgacgagtttaaggtgaggatcaacggtttgccagaggcaataaaaaagagaagtgaaatgtacaattctagagaagaggcaaaggagaaaaagctagccagagaccaaaatggtgggcttttgccagcagagccaatcaaagtgaccaaggcaacatggatggctgatggtacacattggcctggcacatggctaacctcagcacctgaccatgccaagggagatcacgctggtattttacaggtacttagtatgtatagtatcattacttatatatagctagtgaaatacattacctatatttatagttatattatagatacatagttacattacatacacttgttttcatgatctttaatcacataggcattctctataaattttatatgtattaattagtatactttgaaccacttgaggctagctcaagtggccataggtgggtgtgtgtgtgttggaggtcttaggttcgagtcctaggtaaacatgattgtaatatataaacgcttaaataacaaaaaaaaaaaaatagaaataagtactttagggtttc

SEQ ID NO: 386987 - DNA, 2512 bp, Cannabis indica
tccaccctgatattttgaattcataatattctcaaggatttaaaaaccctcatgtcgtacaatatgatggtacaacaaatcttatggcccacctgaacaatttcaatacaataatgcgagcaagtaacgttttaaacaacttgcgatgcatatttttccaacttcattaataggagcagcaagtagttggtttgacaaattcaccaaccattccataacatcttgggagaaattgtcaaaagatttcaaaaagcagttccaagctgtgagagattgtagaccagaagcatctttattaactaatgtcaagcagaactgggaaaatcccttaaggcgtacttaagtcattttagtatggatgtagccaaagtcaagaatttgaatgacaacattcaaataatatcccttcaggctggaattacaactgacttgtcaactgcagggggagaattatgggacgacatgcaaggatgccttgttagaagcatcaacgagttcaatgaaagaggacaaatttttatgcagaaagaagaggcttggaataaaattaaacaattaaagtctgaatacaacaatagcaagcatcgtgaccactagagcagaaaattagagtggttcgaacaccaagatgaaagatgagtcaagagactcatccaaggacaaaaggaagtagcagaaacatgaaaattatgttcctatttattcagtttgcactgaattaaatgaaactcgtaaaaatatctacctcgccaacaaaaatcgggccacattgcgcagaccaaatccaatgagacatgcaagaaataagtgagatcctaataagtattgttgtttccatagagatattgggcatacaactaaagagtgccattagttgaaagatgaaatcgaaagcgtaatcttgcgaggatattaaggcagcatgtgaggacataaggaaacaagcataatcaacccaataacccgaataatccaaggatacaacctcctcctttagagggtgaggatgtcttagtgatttttggagggcctcaccatccaggaaacaataatagtgcaacgaaaaggttcattaatgaggtgaaaaatgagacatcagcatttgctccagattctctaaagagagcaaaaccagatgaaccgcccattgcctttactgatgaacatgcattacatgtatgatacccttatgtagatcctctggtaataatagttcaacttgctaataagagggtaaaaagggttctcgtggacaatgggagtcctgtcaacattccttataaggaaactttaaagaagatggaattagaggaagcaagtttgagactctgcatggtaaatatatgtgggttcaccggtgatagtgttgcaagtttgggcataatcaaacttccattaaccatggaagaaccaccattattcactactcaaatgcaagaattttagttgtcgacatcccttctatttacaacgtactgatgggtcatccaactttaatggggatgggggcaataagctcaatcaaacattttttcctaaaatttcccactcactctggggtaggaactattagaggtgaccaactgctagctcgagaatgctacattgtggaactcaaaaatagaaggtctaatcatcagttgatggtgattttggcagaagaaagtgagaaagaaatagaagatttggatcctaggatccatgatgaaagcaaccaactcaagccaattgaggagttagaagaggtggatttagacccaaacaatccattaagtgtgttagtattgggaaaaatttgagagaggaactaaaatagcaattaatcacctttttgaaggcaaaccaagaccagttagcttagagccattcatatatgatcaggataaacccaaatgtgatatgccatcacctcaatattgatccaaatcacccttcaaaatgtcaaaaacggtaaccacttgatcctgagagataaaatggactaaaagaagaagttgataagttattaacctataacttcatacgagaagcattttatccctcatgaatatctaatccagtacttgttccaaaacaaaatggaatgtggagaacatgcataaacttctccaacataaataaagcatgccctaagattactttctactaccgaggattgaccaattggtggacgcaataataggacatgaattaatgactttcatggatgcatattctggatataaccagattaagatgcatattcaagaacatacaagcttcgtaaaaaatataagactttattgttataaattcatgccatttgggttgaagaatgctagagcaacataccaacgcctcgtgaatggtatgtttgaaaactagatagggtgaaacatggaggtgtatcttaattagttgatgcaattatatgatatatgggtgcagatctttggcataggctcacctgattaggtgatacagttatacgatatatgggtgccagactatggcacgggcttgcctaattagg

SEQ ID NO: 386988 - DNA, 2088 bp, Cannabis indica
ctatcgcttagaagacacaatagtagaaactgttgcagtaaattcatttaacatcgtaatttgaacactcaattatattgtccaaggtaattaactacactaatgacaacctcttcagtctcaaaaaatttgttatttacatcaactaacaacgatctgatgacgaaccatcaaaaaataaagaaaaaccaacaacgaaataaaacaaaaaaaaccatgtcacacaggcaacactaagacactcaaaaaccatgttacagagacaagagtaaaacacttaaaactatatcataaatggaagactaatcgcagtaccaaaaactgattgtaatagaagaacacaactccgatcaagctgcacctatacctagggaaagccgacaagcttgaccggagaaaaaagacaacctcttgtaactataaatttaggaacgataaattcaattttttttttaaatagatacgaattcatgtatttttttttttttttaaaaaaaaaacttaatatgtgtctacattattaattcattaaattaagaaataaacttgatttgggtatagcataaaataaactcctatgtataaatattaatactgtattagcatgtaattatatatattattaataaaaataatacactattcctaatccataaatatgtagacaaacttggcacatgagaaaacatcttaacattaaaacaaaaaaattagattaccgaggaggttggcagtaacataataataataataataataataataataataataataataataatatagatctagactaaagaaccatctggtcccttttctacaaaattttcctatcttacttagaccttaacaagagcacccccaccactgttgctcccgctctttaaaataaactgttgacttctaaaatattggaataaaccgtaaagtcttttggtggagtattctctcaaacgccatacctataaagtcagcttttgctaaaagaatacaaattgaagacgtgtcttgccccttttgcgatgaggaagaagaaacaatggatcaatattttttcctcaattgtaattttgctttcatttttggaggtcctcctcctgggggtaatgcttgtgccagagtgtgggccccgaatgtaataagattgggttaaatttctatggaggttgaaggaaaaaggagtggaggtccaataattatttttatatgcttcaattgtagtggacacgatatggaaaacccagaacgataaggttcatactaataaatataagtaacattaagtgttgtattgcctatatttctatatgttacacatattttggctcttgtttgtttcctacgccgatgatatttacacctcctatttggtcccccttgcttggacgattggatcaaaatcaactgtgacgttaaggttgatagcaactcaatgtgtatggtgaccttggcgagagatcataacgagttagttttgtggttggctagcaacattctcaacttctctgatcctcttattggagaagttgtgacctatttgttagccttacaatcagtgactcgtaggaagcatttgtttgtgatgatagattgtgaatttgagacggcaatcaacatgctaaagggaactactctcatttagggtattggtaactatgtacttcaatgtaaaatgctctcaaaccttttgactagttataattttttatttatttccagattatgtaactttgcagcatataatgtggccaattgggcttttgctagtaatgtgactagtatggtagatccgtcttccatacctgttaacttaatttgtaatgaccacgaggtctaacttcttaaggtttaatatattcacgcaatttattaaaaaaaaaagatttaaattaaggttaatattattttagactttgtattttgtaaaaggttgattgaaccttttgtcttattaaatgacaaattgaactatgtatttgctaaaataatacaaaatggtacccttgtctcaaaatttaataattattttttttaatataataacaatttctagcataaacaaatgtagaaaatgtaactagtttt

SEQ ID NO: 386989 - DNA, 1246 bp, Cannabis indica
aaaaaaacattgctatgacgtagctaggtgtcaaacactattatgagatagcaccttaaaattcgttaaccatttttctataattttaattgaaataaaataaattagacttgatattaaattacatcaataacaatattacacctcatcaggatactagacactatgggttcttttggtatgtcgtattacaccgtattgtattatattaaattgtatttcatgcaataattttatgtagtattgacttttatagtacctaaatatataatattttagtataaattaaaatttaacatagtattatataaaaatatgatatataattcaatttaatataatacattataatacaatacgacataatacaacgtgtcctttaacatttctcaaaataaaaagactacaagaacaaaatgaaatatgaggtagcgtcttaaagttggttaacagtttttctataatttttattgaaataaaataagttgaatctcatattgaattacattaataataataggctaattagcattttttttttccccgatctttgacatgtactaaattgtgccccttgaacttttttggccgttaaaaattacccctaaactattgagattgttagatttaaggacttttgtctaattttagtaaaaaaattcgtacatggatgaaagttcagggggcatgatttagtacatatcaaagttagggtcatgatttcgtagatatcaaagtttggggagcatggtttagtacataaacaatcactgaaatagtaaaattgaatgaaattagacaaaagtccttatgtctaacaatctcaatagttcagggggaattttaacgagcaaaaaagttcagggggcataatttgctacatgtcaaagttcagggaaaaaattgctaattagtcataataatatttcacctcataaggatgctagacaacaaaatgaaatatgaaaagtttatatacatttataaactttaaaattttaatttttttaataaataagattttaaattatttaaataatattgatgtagaaaattggccaacactcactcgccagattgactataggaaatagaagttaagaaaataaagtctagttgaagtaaaagcgtgaacttttctaattaactgaagcctctaatgagtatgccaaacctaactaaggttatgtagccaagtctcctccctaactctataaatacatattgtctcatcacaattgtatac

SEQ ID NO: 386990 - DNA, 553 bp, Cannabis indica
gcgatgatactaaattacaaaacccgagggatgcataaactttttgtcatcaatgatagctcatgagatacatttgcgattctagccagcaccacgtgtcataaatttgtcacaaagaagcagaggagtactacaagctctcagaccccattacgtcctgagagctgacggggtaaatgttatccgtatttctgctaggtatgacacatgccatttaaggagaaggaacaatttaatcattccttaattgaactcctttgatattgctctatccaagaatcatcccagacagaaagcatgcagaagattactcatacctaccctggcttcccaaacgcagaaggcaaagcatctctcccggacccagaaggttttaatagggaagctcgctcagatgatatccggtcaggcatttaagggatttaaagaggatatcgaccataattaagtgttgtggatgtcaatcttttgtacatgccaggtcacccaagtgacggttatgctttttctgacaaagatcaaatcttgtttcctacatccgagcatagtagtg

SEQ ID NO: 386991 - DNA, 697 bp, Cannabis indica
tttacgctgtgtatatttgagcacaatcgcaaaaatatggcctaatataatgcacactcatttttaaaacatagtttaccatattcattagacgtctaaaggaatggaaaatttatttttggtaaaactaattttattttgtatttttttaaaataaaaatcaaaataatgaaaataaataagttcaaaatttatttatttatttttttaattataatttatttagtatttgtttttatcaatatttacttcactttctttctcattagtttaatttattcttatgatcttgtatgttataattatttaagactacctataaattttaagtattttacaaatttaaaaataaaatttacatattttattgtatgtgcgactgtttattcgtttatacacggtaagtaactgtttaaattttatttttgacattataaattattcaaaattttttaaaaatttacaagtgatttcaaatagctacaaccagggacgggcctattaagattgttagcccccacgaataaaaatattgtcttttaaaaaattaaatgtaaattttttaatttaataattataggccaaaatagtagaaaaactcctacaaaattagataaatttagtaagagtgattataatgtagttataaatattttttttttatgataaataagcccacaaagtaaaaatcctggat

SEQ ID NO: 386992 - DNA, 1099 bp, Cannabis indica
ataatgaaaaatgtgcatctaatatgaatatacacattgataaaccaaacacaaaatcaaatttaaaaacctcattaacccttcccaatgacatgttgcataattattctaccagatccaaacttctcataccttaattttaggcatggatgacttcctaaaaaatggggacgttactctgtaaaaaaaaatttcattatatacttactatcattctttacatttttaactaatttatactaaataatatctattttgatttgtttttctttttttacccaatcatcttaaaaaaaattaactctctctaacttactcatctctctgctctatctttttatcgttaaaaaaaaacccattaacaagtatgacagtcggcggcggcgaagattccactaaagccacaaatcacgcacaatgatcgtacgaaatctgttgcactcgcaataatggttaagtattttacacaataattttttaaacattttaaatagtgttttttttttttgcaaatagcgagatctggtttttccaataagatttgaaattttttacgttatatcgataatttatcgataatatgtcaatgttttatttatggtaaacgtaccaaggttggggaagacccttttcgacaatttttcgcctagtacgcttacccgacgtgattagcttatgtttcacctcacattttacatctataccatagattgtcggaatgtactttgtgagacatatattgtacaaaccttctcgtctttgaattgttaatacaatcttataaaagcttttatgagagcttctcgagattgttatcttgtgttcttgagagatttgctaatacaatcaccgctttgttcattatgaactcttgctatccccaaaatgaatatttgtgtttgtctattaattcattggttttactagtcttagtcataacgttgacttttccttttataactaaggatagacttcattaatgactatatctagtatttttcaaagtgatgttaattggccatattcttgttcataatgtgagctgatttattgtctagctctagtcagggccggccctgaaatgtagtgggctataggg

SEQ ID NO: 386993 - DNA, 2052 bp, Cannabis indica
taatatatatgcaaattaaattaacatttttctctatatttcaatcatttaatgttagattcgtgaatgggaaatctgcaagaagccggagctggtgaaagcagatgactttttcatctcaggaatcaacatcccggcaaacacagacaacgcattcggatcaaatgtgacaaacgtgtccgtcgaaaacctaccggggctcaacactctcggagtatcgatagcgcgtattgactacgcaccgaacggaactaacccacctcacacacatccccgagcctcggagatcttgtacgtggcggagggaatactgtatgtcgggttcatttcgtcaaacatagatgggaaccgattcttcacgaaggttcttcacaagggagatgtctttgtgttccccaaaggaatgattcacttccaattcaatatcggaaagaccccagctgtagcctttgctagcttgggaagccagaatggtggaattattaccattgctaatagcttgtttgggtccaaccctcccattatgcctgaagttcttgctaaggcattcatgttggataaggatgtgattcaacatcttcagaaacagtttggggcttaatttctcatatgttaaatatcatatttgtgatgaatttattttactatataatttccatgtataaaaattacgaccaacatatattgtcgtaatactaaataaatacagtggtatgttcttctttcttctcgttgtctttgattaatgttataaaaagattggaaatattttaccgaaaaaaagccattagtaatattgcaaaatgagaatgtttaattgttgatcataacttgtctatgagtcacatcattcttctaagaattttttgttgtaactaaacttaacaatcattaaaagatcacaaatcacaatagtatatttatgtcatttgcatcctattcatagtaatttttgacaagatcattctattcaaagaaaaacatgccaaaattcacttggaagtatatttatcagtattcaaacatatagatatacatattcatgagtggatatgagttatcgttaatttcttagacaatcactccagaatataccttgtgcaaagaaattttaaatgtttaaaaaatttcatgaatttttagcaatggtgaaaactatcaaggtaaagatcttgcgaactgataggggtggataaatattttgttatgcgattcaaagatcattatgttgaacttctaattgtatccaaacttacctccccagaactttagagtatcgcataatgatgaaaatgtaaggtgtatgattagttactagcagctgcctgagtcattctagggaaaggccttagagataaacaacattctatgtcatcctatctaagtatgatcacaagaaaatctcagaatgatagaatggtcatacacttagtatacactattactagattcagggatgcattgttcatgaacttaagaaaaactagaaatgttaactaagttttacatgtttgatagctattctaaagtgattaggagtggataatcctatggtcattaagataagaaaaggttaattttaagaaatactacttttctaagaacatgactaaatctaaaattaaagtagcaaagtagaggagatactttttgattcaattccaaagtgttatatcatcttattatatataagatggtcccactacctccgttgtattgacacaaccaatgaggtcaatactactaatgctcctagacaaaaattcacggtagctcgtcgaatgggaaggtttcaagggactcaccctgttatgacttcgaagacacttgtgataaaaattcattgttagttcaaataagcaatggatagtcaaaataaggagctaagaagcaaatccaagagaactatggttaaaaccattcataaggatcaatcaaaagttttttattacaagaacaagaagggaaattttgataataagtctattcaatggacttaacaaaacttcccgatcctagtatcatagttttgagattatctaaacctatggc

SEQ ID NO: 386994 - DNA, 1772 bp, Cannabis indica
aactgctcgcaaatcaaaagcctagcagataacaaactgtccgtgcacgtaatagattactaactacttaagtacgaaaaatacgggcaacgaaaagaccaagagtactctatatttgatcaaatataattgtttacattgtgaataaaaacgcaagcaaacataaatatattaagtttgaatgcaaaagtacgaagtatttccgataaaaaagagctaagctggccagcgaactttacaaacttgtcttcacgaaaatgccacaaggggcaaaccattagactgtttttatacaaaaatacaagactcattataggggacagtagggctcgaagagaacaatccctggaccagaactaaagtgtaatgactgcatttcataatatcaattagtaaagacaattagcactaattactgatattttatattatttgtgaatttaaatttttgtgggtcccattgctagaaatgggtattagagttataatttctcaattccgaagattttattaaactctaggagtataatttttgctcggcgacaacagaaaatgcgatggatggctagtttgatcacatgggtaagtctaaaaccttatttcttagtgggatgtgtattagggaaaataaaatatcgaggttgagcagcgttatattttttcaccattttacccctatgcttgaattaggctaaaattaagtaacaagggcattataatcttttgccaagggagtgagtggtggctgccttaggtgttgacacctggccttgttatttttcagcaaaggattagttcgaaagtcctttctcatttaggttgattctaagtttttgtagctagttttagtgtatggtgttggatttgtgcaagtttgagttttgaaactcaacctttggtctctaatggcatgtttgaattcagtgggtttttctgggatttattggttggtatatgttgtatatgcactgattaggtactttggaaagttttgtggcaactggttgagttttgagcaagttttggatttttcgtggaaaactggtacaaaccggttaactggtttgccagtacctgtaaaactggttaactcattttggtaggttccccgaatatcccgttttctcaaatcttgtccattttaatgccttagttgggtgtttctttgcttcctaggctagtgtaattcctagttatgataacagagcctagagttgtagattcaggtttctggattacggttttgaacatgtgatttccacagttttaatatgtgattagggcatccattcagcacgagacttttcgttcaaaccggccaactcacttgaatttggaaaggaggtaagaactatatataatgtgtaatatgaatatgcgagtgtatgtatatgttaagtgtatatgcatacttatatgtttgccacactatcaacatttgtacggttatggtacatagtgcattggtatagtgtatattgttaagaagtacattatggtgataccagcacaagtacgggaaagtacagggtatgtgtggtatatcactcagtggtactcagggtacgaaacaaaccctacgaacactcgtacagtgaggtacgtagtgtatgtggtatagtggttgtaccctagtatggaacgttcttactcatttgttaagccttgtaaataggtgtatgggcgccttgttaaaagtcggtattatatgatatgttatatgcttttcttactaagtttgtcgactcacagttctgcttccatgtgtaggt

SEQ ID NO: 386995 - DNA, 1072 bp, Cannabis indica
attatgacgtccaagctagcttcgaccgtgtgagtgaatgggtgctcaactcctgggcaaatttccacaacaattcctcatctttcacttatataacaaagttcactcctggagtaagtcacaatggggtcgttcggtgggaccttgcatgcatgcctctcgacatcatgcatgtatgcctctcgcagccctcgacccttgcagcagcaaagcctctcgcaacagtgaggcctctcgcaaccttcaatcactcacaaagacctctcatagcagtgatgcctcttgcaaccctcaaccactcatagtagtgaatcctctcgcaacccttggccactcgcagcagcgaggcctcttacaacccataggcctctcacaaccctcgattacttatagcagcaaggtcacttgcaaccctcagcctctcctagccctcgaccacttgcagcaacgaggcctctcacaaccttttggtagcatgcatgcattcccctcaatgacatgtataaatgcctctttccctctcgctaaggtcgctcgcacgatggccttttgtagcctcttcaccactcgcaccatgaccaatgttgaggcccctcggaatcatgcatgcctctcgacgacaccttttctacgtgcctctcgacaacatgcacgtgtgcctctcaataacatgcatgtatgcttcacaacaacatcttgtgtgcatgccactcgacaacgtgcatccatccctctcaattgcgcttaccacattaggccatcataacgagccatcaatctctcatcgagatggccaacagtactaggtaggttgtaaggaaaagaatcaaaaggacatcgcatgctgatacgaccacactacctgcaacgcttggacacagggagaggatgactagtggaggagcctcacctacaagccctaacctcccgacaaagagtacgttgcagccactactcttgccccttaagactacctgacacctgttggcggtactgttggcttttatgccctaaataaaactccatttcaatgtaatctttatcctttaaatataataaagaaacagaagta

SEQ ID NO: 386996 - DNA, 765 bp, Cannabis indica
agggaattgagcctataatgttcaaaagtagtattactttaaatttaaattagtctaacacagtatgagatattattttttaacagagaatcttaattcgagcctaatgtcttaattaagtacaaaaaaaaatcttccatatttcataaattcaaatcattattaatagtttgttaaaaaaaaatcaaaattttttaggaaactgaaaaaaattgtgaaaaatagaaaagaaaaagcaaaaccttctaattaaatgcatatgtaacaaataattggtggatatccatgaataaaaatatactaaatgcaatctcattattttgttttcgttttttttttttttttacaattctaattattattttacatataataattgtccacttgccaaaaaataataatattgtgaatgattatttatattatactatagagagtacaaaaatgagtgtgaatgggagttttattaattcttataattaagcactcctgtttatattttaataatatatattattgtttaataagaaaaaaataaataaataagaagattttaattaaggttgatttggctcaactttgttgaatcatgacggtgaatggggagcatgttttgatttcatatttcatttatttatatatatatttatatatttaattatatatatatttttataattattaatatatattttacataaagtgtgcctatataactgaaattcttagtttttgagaaatttatgggtgacttttaatttttat

SEQ ID NO: 386997 - DNA, 959 bp, Cannabis indica
gctattaatattgttaatgaattcctgtaaatggatgttgttggagtaacctttagttatagcacttacaagaattttacaatcagtctctatttggtgtatcacaagtgatttctcttcacaccactttagagcgtgttgtagggagtgtgcttccatcataagtggctggtgaatgcctttccaaggggtagcgaaagctacgtcgatttctttattgtgagttttgaaatatcaagaaaaagcccatcttgttccttttagtattttgggttgtatcagtcgtgagcttgagttggtctggaggtggtggctgccaatgatgtgaagagcttttaacttcatgagtgttgtttgatatgtttgctatattgtgtggttggtattggggaaaatagtcttacgtccattgaatggttatagaggcatctgtgacttgcttttgtggagcattttattcctttaatgccatatttgccaaagtagacaggcaaaaaattgaaagtctttgataggcattatgtcaggttacatataaagcatcattacaagacaagcatttaagtttattaatattttcataaaaggttgttattttccaaaccttctggatggtagagcaaccaaacaaagcatgtgttagactttttattcgggcttacattaaattttattagttttattaaaacttgagttgatttgatagttctttgctgtgttaggccatattattggtgatcacttgttaatgggctcagcatctgtgtgtaaagtctaggtgaagcagaagtgtgatcacttatgactgcaacatatatttttaaatcgttttccaagtaaatatgttcctaaaacccttttgagttctggaatgagtgaaagcctagtctgaatcatcttcgtgtatgggattgtctagctgaagtaaggatttatgatcctaatttgaaaaagttaga

SEQ ID NO: 386998 - DNA, 1115 bp, Cannabis indica
cgttgggccttagagagagtcgctttttatatgttttaaaatattattaacggggtatcattgttaggtattaaaataccgagttttgacggcatttgagaattgactaaattgccttttgttggtaagattgcacttgttagtcaagatgtatgttagtcttttcttagatttttgtctcttgtgggaatcatgggctgatgttaaattataaaaaaaagaaaagaaaaaggaaattaattaattcaacctaaatagctaagtgatagtgagaagaaaagcttggaaactctcttttcgctctctctccttcgaaccagcctagggtcgcaagatttgaagtttggttgagcttaatcaagggattttatcaaggatttagtgcttcaactcaaggtacaactctctctagtgtccttttctttgctttctttgattttaagttgaattatagtggagtattgtgagttaggttactgtgtttgttttgggatgtgagattttgtattctggagttaggatttaattattcaacctactttgagctgagattgaggtttgtggtgagagttgatcaagagaaagtttaaggaacctaagttgggtctttaatggtgtttttatttattgagttgctggctgagttttattgattgttttgggcttattggagtgtatacaggtatactggaagttattaggaagtttgggtttgattggtgaagtggggagcaatttttgggttcccagcacagaaccggtagatcggttctaggggaccattagaaccggttgaccggttggtacccaggaatcgggattccggttggaaccggtctgccggttgggctttttcccgaaccctagtttttcccaggtgttagcatcctatttatcgatagggttaccccttgttttaatttaaatccccaaaaagtgttttagcatgtctctcatcgagtttcgaatattatggtttagggccctgtaaagcgtcgagctgcgtttccactcaggctgaccggcacacttgagcacagagcgaggtaagatagcataataacatatatatatgaatatatgcttgttttaattatttacactactaacactaa

SEQ ID NO: 386999 - DNA, 224 bp, Cannabis indica
ctgtaagtaactgcagcaaactgatgtatatccatagtagctttgacctgagttttgacttgaatcaacttcctccaataccagcttgcttgcattggtgcttgataatcccaccaggcctcttctttgacatatacacaatgaacccatctaatccacagattatcttgcttgtttgcaatcgcccacacatactttgtcattgctgcaatgttccattctgc

SEQ ID NO: 387000 - DNA, 1628 bp, Cannabis indica
tgacattgacaacaaagtccgaatgaattgtgcaacctcgaaaaatccattaggtgcactgacttggtcgagcttataaccaactttgaagaagctgatgttgtgttcgtatgctggtagcattgggatccttcttggttcccacatatggaacgtacgtaagaaaggagtacataaatgcactcttagatgttgagccgaaaggcaaagctttcaagagagatcaaaatcaaggattcaatatttgctaatttaaatctaaagcacttgtcaatcaggcagaatggagactacagggaagaagaggaagaggagcaggaatagcaggaagaaagaagagcgaaggaaggtagctatgggcagattcagggcaaactacgaactctcagagaaaatcgcagatgaacacaaaccagccaaagaagcattcacagacatactagaaatgtacacatgtaaatcggagggcacaataagcagattgataacaacatgcgtaggccttacaaataccgaggacgacgctatgcaaaaaggtgcgaactatctgagtgcaatcaccatatatctgccttcacttgaaaaagttgtcaaacgcgttttagggatgaaaggatatggggtcactgagctagatgaaaagggattggatgcaaatgacataaaattagaagcggcagtcaacatggacaaaacggctgcaataactggccaactgatattgattctattcaagaacataaatgagaagagttatgacacctacatcagaaagagggcagcggctttgaaggcaatagtcgagtatcatggaaaactcattcctgggtgcgatgaagacgtcttacttaatagagaaagtgcagagattatcagtaatgtgctaggtgccaattgccttttgcgttccacaatcatgcacgctgtgatagccaattctaaacatgagggaagctttggtgaagtttgtgggtatgtaatgggtatagccgcgtggacagaaatgaatgcaataaagcatatttttgacgcgatacttgccctaaaatctccagtattgggtgtgagcaggctggccgcagaagttctgaatctgcaggaggcatgcatgacaataaataggacggaatatccgcaactttttaagatctttcatccaactgcagcaactcgggttttggagaaacaccgatttgcaaatttgacagcgatcgcaaagagaattaaagcagctgactaggcatcaatgaacaattatgtgggagtagcgggagtagaccaggcgtttgtgatagagatgacgactctacatgtcagcgtgacaagcaagagacagaagggagaggtgaagagagctgagaaatatttgactgatatcaacgctcacccggaactggaggactccgagagcggctctgagacagagggggaagactaagatggcttgttttaattttataatttaagacaatattaagtagatatttagagtttagtcaggactttttgcttaactcattttggggccagatggaattttaagagacttgaatttagggttgtttttatggttattattaaaaaaaaatgcactcttagatgttgggcggataaagaagttgaactgg

SEQ ID NO: 387001 - DNA, 1527 bp, Cannabis indica
aatcctaattagcctaaattataaggaaacaaaacaatatcaaaaaacttataactgttgtcaacccgaaaaatatttaattgacgcggagtcacaaaaacaacgttaattacgataaataaaatggcaacaaagatgatatcaatatcgacactcgatttttataaaggtttaacccctatatctctgtaataacttgattcccttttagttgtattatctttaattctacactcaagatcataagaaacgttcaagtgagtttttttagagtagaaagactcaatagttgtattatctgctgagtttttgcttacaaatgaaatcgcccacccctttcattgtgatggaaggattatatttacagggagggaatcaattagcatttattgtccaactccgcacgccaatcagtttcctcaatcggtgggatttgattgatcttaattctctagcaatcttcaacattaaatgaagatatcggcttggtcttcacactcgcacgcgctaagggggagccttgatgtatgcaacctagggtatacatgtgctcccagaacaatactttgttgtcttatttccttattgcgaggcatgtcttatctgtcaagaaaatgctacacacaagggttgcgctacgggattacaagtgcaattgagataactcttcctttgtaacatgattgtacgccgcctaggtgtatacttagggacaaaatctttaagttgttgagacaattaagttaatgtgcttaatcttctttagaaaggtatctgattgtggaatgcgaaagattaacttgatattagaaaactgcacccgaaaatcctcccaggaaggatgagtatgctactcagatgtgtattccacacatgggcaccccgaacttcacttttttctttctacggagtgtatcaaaccactttctacgaaatgaaacttggaatagacaaattgcacccaaaaactacctgggagacaagttcatgctgcccacgattaaaaatttcttcttgcgcaacatggtgtatgccacccaaggtatgaagcttcctcttgggtggcgtacctcatactgcccaggcggttcatcccgaacttgtcaaattttgattcttgtcttgtgcggggtgtacctcacaaaccttcttcatgatgacgtatcctttctttaattattttccacatcacttagcgaaaatattggataccaactctgctttaatatatgtaaatgaaaatataataaagctaaacatcatgacaattacatataaaagatcaactaaataataaaagatcaactaaataataactaaaaaacatatatatgttcactttaatatagttcaataaaaacactaagaatttattcaacttagtgcaataacaaaaagatttaaacttaattaaaaataaactatcaactaaaaatatacatatacttattttttttatgtaactaaatatacaagaacgaataactaattaaacaataagtacaatgtaatgactaaatacctaaa

SEQ ID NO: 387002 - DNA, 575 bp, Cannabis indica
caaacacaaactaaaaaattaaactgaaaaacactatcaatacaaaacaagagaagaaaagccccaatcccaatctcaaacaagagcaagaaaaaaaaataataataagagaagaaaaaaaatactaaacctagatctgaaccgctctccactcttccgcctccatcaacctgtacgacggcctccatccaaaatctccattaatgtcgacgagaaaacagaggccacaaatggccaagaacccccgtctcacgcgatttctctctcacacgattctttgtcaagacgaccggagtaccatcaactcccccaagaccaataaatctcgatcctgtctcttcccttgatctgccgtcctccgcctccaccgtcttgcacctttgacctgggctgtgcacctgcgcaagaagatgaagagaagaagaaagattgataatttgtttttgtagtttattttttaactttttattattgtataatatattttttaattttatagatcaaaaaatatatataatttttttaattttatttattttttataattgtaagtaatttgtaaagattaaaataat

SEQ ID NO: 387003 - DNA, 1782 bp, Cannabis indica
ataaacacttttaacaaattataaataatatttaggatttaaagttgagatcctaaaacctttttgtttactttaaacaaaggtgagatctaaatgagtggagaaataaatttaaaaatggaataataaaaaatataaaatgaataaacaagaaagtagaaaggttgttgtgtttataattaatagagtgaaaaatgaaaaactctttagcacgtgagtgtcattcttgggtttccaatttgcaggtttctttttttgatttaagcgtttatatattacaacatattttacctgggactcgaacccaggacctcaaacactcacacacccatctatggccacttgagctacaacatatttttcatgaatgcttataattactctttaatttcttaccgtagaattgttaaaatatattatcgatacttaatattttttataggcagttctttatgattgattaataatatttttttaaaaaaaatattttttaagttacagatctcgattagtagtgctttctatcatttttcattaagtatcaaatcccacataacataataaataatttttaaaaaatattgctaactaattgtgaaatgtcacttataacataataaattttgccaacaatactttaaaataaaataaattactctttaattatttatacaaacttagtaagtactatttatgttaatgttatgcccatgacccacgtgcaatgacagttagcctcactgatagtttcattagtacgaactaaacaacaaaagttaaattatattatacatgtcattattttttattaataagattaatttgaacttcatttggctgattatatattagtgccaagagaatataacacaaaattgtatgcaatgattgattttagataataaccatttgcaatgtcttatttgttagaaatatataaatcacaagtttactattgcatacatttaaaatattacgagtaactcaataatttatagtaaacatattttattctttctataaaataatttatgatgtaaatatttaaatttaatttttaattgcagataaatatttaattttgatttttaatactaataatatttaagttatatttttagaactagaccaagaatgaaatagaggctcaagccaagtctctccacccaaactcaaaagatcatttaacaaaagagaaatttacattatatattaaaaatttctttctttaatattgtcacacgttattatttataattatactgtaaaatattcatagggttatttccatttcaaaactaattaataataaatgcagtaacccatgttattatatgtggcttagtatttttacatttgattcatgtggaacaatattatccaataccttactgtcatttttttattattattgtttcaattttttcttcatttttttttcttttgcttttgaaaattttaaccacatttatgtggtgattgcacttgaaagttagtttttaattagttattgtttagtgttttctttttcaaaaattattttttctttaattttccttctatttgttgttgttgctttaatcccataaacattgttcttatttcatttcaatagcggttacccgttctaattcatcgtcctcatctgttatgaagaagaaaaatttcaaagacatgtctcctataatctattgctcctatattagttgattccttttagacggtcttggtagaaacatcctatattttatatatttttaatttttacagagtttttctgtg

SEQ ID NO: 387004 - DNA, 2144 bp, Cannabis indica
tatcccacgaggatgagttaaagcacgatctgtcagttgtagagtcactatcgtgggcttcgcttctcctaatcttagtcttttaaatactaacaaaggcatcaagttgatactttctcccaaatcacatagaggttttgtttccaccaaaccctctatcgagcatggaatattgaaactaccttgatctttaagcttgggtggtagtttcttttgcaggattgccctacactcctcagtaagttccactatcttatattcttccagcttcttttacttggatagaatgtctttcttgaacttcaagtaagttggaatttgttccaagccctccgtaaatggaatgttgatgtgcagtttcttgaatatttcaaggaattacaaaaactgcttgtctaatttattcttacagagcctttgaggatagggaatttttatatagtgcacaatgtttataggtggtgtagcttcaatacccggtaggtcatcataacccactcttccgcttgcttgttatccacttcaacatgtgcctgtcgatcatgcttctcttcaaccacttgttgctcagcccttgtcccctcatattcttttccacttcttaaggaaattgcttaacgctgctcttttaggttaacctctatactactaggaaaattaccttgagtacggttggccatttaagcagccaactgtcccacttgaatctctagagttttaatagaggatctagtttccatcataaattggagcaatagatctgcttgaatgttaaatcctctgctatcactcggttgttgggcaggttgttgaggatttctttgaaatggtggcctatatctctactggaagaaaccttgcttaggctgacctgacagctacccatcgtgataatgacgacgtccatcaaggtaaggataaggatcatcgtttgtatatccaatggcatgagcttgctccactggcaaattgttgacatctacttggcatctatcataagagtgaggccctccacacaactcacatatcactggagcctttttctcttgagtagtcatcatctttgttaaggcttctagttgggcggttaacatagtaattacatcaaattcatgtaaacctactactactcttcggttggcttctctcatttggccattgttgattattcatggccatctcttcaagtaaatcataagccttattagtactttccctcataataccccaccagaagaggcatctacgagtgtgcaggtattaacagtcatcccttggtagaaattgtggacttatatccacttctcaatcctgtggtgaggacactttctgatcgggtctttgaatctttctcaggcttcatatagagactcattgtcttgttggatgaagttgttaatttcttatcttagtctagaaaccttagtaggaggaaagaacttggagagaaattttagggccaattcctcccaagtgttgatagaatttgctggcaaagataccaaccaactcttggctcgatcccttgatgagaataggaatagcctcaatcaaattacatcatcactaaccccattcatcttaaatgtctggcttacctccatgaaattcgcaagatgcatgtttggatcttcagatggcagtcccccaacctggactgtggattgaaccatctgcggtatggctggcttaatttcaaagttgttagcttcaatggcaggtgaccttatacaagatctagcccctgtcaggttgggtagcacatagtctctcaagctacagtcaggtggattaagaccattagcctggtcatctacgacacctccattattacagttattggccatctctacttcttggtcaacaactcccacaactctttccaatcttttccttctattttgtctacaagtcttctctattttaggatcgacatgcaatctagaggttagtcgttgatatcacataaactagttgttcagaattaaaaaagttgaaaagaaaaatcaaattagaacaaaatttaatttttattaatattaaataacaatccccagcaacagcgccaaaaacttattgtggatatttaacacgcaagtgtacgtatctattgtcaagcattactcacacaagtgaggtcgaac

SEQ ID NO: 387005 - DNA, 702 bp, Cannabis indica
accaaaaaaaaaaaaaacagtaaggaaaagttatgtaataagcctctatccacaatttgtgtaaatatgtgtgtatcatttccacaaattggctttcttatatactattttgtgactgtttcttctattatacaatagaataggaaaagcagtaaagataacttccaccaaaataggaagaagcaaattgtgtataactttattattatacctatattatgtgttgttatttgatgaggcagcatctgttgatgactggtatacctctttgaatcttaaactttagaatcaaatttcaatcattttttataaaatgatttctaaagagaataaatgtatgaccagctcacctgtttgaataatataatgatggcctctagagctaatgtctttgtagatctaatgtgttcttaagatagagaatataatgaaggattttttttgttgattccatactctttgagaatgtcttttagaacagtgctcttcctagctcccattccacctcccatgaagaggaggaccgaacttcgatcagaatgagccaccagtgccatcacatcagtacactgagaatcatcattggacgaaaggcccattgctttcaactcctctaatagggttgttaaaactctagccaccttcaaatttttgtcaatctttcaaacctctattgcctatatatcattgttgggttttatg

SEQ ID NO: 387006 - DNA, 961 bp, Cannabis indica
tgagctagcctggtattagatcacatgatgttatgttataaaactctagtttgtgttccaagcagtgtttagctcagaagcaatattctaaggaaagctcgtaccactacttattggttatactttagtactattaaggtatactaaaacttgaaaattctacttattaatggtgtagaatgcaaaaggatgtggtagataatgtattcgaatgctcaatttgtttgaaataggactattcattaaaaaccggtaaggttattatgatcgattaattttctcaagtgaaatgggaagaaggtgctaggaattttgtaaatggattatttaaaaccacgagtatatctgatttcgtatggtactattgcgatgcaagaactagcatggaaagttataagggagatagtatgactttatgcgaccctaaagtcaattattttgaataggaaaccaaaattcatctttaggttttaacaaagtctacagagggccattattatgtaggtgaagtttagtacagtttcctacccatagacagatggctagttcgtggggacaatgcaaatattgaaacatatactacaagtttatatgataaattacaagaatgtgtagaacaagtatctattttgattaagttctcgtacagccaacaattatcaaagtgtaatagggatggttccctataagatgttacatggtatgaagtgtgatttttttaaagcttagagcaggaaatatctagatccgaggtcagtttagtagactagtaagactatagaaaagattaagaagacaataaaagttatgttaacccgaagctcagaaatacaggaatccccaagtaggggaaatattttggggacaaaggtaagatttttcctagatttctaagacttttataacttttcgagaaaattaggttaataatttctcgtttagctttatgattagcattggc

SEQ ID NO: 387007 - DNA, 718 bp, Cannabis indica
taagtgagaaaatctcactataataatatttttacaacctttttcaagtataaacaaaatggtaattatattactaaaatacaatgagctgaccctttaaacgtttataaaacctacaaactaaatattacaataatacatcttcttctaatccttcaaccgcacaaagcaaaaacctcaccgatgcaagcttagatcaatcaacccagcaagataaccgaaataaaatccaaccaagcggagaaccaccattcattccggtgacttcaccttagaagaagactagaatcaatccaaacacatactgttttgtattgatgaaaaattgtagaaaaagtagtttaaaactaaaatttaaccctaaattccagtttaattggcagaaaactaattgaaaattttgattttttatacttacatgacctaaaatttttcctctaaacacgtaacatttaatatttgtgggatataacacattttacactatccctaaaatacccccattcatattacccactctcttcttctctctttcttcttcactatcgagctccccacataataaacaatttttttttcttcactcattcacttcacttcactacactataatctactacactacaagctatgctacttattttctttcaattttggacgcagcaacatatgcaagcaatgggtaattttttttatttgtgtaatcttgtttgttgtt

SEQ ID NO: 387008 - DNA, 2980 bp, Cannabis indica
tcactgagatggctctcactctcctagcccaagcttaattacctttaaagttttggtgggatgctgtcacctctgcagcctatctaatcaatagattacctattcaaaaacgaaattacacaacccctttatgagttttttttttcacaccaaacccgcttataaattccttaaagtttttggttgtgtttgctttccatttctaagaccttacaactctaacaagtttaatttcaaaacttcagcttgcctatttttaggctatagccctgctcacaaaggctatcgttgtgtacatccctctggccgattgtatatttctaggagtgttacttttgatgaaacttgtttcccttacaaatcaatgtttaccactcctaaatctacatctgctatcaacactgttatgcctcaatttttgccacttcctcaggcaacacaccagaataatatcacaccagctatgactcctgaaccttcatcagatacctctctgacatctcattcccatcctcctggtttcccacatcctatatacccccccttttctggtgatcataccaccagtaaccatttcacacatgtccaacctactgtctctcacaatattccacctgagtcttccacctctgattttcctcttgtcccttctttacccactgccactacacaaatatccaacatacatcctatgcaaactcgttctaaaaatggcatcactaaaccaaagattttagcagctgaattaactattactaatgatgattttagtgaaccaaaaagtgtgaaacaggtcctgcaatcaccaaggtggaataaagctatggataatgaatattatgcacttaaaataaatggtacatggactcttgtgcctttcacagatgatatgtgcatagttgagaacaaatgggtttacaagaagaagttgaaggcatatggttctttggacaaatgcaaagctaggcttgttgccaaagggtttcagcaaactcctggagtggattactttgatacttttagtcctgtggtcaaggctagcaccatacggattatgttcactcttgctgtcacttttggttgggaaattcaacaattggatgtaaacaatgctttcttgaatggagatctcaaacaaactgtctacatgtatcaaccacaaggctatgtagatgaggcctatcctaatcatgtctgcaagttgaataaagctatctatgggcttaagcaagcaccaagggcatggtatgacaagctcaaacaagtcttggaatcatggggatttacaaattcagtttctgactgttcattgtttttccaaaataaaaacagtcaactgactttggttcttgtgtacgtcgatgacatccttatcactggtgctaattctaatactatccagtaattgattcttcatttgaatcaacaatttgccctcaagattctcggactagtgagtaacttcttgggttttgaagtttcaagacaaggttctcagtttcatctgtgtcaagcaaaatatgctcatgacattcttagaaaaacgaatatgttggattccaagtcttgcagcactcctatgactcctagctacaaattaactataacaactagtgacaatttttcagaccctacactctatcgaagcactgtaggagctttacaatacttgactctcactcggcctgacttatcttttgttgttaataagttaagtcagtatatgcaatctcctactctcgctcactggtgtgcttgcaagagggttctaagatatatccatggcaccttaaatcagggacttgtctttaaaccaactaaatggctctccctggagggattttctgatgccgactgggcatgtgacatcattgacaaaaaatctgtcactggtttttgtgttatgttaggaggcaatttaattacttgggcttccaggaaacagaaagcagtgtctcgatcgagcactgagtcagaatacagggccctatctaccactgctacagagttagtttggatcacttcagttctcaatgagcttggaattactttgcctcaaaagcctaaactttggtgtgacaatcagggcgctcaaatgcttgcctctaaccctgtttttcactcaagaacaaagcacatagaagtggatgtgcactatgttcgtgatctggttttaaacaagcaacttgaagtttcctacataccttctgaagaacaacctacagatatgttcacaaaagctctcacatttcctaagtttaattttctgtgtagcaagttgtccatggaatacttcccgaacaccttgagggggcatgttgaggaagttagtgatagctgtgattagtaactaactgtcagagttagttaaggttgttaggcttttctgttaggttgtttcagctcacttatgggctctctctttagtatagatatgttgcttgtatcacttgttttccctttccttctttctctctttctctgttattgattctgcttttgagaatcagcttaaactattcgaaattttttaaaaatttacagggatgatgttgtaagcataacaaacactcccgaaatttccaacatgtattttcgggcgtagaggttgactaaaaaattataacaggaggttgacaatagcactcttcaaaaataattttatgagctatcatttttttattattattaggaatgagaataatgattttttttttaatggactagtttagactttggattttaagaaattacaagaacttgaattttgtaaagaacaagtgcgggtctccatactctacccattgaatcggatgcgactcataaatattagatctatttacaaaaatataggaaaaagaaaagaaaaatatttatggcataaaaatttaatggtattaaatatgatactttttctaagaaaaaaaactttcgaataataagacctatttttttgtcgcccttcatttcattaagataa

SEQ ID NO: 387009 - DNA, 538 bp, Cannabis indica
tcttgatagtgaaggaggtcttccactccccgtcgaatgttatcacagcgaaggaggtcttcctcatcccttcaaaacagtcgaggaggtcttcttggcaaatgtcaacgatgtgttgcaacatttgcattctgctctttggttgccaaggagacggtcgatactatctattgtcaagaactcaacagacaagtggtagataattgagatagctcggaggtcgctgggtgttgaccttccaaggagacttagtgtcgatcactatgaagatagtcatagtgatgttttccaggggacaatttctactatgagtggtaattttattttaccacagggagtgaagttggctcacctggaaccatacatgagttgcttgcatggctccagatctcttagaaaacaacccactcttttcacggtctattttgattataaatttggtgatgctcaatcactaaccatcacctttgtcaccattatgattgaaatttttttgatactgtttgaacttgattattctgttggaagttattttacc

SEQ ID NO: 387010 - DNA, 795 bp, Cannabis indica
ttttttcatttgatcaaaaggataaagatgggactcttattttagaatattttgtcattgcaattaatgttataagaaaaagtcaaataatattatatgtactttcaaaccccccttggtccattgggagttgaaaactcttcttgataatacttactgtttcaaggttttcccttttatttattatttacattttagaattgtgagttcataaccatagtggtggactgaaaggaaaataaaacaacgagattccattagtgtgcaataaaattaaaaccaccttagtctaaaagggtccaatcaattattaaaatataaaatcaaaagaaagaaagtactcatgatcatcatcatcatcatctatctatcatccaccaatctaataataaatgctgaaagctgtgatcttactgcctgtctagtcaatcatcaataaagctgtattttctcaaagggacagtattctgaattgtagtaaataaagtagtagtacactcttctccttgtgttgatttcaccctacatttacccttttcttttttacatctctggcaagcaattgtatatatacagctgccaagtcttctttgttttgacttttctaaatgtcaaatattaaataaataatattaataacatattaattgggagggctactggtgctagcttcattagttacgacttttatgatagaccatgtgcgtgtgacggctcgaattgatcatacatattaccctcaaatatatggcaagcatagatatttaataaaaggcaggtatttaaccatttttt

SEQ ID NO: 387011 - DNA, 737 bp, Cannabis indica
agagagagagagaggacatgtataaaagactcatgatgcaaaaccatgaaacagtttcccacagtgagtttttccatcacaaggcaaaaaacacaaacaatattataaactatatgcagccttcaaatcttttaggaaaaaacttttcaagccatcttagaaacctgactttttaaaagaaaggtaatgtatcaagatgtctcgaacgtgataaaaaaacaatggaattacttaaaacaccttttacttcttaaccaagctatacacaacttgttgaggaatccctcaaatggagtttacacaatcaatccatggagttccaaaaatcctaatggcttaacaccaatacactacaaccaccacccaagtcaatgctacaccttaagatgcatatcatcaatgaagcagcaacctacagtgagaatcaatgatggtaggaacacacaaaagaaattgatagggtaactcttaacattaaagaaaatatatcatccatcaactaacgccctcagatctcatagctaatatggtcattaaaacagaatatgggaatttttcattacgagccttgctataccatccagccacccagagagagagagataataaatatatatatatgtgtatatggatatgaggaatgctaaaaggcaaaaccggatgggagtgctgttaaatgtggctatcaaaatgagagagagagagagagagagagagagagagagagaggaggagag

SEQ ID NO: 387012 - DNA, 1228 bp, Cannabis indica
agttgcattaatttccctcagaatcttcctagaatgtataaatgataatactgcttcggtaacttcatcaccaactatgtcccagttatcctagaaaaagaagcttgagtaaccgtcaggtcctggagctttaattcctggaatctcaaaaaacaccgtcttgacatcttccttagtatactctttcattaaattttctgcctgctgctttctaaccaaaggcccttgttgcataacacttttaattacttgctgcctattctccattttactacctagcagttggtaataaaatgagagaaaggcttctgtaattttgttctaatcctccactcttattccctgttgatcttcgattgaaagtatactattttgcttccttcgttctcgaatgctggcatgaaaaatagctgaattctcatcaccatccttgatccaattgaccttggacttctgctgtaagaaggaagacaaccccttaagcagaaatccatatcttttccgtactgccatttcttgttcaagtagttcgtgttgaagtagatctgcctgaattttcttttgaatctcaactaaatcctttttagcttgagtagttgcctcttggatgttggagaactctcttctattcagctcatttaattcggcctttaacattcgcagcttgtatgtaatctggaacattttagtgccaacaacataagacttccaaactcttgtaacaatctctgcaaactgtggatgagaggaccacattcaaaagtatttaaagggcgtcttgcctctaagaatttctggttaaactgatacaattgttggggtatgatcaaacaaaccttccaccataaagacagcttcagcattcggatacagatccatccacttcttattagcaagcactcgatctatcttagaccatattctttcatttccttgccttttgtggctccatgtaaaataactacctctgaacttgatgtcctccaactgatagccattaacacaatcaataaaatcagtagcttcattgtatttcacctttttgcctatcctttcttccttgcttaaaatctcattgaaattgcctagtatcacccatgcctcatttgttgcaattcttttcaaatctgtccaaaggaccttttgttgggttttgtgccctaaataaaactcatttcaatataatcaatttagtagttaataaagatcagaaataacattttatgtt

SEQ ID NO: 387013 - DNA, 615 bp, Cannabis indica
taaaaaaatttatagggtattttctataaatgaaatttttattaagtataaaaaatataatttcttctttaaaaagcaattatgttgtactttaaagtagtttgtaatttaaaaagtaatccaaatatttcattaattgattacttatgaatatatgtaaaaaagataaaaatattaaaaaagttttacaactagataatttatttttatattttttttaaatgtaaaatttaagattttttttagtcttagttgtttattgaacaaaatgattcaaataaagatttgggtggcatttggttagaagtgatgaaataaaataaaatggaacaaaagaatttttattaattataagaaatgaaatttctcctttaaagaataattatattgtacttacactagtttgtactttaaaattaatcgaaatgtttctttaattgattatatataaatatattaaaaaatattaaaatattaaaaaaatttacaactggataatttatttttaattttttaaaatgtaaaatttaagattttgtttttattattagttgtttattgaataaaatgatttaaacaaagatttaggtagcatttggttggaagtaatgaaat

SEQ ID NO: 387014 - DNA, 1144 bp, Cannabis indica
cattgtaaatacatcgctaaattttacaaaaaaatggtaaactaaaagaaagaaacacaaaaaacgagagaggccgcgagagaagatgatagcaaggccttgcgaccgagattctgggtctgtgtgttcgactgtaagggttctgagtcggggttaatgccggagagcgagagagaagtttttttaaaatgtgagtatattttaagagaaaaaaatattaaaaatatatatatactatttttaatttggtagtatattaaaataatatattttacatttaagttaactaaactaactttcccttcccatgttacacatgtaatcgcttacgtcatgtacttgttacatattatcatatatattctttctcatcacatatatatgtatataaataaagaggaggcaatttggacaactgtgacaatacattacatatatgtttgtttggtatggagagaaataaattgctaacatggaaaaaaaattataaacatagctattagacgtcttattgatgattaattatattttataataaatattaaattaaattatatgtaattcaaaattaataataatatttcatatttagaaaattaagttatgtcgagattctaatcttaggtggcgtttagttgaaaataataaaatagaatggaatagaaatgaaataattttcattccatttctctatttggttgcattttggtagaatgactattctattttaaaaaagaaaaagaaagatcattccaatgtaataagaaaaaaaatttaatgatttttttatcaaatttttttaagcattttaaattttattctattcctattgttattctcatttatattcctattattatattttcatttctcccaaccaaacatcacctggcttaattgtacgttagtgccgagataagtactaccttttacatttctttataaaaaaagagagagagaaaataagtgtattttcaatagtattttctatcactattcgtttggaacgccgtattagatcgtattgtattgtattgtattatattgaattgtattttatacaatatttttatgtaaaactatatatgaggtattaacttttatggacacctaaatatataatattttagtataaattaaagtt

SEQ ID NO: 387015 - DNA, 695 bp, Cannabis indica
tagaacgtagcatggaatcctataatccgcattaataccaccatctttttttctgttggaaaaaaattcaagcagatatgattgtgaaatggttcacttcaatgatttattgcatattaagatcttgtttgaactaacaactgtataagggtgtgctacattcaaatgatcaacatagcatatcaatttttcccataaaccaaatataaatagagcttataagaggtatatcatcccattcatcacacacacctaaaaccccacttaagcagaggtatgagtctctatacaaagaaacaaatacagaccgttaaacccaggattaaatgaaaaagtagttaagtcattgcggtgaaggatagcttttgattgagaatagaatagtataaagaagtgagtatagactttttattgttttattaagatttgggttaactgaatagttctttgctgtgttagcttatattattagtgatcatagttgatgggcttaggtgtgtgtaaagtctaggtgatgcagaagtgcagtcttttctagttgactgaagcttttgatgagcagactcagtccaacattgtatacttctaataatcaaaaaaaataaaattacttctgatttagagactagggagaaagatttagttgatactattgtactatcaaattgtggtaattgttatggatcaatcaagta

SEQ ID NO: 387016 - DNA, 986 bp, Cannabis indica
atattgggattataattagaaatcggagctcgtaatctaggatcagttggaagatttgccatatttattgaattacaatgtctctttgaacttctatcaacctctggttcaatttaatgtgataaatttagaactattgaataatattttttatatatctacaattcaaatataaattataataattagattttaaattatatataaaatcatataaacacaaatatacatgtaaattttttatagtctaatttcaatttagttagtaaactatttatccaaatagctagttataaaaaaaattaatcatagataatgattatcgatccaagccatacaaattttttaggttagtaaactaattgatccatcataatataattctgatcattgatcaacattattaaacaagtacataatacatatatataatgtatatacctatacattttatggtaccacttgatacttatttataaatgatatatgtaaatatataatttatatgactaagtcaacatttatttagtatataacaacaaacacttacatatcgtctagctaaagtataatggtgtgtttataaatcatttatgcaatctgcatcaatatgtcaatatagttaccaatttagtattactcaatgaattaaaatctctatgaccttatccaaaaaaaaaaaacaaatctcaatactacaaatttaaatactaaactcaatcaaaattcataagaaacataatactaaagtaaaattactaaaatttctttattaaaaatttgatattatatttagggctattatctatgaactaattactaacactaaaataacaaatcaatatatattttaattattaaaagtataaaataaatatgccctttggttaaatgatgagctatcttggttcgaggaaattccaccaccgattgtggtttgctgcattgttcatcacgtgtgattctgttcatcgcgtcaaaaaaaa

SEQ ID NO: 387017 - DNA, 2230 bp, Cannabis indica
aggtttctacagcaacaaatcagaccagaaaggaaacctgccaaacaggtgctcgatcatgaacattgactttatacctgccaaaagcagtgtgcttgatctgatttatcaagatacaattgaatacaataaagagaaagagcaatggtcaaagtttccaaataaaaccaacttttcatagtagaatttcttctcttacaagaagtttccaaaataagaagatggacagctgaaaattaattctttcctttgaaagaaaagagcaataaagacacaatatcaaggagaccaaatcgatttaattgcacaaataaaacatacaataaataaaaaaaatattgacacctaaattgccaaaaaaagactttacacaacttaaactgtaagttttttttaaaaaaagttaaaaatggtaagtgggataattcctttgtgtcttatggccaattattttaaaaatgttgtgttatagtgcaaatttctcacctagaaatacaagagcagtctcatttaaaattgacatgtggatccagttctcgagaaaaagatgatgtgttaatcaataactcccatagagttagcctcacttgatctaaactcacgagatgatgcgatcatgacagggtctagtcgcatactatgccttgcatagtcaaggaaataattaggaccaagaggatttgatattgttcgcgtatatatcaattatatatgatgaccaagtagacctctcttgcaactagtaaagattgcttctttacataaggattagttcgaataactaatgtgtttgacgatttgtcaaggactcgcatgttctacattgtcaacacataagatgttcgtctatgcgatcaaaggtgaacgcaaacatccaaaccataggctcatagaccactgtgaatacaaaatgcacctaaagcctgcgagcttgtgtgagaatatgaacatgcaactcgcgcttagcaagtcaaatacatcgctgcacttaatacaagaacaaattaaaatgttcatcatttattctataaacatttattctaatttaatactgtcatttgttataaaacaattctaaaaccgatcagttatgtaaatcctaaaggacacctattttctatataaaggagtgatctaaatcaaataaactaagctaaaatctttacaacagtagattaagcagaccaagctctaactgaaccactataattcctttgtgttcttattattttctacatttattttgtttgtttattagcaatagtttgattactcgctactctaagtgagtacacacaattttaattgagtgttcttatttgtattaaatactctcacgaatttggtgttgtctaaattccttcgaaaacatttgccattgtttgtgggaaacacattatcatttgtaatttttggaggagaatcaccatgactacagattagacaaatgtgaacaataatgcaggatttttcaatgttgggaccatgaatgttcctactcatggtaaaggaaccgcacttggcagaggagtttcccctggtggaggaacaacacctggaggaggaacaaacccaatcaaaaccgtcattgcaggagtgggaagaacccatccttaatttattcccagaaactgttgtcatgcatgagaaacttcgacacctgcaacaatagtgggacacttcccacctattaaaccaactgtcatgtctgaaggcatcatttaggtcacgaccatgcagtatgcagtcattcaggaacagatgcaagccatgcaagataaaattgcagggagagatagaacctggacccaacatcctttacgagtctcgagctgacgtgaggatgatactcaggtaaccaataatattagacgtcatactgaacgtcctaataataatataataatacttgtgattgtagggaacaagtagaatagaatggccaagaaggtttagatctgaatcaacatctacacgactccacgtgtaatagaggccctactgctccaaatatgggtcgacaccctaaacaaaaggaggaaagaccacaagaggaaggccccgagcgacacaacatccagagtcgtgcacaactacgaactaagctaaataaaggtgcctctcattcttcctctactgatagtcatcctcctagtgtttatactaggtcagggactgtatttactagggttgtacatatatttttgtaaaccgcctaaaccgaataacc

SEQ ID NO: 387018 - DNA, 557 bp, Cannabis indica
taaaattaaaaaaattaattaatgggtaattgataatcaatccacgtgggaacaatactctatttagccatgttttacttgttttgattgcgtatacttgtgtactgaatttatcaaacaacatcaccaaagacaaaggtgaccgacgacatggagctcattgccctacaatcacttatattttgctccatgttatggggcaagatgtggagaaagagggttgagaccttgtccgagtttatgtccatagcacaagatatcatcaacttaaaatatgcttattagcaagcctttagagtccatccagtttcggctccttctgtgtccgcaatgacgtttaacacggaagtcctagtccctagcactcagcacactctgattatctatggaccttttgcatctgggtaggcacctacccaaacacatttttctgggtatggagcaacacaaactagatgtagcatcactcccactcctaaaacaatttctaaaacgatttccctaaaaatgtaagttacttccttttatagtgtttcaactagggcttagggttgaat

SEQ ID NO: 387019 - DNA, 1463 bp, Cannabis indica
tgtgcaaaaatatcgcaacaacttatacctatggcaggcccaattcaataatccatagagcccaaatatctatattttttttttttttgctggaaacaaagcccaaatatcattttgtgctttttcatgatgttcagttgtgttcatggaaatgggccttagaacaaaggcttagtggcttacattatttgcagttgggcagttaagtatatataggtatcacttttaagttctcaattcaacataaatttgtaagcttatttatttccatacaattcctatattgtaaaacaataatcaaaatataaaaaaaaacatataatataacagaaatgacatgtaaataagcaatattgatgatagatggatttataaaaatgtatatacaaactcttgctttgaatatatttctccttaaaaggacataaattgtacttactcttctaaacatatatatgcacatatataacaatgcatacacggaaagtgagcacaatcaagaaaagttttaaaaaaaaaattacaacataagtcccaaaattttaagtttgatgcaagttcctaattttgaaattagcaataatagtctccaaaatttgtatatgttggtcggtacccaatttaacagattcattaaatgctgtcacgtgttaaaaatttattggtctaaatcataatttcaagtagaaaaaaaaataatttaattaataaataaataatttaaaaataaataaataaaattttaaatattatttatttactttattcaggtctccttcttccttttcttctatcctaatatgcccaaccacctttttttcgcaagctttatgttccttctccgtcttcttccaccaccaccaccacccaattttttctgttcttgaattcttttatcacgttgttgaagctttcgatagcattgcttgtcattatattgtacctattgcctaggcaataagaatgagcccacttatctaattctatactctcaacatatgcaacgatgtcaagatctatccatttaagcacctcaaaatttctatcatattctctcttcgaccatgcataagctgccaactatatttgtgtgtgacatacatcagtctttaacttgaccatgacattcatagtaatatgtttatagcatgcacaatggcatgcttcggggaaaacgacatcaacaacatgttcaatgctttgatgtctattcgatacaaacattaaggtttcaactaacccatcgcttcccttaacttctgtaagatatacttctaagaatcatgattctcactattaacaattgtaaaggcaatcaaaaataattagttgtttgcatcgcacgctacaacaactaacattgtgtcaccatactttgtcttcaagaatctgccatcaatactaatcacaggacgacaaaacttaaatcccctcctacaagcatccagtgaccagaaacagta

SEQ ID NO: 387020 - DNA, 1197 bp, Cannabis indica
atggattaaagctcgttaatgtcctaaccacgtaaaatattatcttagttttctttctaatcatactttctttagcttaacttttataatattcagtttctaaaaatctcgacaaacattaatgttttagtactttcactgcaaaaaattaagaaaaaatatttatccataaataaggaaaaaagttaaatattttagacgtaaatttttcaatcaaatgtaagacttattgttgttacctatataatgacaagaaaaataacaatttgatatttttatcgctacaaaaatgtttcaatatttatttactggtaaatataaaatttaggtatttttcaaattttttttttatgaataatctgctatcttttatttttatttatttaagaaataggatttttatcctgaattattatcactactttgtttgtacttctttgtccaaaagaggttatgtggtgtgctgggtaggttgcacgtaactatttcacactccaaaatattattgtagagttgtgctttcaaattattaataccattaaattttacctgtaaattgtagacagagaaacgcaatttaataattgtaacagctgggaaaaaaattgaaaatttcatgaaaaatttaaaaacgtgattggatagaaactaatgttatggggaagaaattatatttattataaagaatatttggggcatacatatccaaaatttcgagatgaaagtgcatagatcttatattttttggtggcataagtatcaaatgttaataaaattataaatttcgtccaattctgttaatacagactccattagcgtattaaatttataactaaacttagtttttattttttttttgtaaattttcttaatcattcaaaataattttttaagatttaaattgattttttaagatttactaaagaaaatgttgaatttttctcattttaattttgagggagtacgatttaatagttgtcaaaatttaaagagcaaaattgctaattcacaaagacacgtcaacatttaaacgaaataatagaacgaaacctaacaaaatgactaaattttgtaaatgcaaaagtttgagagaattcttaacaagccgtatattttaagaagcagaattactattatcgaaagttcaagaggtaaaattactaattattcttttatatatatactgggtaatgaaag

SEQ ID NO: 387021 - DNA, 1725 bp, Cannabis indica
gctacgtgtcacgcttttaaggttacatttacacgtgtcgtgttcctattagtttctttatgacaacggctatataggatgctcctctctcgattactgctctcagaggcgtgggccccacgtcgagccaaaaactctttgccttattggttttggtttgctaattaattaattaaatattagtctttgtcattaattaataaattaattaattaattcatagtctttgcagttttaatatttgaattgttttaatccgccatatgactttggttttgggcttagtcatcactgtttcccgtaaaaatattcttaatcatcaattactttgacttttaatccatttttgatcatgacaatctttagtgctcttttataaataataataataataatacttactaataataaataaataaatgtataacatgattagattagattagaaaacatcggaagaaattattgaatcatgttgtgtaaataattattttcttatttagaagatttgaccttatcattttaatcatttaatcaattggttgttaatgtatgatattttagaaattggaaaagaaaaaaaatattatgtagtaagtataagtttgtttatgatttttagagaatcaatttacttaattgatgaccaattaattagatgtaaaagttgactatttatgctttattttctttaaaagtcacttattgcgtaaaattgcagaacaagtactctaaaaacttaaactaaagataaattaaatattgtacaacatacttcaactttaagtcttaacacaaagaataaaaactaatgtaccttacaaaaaaaaaaaaagatatcaatttatttaattttttttttttgtgtaaaaaaaaaaactaattacttaaagataatataatcaagtaacaaaacatatcatttaagctatatttggaagttaaattttagtaaaaaaatgtcaataataaaaatatataaatttttatttctaaacatttaaaattaatccttctttttttccactaaaaaaatccacaatcactatcaagaattagtaaaaaccaaaagtcctcatggaaagtgaagacacactaatattagaaaattaaactaaacacaacaacaacaacaacaacaacattaaacaaaattcaataatctcaatcttattttggttaataatcatcacattcacattttgactcttaatgatttaagtaatttgtaggtgctaattaggattaaagttaaatctttttttttttaaaagagaattgaaacgtgtcaaaggtagaaatagtcattctaattagtgaatacaaatgtaagaaatgcacaaaggaaaattgaaaagtgaaaagaaagaattttgaagccaaaaaaccaaaccaatcaaagcaccaaagaccaaaaccccatttattattattattattattactaccaaatagtaaagctcaagctggctttctatttatttatttattaatttctattttatattttaaaaattaaaaaaaaaaagttgaattgggagaagaaaaagaagaacaaaggtctttggtggaacccaccttaaaatctgtgacatagacggcagtttcgttccatttctgactcagtttcctttttttttttaatattatttttttatataaaattcttttaatttcttctcaaccatttttgttttccttcttcttcatcttgattattttttt

SEQ ID NO: 387022 - DNA, 581 bp, Cannabis indica
atataatactgctcttttcgttttctccaaaactttaacccgcctcctttgcttcatctcatctcctcgccagtccaccatctcatattcgtatctccttcttctttggcggccgactcagtccaacgacagagagactatccctaacatccaaatcctcccacgactcctcctccaagaaagctccgcccgtacccgtcgtccactgcttgtcacgtgcccaccactgctgccactttagtttttccatggtatggtatcttgagcctttatttgtattattttctcttattttttgcacttatctctttatatgcctggaaacactggccacttgttttattgttcaaatagtatatacagtgtaacagtacattgacatatactaatccaattaattcaatttaggcccaaaaatgttaaaaattaaaaaaaatgacatttttaaaaataaattttatttggatccaaaaataaatcattcggacttagcccaataaaatctgaacccaaccactacatacccgccaaacccgaccacccgaaaatcgagtttggttgcacattttaaacacccaaaa

SEQ ID NO: 387023 - DNA, 1849 bp, Cannabis indica
tctctattctctgtagcactcaacctagactctcatagtttttttggtccttgtatttgaaaatcccactcagtacattttttccaaggaatcttctaattgcacattttctactttatcattaattttattagattaaaataacactaaagatccagttatatatagggtggttgaagggtgggaatagccaatgttttgaattgataaatttaacgagggtgcataaaaggccctaatggtgcttaattaacacgacctacgtatcatataactattggtataattaagaatatggtgtcataaatttaaattaataattagcatgaaatagcactaaccatttgcaagatacaacctgaaagtagtgtcaaataacaatcctcatctattagttatagaatttgaaaaattttaaacatgctggctttatagctcaatatagtttcctagttgccctaaccagaacgttattaacaaccttttttataaggaacattatttatttatttatttgaaatggaaataaactttattacttaactaagcttactttttcaaactttaattaatatagtacaaaagtgacgaaactctcaaggtacctacactaataatatattatttatagaacaaagtattattggtgttttcacaaacaaattattaagctcttcaagccctatcatcactatctaccacatggaattccaacaaatagtaccctctttccaagtcgttctcttttcagtttttatgcttattttggtgagcatactcttgaagcggatcagttattgcttgtttgaactctagagggtactatttgttggaactgatcagttatctagaggtcaaacaagcaataattgatcaacttcaaaactaccccgaggtccatggagactaccctttctaggaaacttgcaccagcttttgggtcctttgcctcatcaaaaattcagagacttggccaaaaaacatggacctttaatgtacctcgaagtcggacaagttccaaccatagtagtttcatcacgagagtatgctaaagaggtctagaaagtccatgataatgctcttgcatcaagaccagatactcttgctacacgaaacttgtcatatgatggcactgacattacatttgctccacatggtcagtattggaaagaggtaagaaagatttgtgtgcaagagcttctaacctcatctagggttaaaacttatcaatccattagagaagaagagagtcctttaatagtgtaaaagatatagcctcaaaagttggctcacctatcaatcttactaaaatgttgaaaagtttgtcttatagcatcacatataagactgcctttggcaaccaaaggagtgatcatggtgacttcatatcacttatgaaggatattgtgcaattgtctgctgggtttgcatttggagatctctttccatctttgagttttcttgattggtatactataattaaattaaaccatttgaatcgaaggtcatcaagaatagtggaaagaatcatcaagtcacatatcgatcaagacaaggagatcaagtctccccaaagaaaagtaaagaagaggaaaaatttgttgatgttcttttgaggtttcatgagagtgaagatcctaataagttcacattaacaaaggacaatcttaaagtaattattcctgtaagctctctttctctctctccctatgtatatatatatccttatattactacaaaaaaaacaacatttagtgacaatcttttggtcacagtataaatttttcgtgacatactaattaaatgtgacttttcactactacaaaattcactattcacgtctgttttt

SEQ ID NO: 387024 - DNA, 591 bp, Cannabis indica
cacgtaaaaatatccatctcattacttaattacctatctaatttcttaagcttttatttaatttagtttttagtaatctcagtaaatattttggtgctttcattgagagttgtagagagaatcgaagctacctcacatctacaacattggtggctaccaagaagaccattgtcgtgaaaacccttcttacaggctaagatgttgtcatgaacgacactaatccgctccttccagggcatgctcaatcgagcaatgtgagggacgaacaagtgttgaaactaacgaccgaacggctaaaacaacccaacgtcgagaacagttcgttaagaaaaacccaaagatgaggaagaggacgatggtgaaatcagagatggatactaccatgaacaagacccggaggtggcccgagtatctagtgagttaactgaaactcaacagaagctagcagaacaagaggctttttatcgacatatggagaaaatgatggtacagttgcaagccaaactcggagttatagatgaggactccgaagaagatgctcaagaggagcctattaatagggaaaaaagagcaaaccctactgatgttgga

SEQ ID NO: 387025 - DNA, 976 bp, Cannabis indica
atatatatatacatattatacaatatacatgttatcaaatgaagtatcccgattattaaaaatgagagatgttagcgagacaagaaatctagcatccaaatattgacgaaaccatacttagatttcagtctttaacatctccacattcttattaaattgattgcaaaggacatgcacgttttcgtcatgctcgataaagacatgcttcatctcggcatcttttttaaaaataatagtcgattcatgcagtagttcgtttttgagaaacaatgttctcgaacacagctcttcaacacgatcagttaggccatctagttgacgtatatgatcatgacattccatagtctgttctcgattaacatcctttgaattagaaagagagtgctccaaataataatttatttcgcaaatcattaaggtacgaaagagcattaggagggagttcttttatttcagtaataggattcatgttgtgtgtaaagtgaggagatgaattgtgacctctagaaaacatatacctcagaattgatattaaaaaaaaaagaacaaataaaggaaagttacatgggaagaatgaaggagatgcatggaaatgaaagaaaaatatggtaatttttaagcagaagaacttccttcccatgcctccacgtaataaaaaattgaagagatgagtaatcacattgaacagtaaaaaaaattgtgtgatacatggaaataaacagattgatgagtatcatctttgagcaataaaagattgagtgtgatgcatggaagtgaaagaagagcatgatctatggaggaggaacaccaacccgccacgtagtaaaaatatagaatggtgagtaatcaactttgaacattaaaaaaattgtctgtgtgaaaaaaaaatattgtagcattttttttcttacaatgagttaatattaaatgaataaaaaaaaattgtagtgaaaaaaaaaaaataataacagtaaaa

SEQ ID NO: 387026 - DNA, 683 bp, Cannabis indica
tattttttaacttatcccattaatttaggtgcattatttgctatcttatgtcaagaaaaaagatgggaagcccaaacgtactacgtttcatttgcatgtgcatggcattttttaacaatatagaaatgggccacacgtgtcaggaggcccaataacagacctacaaatgtacggacaatcgtgggccgacagtagtggagtgacatgtttatccaaagaaagggcccatttggtgggttgagattgagattggtgactgacattgtttgtcacgagattgccacccacccaccattcatgattgatatcatatatgctctccaccttcccttaccatttcctcatcgaaaactcaaccacaaatccattaattatagatatatttccctcataattattttaaaaagtaaatagggatgagtactcaaagttttgagtttgtaaacggtataagtttaatgattttttttagttgcataagtatccaatgtttgtaaaactgtaatttttctttattttcgtcagtacaagttccattttaaatttattaaaaaaagatttagaagtaactgatactacatatttttcgttcagatcaaataatctaaaatttggctcttatatgtatcatgtttaagacaataacagagtctatactgatgaaactggaagaaaattacagt

SEQ ID NO: 387027 - DNA, 1252 bp, Cannabis indica
caggatccaatccttccagcacctaattaagtaattcagtaatcagcgtgatcaaaagtgaattttttgaatagatatagctacctcacaaataaattatttattatcttttttcttttcttgttttgggattcaacaagacacattttcatttctgatgtcaagttgttcgggcattaacacttaatccataatctttaggagggagacaggctctaagaaatggttaagtagcaatgattgtcccaatgtgctgtgaaaccagaccaaattacaggccgaaccactcgccctatatgctatatttcacaagataaattacagcctataccaaatttattacaattacttcttacttccaacatcatttattctgcttaatccatattataccatgcacaaatagcacagaatccaggctcacctgaatttgatcagacccatatgatttcgaactggcgcttgcttgtggagcttcagttgctgccccagatgacatgaatgctctcggagtgaccgcatttggaagcggaaaacaacatgaactcttcctcaatagaaaatccgacctggaataacaacaaatacaaacgcaacaactaaaaacccccaaatctatttttcatttttctcaggaaatgctagaaaaaccactaaaacgaaccccaaaaaaacatctttcctggtaaccaaacagaaacagccaaaagggaaaaaaatggtaaagataaagaaagggagagtacctgggtgctttaacgaataacaaaggccgagggagcaaagaagaagaatggaagtgagagtgaagggaagagtaggagataaagcgagaagccatgaaacgaagataaagataaggaggaggtttgggaaggagctgaagcgccattaaaattttgatattttgattttgtttttagtacagaggacacccctgtacatgtacacgagctgtcttttccctcgcttccttactctccctccctgtcctaaaaccctatcccctctttttatttccctccacccaccctttgaataattttattttcatctcttttttatatatataattgaaaattctacaatggattcttaaaagaatgtatttttatctattttggtattcgaaataaattttaatcgaaatttttgtatggttatgtatgttatcgttatttaaaatatcgtgtaaatttttaagaaattcgaaaaaaaaaataaactacaacgtacacaaatataaaaaaaa

SEQ ID NO: 387028 - DNA, 1243 bp, Cannabis indica
attttagtagtatcattttttttttgtttttttaaaattaaacactttattatacaaactactaagaaaataaataataataatgtaaagaaaaaaaaaaaaacaaatttttgtattgtaccttggacaagagcctttgaaaataagcatgtaaacaaaagtaccaccataacaagagctttggacgccataacttgcttcatcatatttttttttgtatataatatatatatttttgtgtgtatatatatataaataattataggagggttatgtttcctctaattttctctttatatatatacaacctaatatatagtacttgtaattgccttctttatatatcatgtaacaaagtggtttgcttttatttttaatatatattatttggaatatggtactttgacaaaaatttacaaactaattaattatatttaatactagagaagaggaagacactataatatcttatagattaaaagccataatatgactaagtcagttcatatgaatttatagacaaaattaaataataatatataattcccaagtgtgtagttgttcttcattacagataataattaatcaatattaaaaaattataatattaattaattaaagacacttattcttaataattctatttattatttcttcatgtgagtgcatgttacatgctaaaagaaagtaaacgctttgttggagcaaaatgaacttttttttttgttgggtttaagtaaataaatataaatattctatcaataaaattgaaattagagaaatgatttggctaattgagttttttttttgggtataattggaatcaaatggttggttttaaaaatgctacccctcacacatggtgtctttagccaaattggatagttagtcaaatcttaatatgagcatttttttttaataaaacttatatataatttagtaaaatatttaaaaatagaagttgttgggctaaaggatccagccatatgaaagtaaaatgattggcagcccaatctaaatattaagatgagcttactgggcctaagaggtgtgtaatataaagggaaattttcatgaggcacctaaatttagaaattatttacaaaaataactttgtttttgtgagtaaaagagattttacatatcatacccctttttcaatcttattatcaaatatatcttactcaatctactaagctatttatttgccttatatacatatttaattaacgttttttttttt

SEQ ID NO: 387029 - DNA, 2155 bp, Cannabis indica
aataaaaaaggaaacagaaggatcagggggttgaacattacctttaaaagagatgaatctccaaccagaaatccaataagaatgcacaatggagatggatttgccattacctactttccacaaaagatctcgcttaagaagatcccgcctccaaagcaaacttttgccaagtaaaagaggcacaatgacctttagaagcagaaataaaggaattatgacgaaaatatttggctttaaacaacctggctacaagagagtctggcataatgagtatacgccaagcttgtttagcaagcaaggcctgattgtgatgaataaaagaacgaaaacccagtccacctgaaaattttgattgacaaagattcccccaagctttccaatgaatttttcctttgttacccattgaaccccaccaaaattaagccataagactctcaattttcttacaaacagaaacttgaattcgaaagcaagacatggcataagagggaagagcttggaccactgccttaagaagaacctctttaccagctttagagaaaagaagactattctagctaattaatctagaattcactttttgaatgaggtagttgaaatgagaagttttcgacctaccagaacactgtgggacacctaaatacttactaacaaaaggtttatcctccaaacccaaagtagtgtaatagaattcagattcaccagggctggtattaggagaaaaaagaacagaggtcttagaaaaattaactagctgaccagtggcattatggtaaagatcaagagcatgcttaatagctaaacaagatcgaccagaggttgtagaaaagagtaaactatcatcagtaaaaaaaagatgagaaatagaaggggctgaacgacaaatcgaaataccatggaaattatggatagactcctggtatctaatggcagcagacaaaccttcagaaacaagcagaaaaatataaggagaaaaatgatctccttgtcttattcctctgctagacttaaaacaattagacagaacaccattaacaagaaacctaaaagaagcagtagacatacatctaataacaagggaaacaaaattagcagggaaatgaaaatgaagcataatagcttccacaaaattccattccacacgatcaaaagccttttccatatccaacttgattgctgcccaacaaactttaccaaattccctatgactgatagcattaaccaattcattagcaataaaaatattatcaaaaatgaccttattctgaataaaagcactttgattcgagaaaataatatcattcagaacacttttcaatctattagctaaaaccttagacacaactttataaagagtagagcaaagactaataggcctcaaatccctaactttattaacattcttttctttcggaacaacaataatgaaaatctcattaattaaagaaagatcagcattattattcaaaatagaaaggacaataacatacaaatcagcacccaaaacggaccagttcctttgataaaataaagcattcataccatcaataccaagggatttatctccagccaactgaaaaagagcagctttaacttcatcaatagtttaaggctcctcaagcatctgaaaacaagggatatcaatacgagtactaacacaactaagaatttgctcaatagcctcaatgctagtaccctgggactcaaagaggtttttaaaaaaaattgagaaattgagtacaaatattagcagtattaacaatagaggaaccgttatcaagagtaatactacgaataaaattatttcgagttctagaggacgccttggaatgaaaatatttagtgttcttgtccccgacttttaaccaattaaccctagagcattgcttccagaaaacctcctctttataaaggagagaatctatctgagattgaatatacttagccttctgattatctaagtccgaaatagaagagttggaaaaatgttatctagactagattgaagactgttaatttcctttctaaagttattcttattaatactccaatttttaatagtagaaatagaagcagactatgtaatggagattgtaatggaatcattattattagggatattggcggctaaaccacctgaactttacggtttgta

SEQ ID NO: 387030 - DNA, 1395 bp, Cannabis indica
tcttcactcatctttgatgagtatatatgtactgatctttcccagtaatgaatcaatctttcactctcctttctcaatctttctctgtatcttcctctctgtttcttctttactgttatgttcttcatctaaggtccaatggctaggagattcaactctcctaacaattctactcacatactatttaacttttgttatcttttgttattttaatctttaccagatactcaaacaaaaaaaaaatatttttttgcaaatataacaaaatatttatatattagaggatctaatgtttgaatacatgtttaaagaagattgcaagaatgtcttacacaattttataataattattaaattatattagagtgtttggtagttaattatgccattattataatattttacagtaacatgtaggggtgcacaaaatatgggtcaaactattcaatcaggttaactcattttttgtagtaaaggattatattaagggtaggtcatgactcattgggttaaaaagtgataggtcatataactatgagttagttataaattgtgcacactttaactctatataccccaactcaatcaatttcttgaaagatgtttcaaatttgagacaacttttatatataaaatatattttacattaacaaaatatatattttatattttaataaataaattgtattattaggataaccttagaaagtgaattgaccaaaacacactactaatacatagtccatagttactctactacttctacaaacaagtctaacatataatgataccataccatcgccactttagatttttttatagcactatatttacatacacacatatatatttacatggtaaaattattttatcattaaatattaaaacctaaaatatttttctcaacccaataaatctaaccgaccccaccttctaaattattgtacaaagtagggttggattgtataacaaaaaaaattgaatggcttataacttcttcaaattgtagtcattaggttggcctattaaaacacctctattaaaacacttctaactcggccaacccaaaccatctacacccctagtaacatgtgcattattggtgcttttagaattttttatatttatattacattgcttttaattgtataactgagattaactatattctataaatatttgtataatttagaagagttagattgtatactattgagaggagaggaattaaatatgtttagacatatataattgcgctagcttaactaactagttgctaacaatttgtgtggattaattgtgtttaggttgtattagccaatccttaaagtgagatcatgaagaaactaaacttattagttttgtaaagtgatcaagcaaagtcccacattaata

SEQ ID NO: 387031 - DNA, 3213 bp, Cannabis indica
agacaagaaaagtgctattatcataacagagggtgaagccacgagtgccaagctgattggtaaggtgaacatgttaagtttcattttataaggacagtgaaataagaaaatcaagtttacaaggtaccctacagtgagtagaggacccagaagtaacaatgaaacttaaagataacaactataaataaataataatataagaaagaaccaacttaatagcgggagcttttcttctaaaaaaaacaaatgtattaatgtgacttataatatctattaagtttgtgtgtatatgtataggtagataggaatggtataatggttcaacactaatttaagaacatatagccataagtattgtctgttatatttcctaagtatatgtactccttaaaagagtgattttttgtggtgtttatctgggagaactcaatatggtataatggtgtgagtttggtataatggtataatgtaatctttcacagacacaaaaattagttgaacaaggcaatcagaaacaaattaactataaatggcccccaagacagcacgacatagatgctgtgattttaagcaaaagcaactaaagtgagggaatatttaccatatgagatggtgagggtactttatgtgtttttgattgttcgcttggttcaccacatgatacttacaaaaaaatagcaattcagctaataatcaattaagaaatcagactattatcaaaaatttattagcataagtgttccacctgatcatcatcacactctaattcttcctcagcaaacatcatgtagtcatcttcgtaactatcctctaactcttcttctgattttgattcggtttcaaaatcagatgatatattaataggactacatgttgcagaatttacttcatcagttgaaccatgtgctaatacatcaccccatttaacaaacatatgaaagaagtagtcatcattgcttaactttcccggtggattaacaacaacatccacttccaaatttgtattcgggggaagctcttcaattgtgcatttatgcaatttttgagaatttggtatgtgccttagagcttcgaggtcttctttccactgtagatccaaaacaggttctggcataaccatataaacttgagcctccctgtatctcctatctcttaagtcatccaagataacactagcctctaaaacccttatgtccatattcaaatgtttcttatatggcttgaatagaaaaccaaaaaggaatttgtaatttaaacctatagccatttcttctaacatttccctatggaaaccttcaaattcacagttgtcgaagtatgtaaacccccatccgtcataccttaaactttcatatggagtaaaccactgacccccatgaaatagtttcacagtgaataaaccatcattgccacctgcaatcaaattagaaaacaataatttagccagtgtatctcattcaaacatttatgcaatatattgtgtcttaattactatctttgttcaataattggatagtctcacatcatcacaccaacaattcctccaaaattaaaactaggataatatattacaataccaatttttacagcagctaataaatagaaacaacaagtattgtgaaaataatcattgccataatatataagccttttcataattgtggtcattttcataactggtaagaataatagaatacttgttttttttttggtagaattgaagtgttaggcttgtggcttgtgaatacctccaaattcatgtccaagacatttggcatttactttcctgatcacactcatgaagaattatagaaggcctagcttaataatccctttacttctaagttggtgtcccactgatatgatatatatacatattacctcaatcattttcaacacttgaaaattccattctcacaagttacatgataaaagcctaatctaatgtaaggacaataatactaattatgtgagacaatatcgtagtgtttaaaggatatgttttctttgaataatcttaatttgctgaagagttcattacctgtggaaccttcttggcatttcacaggacaacaagaataatattacttatatagactctaaagtttgaaagagtttagagatgtgttttccgtatttaatttggaatatatttagatgtctatgttcattaaagttagctaacttttacgttattcaaactaaacttaacggtccagaatcggtgaaaaatctatggttctaatggccctagcagaattacaaaccagctcaaaccagttcaaacatgtgagcattcagctcacaatctgtcctccagaaagtggcaaaactcccctaacattttaccccactttcagcaaaagacaattatgctaagattccctacagaacccatgtgcaagtgtaccccacgagcacgacaacttgctcagattccctaaattttttaactttattaaataccaactaatggaccacacttacttttattcttgatcaactaacccaccaccaaccaaaaatattgggtcattattctccaagaaaaccctagaaatcaaaagtaggaggagttgagatgaacacttactataatcaggaggtgcatcatccttgttccgccttcgaactgccatttcaacccccttccacccagtttcaagtcctcgctctctcttcctctcctctttgtctccactttcttgttcttcgtcttcgtcttcttctttattttagtcttctggtgcgaacatctccttcttcttcttctgttctccccaaacttcttcttcgtcttcgtcttactcttcttttgatttctgattcgtcttcgtctccttctttttgattttcacagctcctgtttaatttttaagttctgttcatgttgtttgttttatttttaagtttagtttatgtttttttttttatcttaattattttttttataagagaaaagatttattaaatttggtttatgatttttatttattttcagtatatacattttattttaaatttgttaaatgacctgtcattgccacattggccaaaaattgaatgacctgtcatttccacgtgggcaaaattaggacttaacgaggttggactgacgacaccttaaaaatgtaaacggatgtgcactttggaggattttcccaccaaaatatgaggttggatggttttttgtaagtaaattgatagttgggg

SEQ ID NO: 387032 - DNA, 2876 bp, Cannabis indica
gtgttaccaaacggcaccgtaatatttaattttatctttcttccacattatttttgacaccattacttctaaaaacactctagtagaatatataacacctttcaaaaatactataattattatcacacatattattatacaataattttttttattaaactattgtatatatatatatatattacacctttaattttttaatttttttaaaaaaaaaacataccatcaatgctattttatctccaatagtataacatccttatattttgccacttaaactttccacctcattaagcattctccaaaatgctaccattagagatgctattaggtgcctaacacctttataatacggcgtctcataatttattagcggttctctaatttttattaaattaaaataagtggttaccaatattaaattgcaataataaaaatattacaccttgctagacaccatgagtaccctttagcctttcttttaatcttctcactatagttatataaagaacttcactgctagtattctttaagagtgtcaagaacctccacatcacttaaaaatataatattttatattatctaacttacatattatttttgacactttttgttttaaaatattctaatagaaagcacctctaaaaattattaaaataatttatattattatttaatatattaaaataattaatttttcttttgcactttttctatgcaatgcttaacacatctaacagaatagcttggctagagagcagaatcgacatcattatgcaggatgctgagatgtatcgaacgtgcaaagcttagcggattcaagaaggcagtactggctgctgcaactgctgctcttgtatatcaactttggaggtcccgaaatgacatactatgaaattcagcaaagcaaaaagaggatcatgtagttcgattaaccaaaaagaagtgaagagaagaattacatgcatttaattggcctaaaaatgtcaattcaatagatactaaatggttctcaacattgtaaatttatgggaaacatagtcttggtagagaacataatagagtttttgtatttcattgtatagttggagaaatatagatcttcaaattgaagatgcttgtaggatgtaaattaatattttgaagcaaaataaataaataaagaaataaaatatatatatataaaaaaaaaaaggataaaaaagatgtcatacaatgatattctttcttagcatttttttttactctaatgataagcattcatcaatagagatgccaaaaatatattcatgtcatcaatctttacaacatccccattatgctcttgtcttaggtagctatgagattgtgctttataaagtataatgctaagggagaccttaatgtgtcaagcaccacaagactcaacatactgttattagtatacactacaaaaatttttacttttagtcacaacaaaatttgtgactaaagataaaaaagttgtggctatttataaattatcattattgtattgtgattaaaaggtctgtggttaaaagtattaattagtcacaaaaattacaatttattgtggctaaatgtgtttttagtcacaatatttgttgtgactaaaaacttgtaactaaatactatgttttggtcacaagtaactttttgttgtgactaaaagtcacatttagtcataaaaaaattatgttgtgactaaaaggttatcactaaaagtagtagtttttgtagtgatattttaatatcaagtcatacatattttaatttaataaatgatatgggaaagagaaatagtaaaaggcaccactagtgcctagcaccttccttgattttatactgctattagtgtaattaagtatcgagtcccatataatttaagaaaatagcttttagagaatatcgctagccaatcgtaagacaccacctatagaatgtattgtgtactactaatgcctaataacaatgctctataggaaaccactaaccaatcatagggcgtcatattagtgtggtgttgggcaccttaaggtgccaaataacaatactattttataatgattagtaatattttataatagtcgtcagtattgcctagcaccacctataagtggcatcttgcgattagttagcgatatttccgcgatatttcctaaaagttattaaattaaattatattaagcttgatacttaattgcaccaatagcgacatgatacctaggagggtgctagacactagtgtattttagcatttctctttataatagttattaaattaaatcatgtggaatctaatacaccaatattgatgtacaatttttggtcataggtatagcctagtagtttcacacatctcctcacaaagaggaggtccaagtttgaattctccctctcctaatagtgttgtaaatatgagtcggattttttgaagcgtcacgagcctgggtggcacgagcacgatcacgcacgaaaaaatatgagattgggcaagacaagacacgatgctataaattggcatggcacgacaaaatacgaataataagacttaagcatgacatggcagaaaaatattagcttaagcacaatatgatacgagaagcccaaaaacatgatacgtaagtactacgaataatttattctaaaagtacaacttattaaaaatcttatatttaataataataataattagtaaattttcaaattttaacaattctaatgaatgttttatacaattttatgtggaaaattgttaaaaaattatacaaaaataaataaagctatagaaaaatatataactttagtaataatattttatcaattgtaagaataaagggaaacttacaaaaaatattaaaatttaggttattttt

SEQ ID NO: 387033 - DNA, 3507 bp, Cannabis indica
aaaataaaagatctattaggtgagggcctagtgtgatccatctatccccactgcctccgaagtgacttatacatctcagaatctgattaagaataactcatcaatattattgttatagtacgaatttttcacctagaaactcgagaccaggcttctgtaagaatgacacgtggactcacatgagctatcaagaagggacttctcgagaataaaccttgcgtgaaccaaacttagtgagatgatgtgactgtgacatagtcttgtcacattattaccccttgcttaatgcacgacccagaaggaattatacaagtcgcgcatatactgaggtatatacgataactatgaagacttcttctgtgactcaataaagatcgattctttacatagcgagttggtccgaatgacctcgcatgctcaatgactccataaggaactcgcatgtcctcgatcatcgacgctgagaaggtatccacatacgcgactcgattaggatgcaaatacctaagtaagacgtctactagtctcgttttaatttgagcgtgcgagcttgtgtgagtgaataaataggcaacttacactatggaagtcccatacattgctatatttagtgaattggatttaaattattcttcatttattctatttacattaatttcaatttaatgttaatatttaatgtaaaatgattctataatcaatcaagttttgtgtaactaaagagacacttgctttgtatataaaggagtgatctgatatgaatagaacaagacagaaatccttgcaatagtggactaagtagaccgtgatctgactgaactactatacttacttatgttcattattttcattacttttcaatttgtctgcgtagcttcatttatgtactcgccgttctaggttgagtactcgttattttctaattaaatattgaatctttattttacttggtattgtccaaattcctctgacaacatttggcgccatatgtgggaaattaactattgattttggaggaaaatcaagatggttgggaaccaaaaaaatggaaatattggatctttcaatgtcggaacaatgactgttccactccggggtgatggagctaatccgactgacacaattaatggaggtgcgggaggaaccaatgtcactcctctcaatttgtttccagaaaacgttggccatgtaggagaaacatcgatatcagccgccactataggccatttcctgcctattacacaggccgtaacttctgaaggatttgtccagcccacaacggcccaatatacggtcatgtaagaacaaatgcgggcattgcaggccgaaattgatgggagagttaggacctgacgtccaccccgagtcccaaacacgcattcgggaaaccctcagttaactaccacgaatagacgacaaaacgaatgtcttaacaataatcgtatttgcatggaacaagggaatgaacaagagggtctcgatttgaaccagcccttacataattccatgcaaaatacgaaatcggtcacagctaacaatggtcgtactagagaagagagaccacaagaggaagaccctgaatgtaaaaaccctcaaagccaagctcagccacaagttgaggtaaacaaagtcgaatctcacttttcctctactaatagtcactcccctagtgtttataccaggtcaagctctatcgaaacatgaggaggagagagataccatgttcatagaggtgatctttatgatcatctcgaaaaaatttttagggcgcgatcccaaacaccaaggaatcgcgataatgatgagccccgtgatccctaagtgggcatcaaggcacaaagaatataaataacccaactaatctagtcaacccaccaaaggcactagctacaactacgaaggtagtaatcccagctaacatagctgcggttgctgccataccaacggtaacgcaagacaatcttgttttaccatgagggatagaccaagaaagtctcctaggagcattgagaatgatcgagtaacacagaaagctcatttacaaaatccatgggacgttgccttttaccgatgaagtgcgacaagcttgactctcgaagggcttcaagctgtctaaatcgctcaaatacaaaggtactactaatccaatcgattatttagataaatttaatataattatggaagtagatcaggtaccagaactagaaaaatgccaggccatgatgatgtacaaacttccatacacaatgttagaaaatattaaacaggtggtcattgagtctttacaaagttatattaaatgttttaacgttgaaataaccaaggtcgagaaggcccccgagtctttgttactttgcatgtcgattacaggtgttttgccaaggaccaatttttagaaggaactacaagcacgatgacccaagtcgctggtagagttcttcgtaatggctgaactgcataaaagaattgagaattctttagccgagttggagagagggaaggagaaacgcaagtctcctgtgccctggtcgcattctcgaagttggaaaggaaaaaatttcagaggccaaagcccaagaagacacagtccacaaaggcgacagagtcaaaagctcactaaatctccctctaagaaggagtcatccctaaaaaggaaagggggtccgcattttgtcaattatactaaattatccgcttctcacgaccatatttatgcgatcaaggaacagaattgcgtgttcaaacaaccaccaccaatctgtggaaaccatgacaaaagagaccccaagaagttctacaagtatcatagagatatcagccatacaaccctagtgttctggtttcttcaagacgaaattgaagcattaatcagacgaggaaaatttagccaatacaaaaagaatggagagaatcatccctgagcggatgatagcgacaacacaaataatgtgagtggctctcgagccactggcaacattttaactatcataggaggaccaaatgttggtggggaatctagaaaggtgcaagagcgctatgcaaaagaagcaaatgaaaaaccccttgcaagtgaacgactagagaagttgttcaaaaaagagtgtgatgatatcactttcatggagagtgatgccaaatgggtacaccatcctcacgccgatgccttagcaatagtcacaaatatcagggggataatgtacattgtgtcttggttgacaatgaaagctctgtcaaccttctcaactttcaagcctttaaacaaatgggttacacgaaaaagactagttgtaaagaccgcttagtttaatttagaaattagcagttaattatgattaattatgaaaattatttatagatatttaaataattatttatgctgttattttagaattttgaatgcatttttatgtcatatagtgaatttcatattttgcatttccggtgcccagcaacatggaacttggtgttggctcagtaaaatcacaacctagcatgttagtattgtgg

SEQ ID NO: 387034 - DNA, 1583 bp, Cannabis indica
  modified_base (1352)..(1352): a, c, t, g, unknown or other
tttttttttttttttttggggttcagcatatataattgatttgtttagagttgtatctagtgtgtgatgaatctagaatttaaagtgagacagcgtaattttttttgataaatgagaggagactaaagtaaatttaaaaaaaaaaaatacttttgttgggattaggaacccttatcctacgctaagtaatttaactattacaccaaagtatatattatgcctataaacatcattttttattacaaatatttattgtaactaactaaaatgcatatacacttttttttcacgagtttttttaggaggaacgactgtctcgcctcgcttctatatggatctgtccatgattgtatcattttttttatatataaagtgataaagtaattctttatttaaattaattttaaccaaagactataaaaaaaattaaccaaactcttcataattttttttttaaaagcaagatatagaattttgtgtgatttatttatattttatgatcaatataactaaaaaagaaaataaaaattaaataaatcaatacaaatttagtgatattttctcaaattaaaattaatttagcttaatcaaggcgatcaattttttaactcgtgttgcttgtacttaaccagatcgtagtcatgatgggggcttctccctattgatttacaagctattttatcgctaatttggttaaataaaatcaatcagtttattcaaataaaaaaatataatttaagtttaatacttgtgatttttataaaatgataatggatttaaatttcaattgtagcacatataccttatatcaaacatgtaagagcccatatatctttagaacaaatatttgttcatatcaatttttctgtattggtacataagtattaaaataacataataaaaaaagttaattaatataaatgaatttttttaattttttcataccttatatcaataaattatatatatttaatttttttcatttcaaatttattaaaatagtattatttatcacaaagcttgtctcaatatgtttttatagctagaattattaaattaaatagaacaatatttaattgtatttacaataaatatctagttaaaaaacaaataatcttgcttttttatcatgtaattttattgtgatagtgtttattcttagcatgaatggattattttttgtaatggcagccaaatgcttgcattggcccttcactagtatatattttttataatatggacatttgaggtatctctatacaatatgtttaatattttttgagtctattttataacaaaaacttttgaatgtttattcacatgcatacaatacaatctaacttttttttttntttttttttttttttttttttttattcaactttactttcactcatagggacaaataaaacacttatccttttacaaaaataaagaaggaacttatatattcatgagagttggtaattgtccgctctaaaaaattatctatctttatttgtctttttaagatcttttacaaaatctgttactagttaagtctgttactagtcctttaggggttcatttgtggacagatgctt

SEQ ID NO: 387035 - DNA, 568 bp, Cannabis indica
attttttaacttttcaaaatttttcttagttgtttctcatttttaatttatattaactaaataataaataataagatctaaacattcctatgaaaaagataaacaaaaagaaaatgtttgttaagcatttgaaaaaaaaaattatagaatatattctaactaaataagctgtataaatctaaccaagcatttatatttttaaaaaaaactttcactaaccattgaaaaaaaatctaaatatataattaaaaatgtatagactaaatttctatttatataagtaaaaaactttcaacttctaatattttaagaggaaattacatttagtatgggattttgaaagttcttatgataaatatggcacatttaagtttggccaatttatatggtatttttttgttttaggtttttgtatggtatttgatatgccatataaaggaaaaaggtttctaaatctcatatttattgtttttatttgtttagggaagttttatttgtcattgatgccggaaaagtctaccggagtttgctgccggtgccggaaaagtcaccggagtagcggtcggtg

SEQ ID NO: 387036 - DNA, 586 bp, Cannabis indica
gtaacttcctcattgtcgaacgttctctgttccacttagttagtcgcacatccactgtggttggtccgcctacccacatcaaccatcgcacacatccaccatcgcactaaacgtcaattctctctctttctagtttttctcctcaaccaaaaccacatgggtaagcgtgttttaaacaattttagaactatatagtttatttctagtagatctatgtggttgtgatttgtattgtatttctttactaagattttcctaaactgattaaagtaagagtaaagggattagctagattaatagataatagagatggaaatttttatgtggttcaggtgttcatgaaccctagtccatgagtcacttgtatttggctaaatgacctttgttgtatgtatttttaggcataagacacgtggcatgattaaagaacaagatgtattagctgaaaggaataatcgaaataactcataagaactcctggatgggacatcttgacaatcttgcaagtaactgttgggctttgtaccctaaataaaactctatttaaatgtaatcttttctattcaattatcaataaagaaacata

SEQ ID NO: 387037 - DNA, 3387 bp, Cannabis indica
cctaattagccgaaaaaaaatatcatgtagcattaatgctattcaatttttttaataaaaaatttaagctaaaatttaaaatatatactaaataatatatataatattataattataacattttgaaagggtaccataaattggagtatctaagtaatagtaatacaaataacatgaaaataaaataatctattttcaaagggtactataaattggagtatttttagtgtctaataggaatactgagagtagaggaaggtattagtggtcccagtaggagtggagggtcctagtcctggtcagtggtcagtagcagcagcaccctggttaagtggtagggtttggaagtgttaagtttaagtagctgttgttcaaaactagttatgtaggttaagtgttcattcaccactcaccagtgttgtccacttttggacacaactctacccagccatggtctgccttgtcagattggattggacccacaatctcacatgaaatgaatcatcctttgcttgcgtctcaaaattgacctaattaattgttcttggaataattggtatttttctaatgtaaaacaagcctccaattcaaattcaaatttcaaaggatacaagtctctagcacctgaattttggtaattagttagtaatattttatcataattattaaattaaaatatataagatatgatatttaattataatcatggtgatatgatatttatggattttgtaacaaattaatattgacactctagtattcataaaataattgatccatattataaatatataattaatactttaatataaaaaataataatttaaaaatattataaatatgatacatatatataaatcatatatattctatttttatttgtaagaatttttttaactaatttataagaaaatataatgtaaaataaaattaaacatttctttatacatacattataatttttttcttcttgctttaaattttttattttaacttattgttagaaacataaaacaatataatttactttattttgtagttaattagttatgtaaagaaaatattgttttaatattattgttagaaacattatactcaagtggttatgatgtgtaggtcgatttggcaccaccgaaaccaactggtttggaaggagaagcagtcgattaacattaatgatgttactctgtttgctaaactaaaattttgaggaatggattaatgctcaaaagctttctatagttaccaaccatgtgcctaggcaggttgagattgagcattggacaaaaatagtgtatcctcgaatcaaagttaatgttgacggagcagtgttcttggatagtaggcattttggctatggatgtgtggctcgggattctcttggtatggcggtgaaagcaaagtgtggtagtaaagaggttgtcttcaaacctcttttagttgaagcaatgagcatcaaagaagcgctaagttggattaaagatcatggatggactgatgtgatacttgaatcggattgccttactatggtagcggatttgaataataataaaaacatggtttctccttatggctgtgttctctttgattgtaaggctattattaataatttaaactctttttccttgaattttgtcaagcagtctgctaataaggtggcgcacatgttagtgcaatcttctcgttttgagggaaacaacagtttttgtttgaatactcttcctgattttttttcatccttagttttggaggatagttattaataaagttctgattttcattcaaaaaaaaaataattcaatattaaaaaagtaatcaattaaaaataaccaatccaatcctaatttttacagattagattagattagatttaagctactatgcagattagattggatcgaaaatacgaaaatcgtacttactgcgaatctaatgtacaatgagcaaaatagtacggattgaactggataaacacccttaagctactaattttgacttctgaggtttttagagctaaaaactgaatcttactggttatccaaccggcagtaaaagttccacaaaccaaaatggagcttttaaaagctcaaccaaccaggccatagataagatcaaataaatgcatacaaccccttgcagatcttcttgccagcatttaaactctccacatcactaatgaatttatgcatttcttttatgagacataccaaacctacctcttctcataatctaatattttgtggctgaaaatctccaaagctctctattttcaaatgagaattacttgagggcaaaatgataaagaaactatgaagtactttccagcaaaagaggaatatgaagagttttaaaaaacatcatttactaacacacttcatttgtaatttcttttgacaattttttttcataattgttgataacaaagtagtaagcacggtacataagaacagcattgtttctagtgtcattaccaatcagtaattctacagcttaggatcatttctttaggtgtgggaaacaagtaaacacatcagccttagggtgcttcgcttcagcgtgttctcgacatttcacctccgtcgtggtacacacaaatgtctgcatgcacaccttgcactgcaacaaggaaccgaaacaatgacaaccaccagcagtgattgaacagcaacaaaaacaagtcatcacctttgttaatgtgaatggactctactctaatgcattagcacgaaaattaattacaatatcaagaggaagcgattattatagcatgcatgttgtcaaaactatggctatagataactgtccaacatcaaataatgaagaatcaatggttgctaaagataaaaactttgtaactctacaacattgacattggaatactcaagtgacttcttcttcccatgaaatttctatgaagaatgttttcattatcaagtagtataatatgtattatgtgcagaaatgtagtcacataatttgaaattagtcccaaaaaataaaaaccccatttagcatgagagccatgcagtggaaaacccatgaaccatgagaaaattttggtagaataaaatttctattgcataggcaaaaaccaacaaacaaaaacatgcaactacttcaatattgctgagtgaacaactttcggcatggatatcgacaagttaactctgatcagcaagtcccattcttgggaggagctgaaatcaaagaacaaaaagttgaattaacaggggaaccaaaccaatgagagccatagataagaaaataaactcaaaaaacgagatcatgatacaagaaaatagaccttgtttgctggaaaaaaagggtcttagtatcataatattagaagaaaatgaatcgaagaccaagaaaataatcttaagaatt

SEQ ID NO: 387038 - DNA, 4372 bp, Cannabis indica
ggcaaaatgaccattttgcccatgcacactacaataacatacaaggttactaaagggtatgttggaaaattctaaattcccaaccaatcccgacattcccaatgtttaataaactgtcccaatatactaacatgctaagttgaaattccactgagccaaacaccgagttccatgttgccgggcaccgtaaatgcaaaattatgaaatttcactatatgacataaaaatgcattctgaattcaagaataacagcataaataattatttaaatatctataaataattttcagaattaaatcataattaactgctaatttccaagtcaaactaagcggtctttacacattgattgagttcttaacaagagctcaaggatttataaatctagaagatgcttacgctcaagcatatggagtactcccgcaccttccaccaaaataacaaatgctcaatgtttttagatgaaaactccatccatttaccctctatcatctacttttactacttccacgatatatggaccaagtacttctatgcagccagctgcacaagctagttttttcgagttcaaagctgcacaaactaagtacagcaccgctcctagacaaacgaaccaaaagcaaaagttctagagtccaatataacccactcacagagtaaaaaagagtttgaaaggtccaaactagaatgagtctttgaagaaaggaaaaacccaagaatcaagatacacctattataaaagtctcatagatactcgggataatgtatacaaggaaatctctaagatggtacattcatgaagcctccacaatgtataaaggctgaaaacaaagaagagattcgagcaaaaaatgttaatatcatggtgatattggtcaaatgaatgtgactatataaaagatgaaattgagggattagtgcagaacggatacttagcaattgggtaaggatcctagttaaatatccaggataagcagttgcacacagacaacttttcattccgggagagcatggagtcataaatcctcctcagggagtaggtcattcgcaaggtcttggaacacacactctaaatccacaagtccttcaaggggcacagaatgctctagcagcggcagtaactatagcccccagtctcgaaaatccataccctttaggagctgcattgccagtcttagatggtcatgtagcaactattttcggtggacctcatattgccaaaaacactcagaatgcacagtagtggtacctttatgagttgaataaatgtgaagcttgccacttggtataatcacctgcccaacgtccaagtatgatgaatttaccaatgacttttacagaagatgacgccagacatgggcacttccctcataatgacccgttggtgatagaggctcaaataacaaataaaagagtttctagaatcctcatggataatggaagctctgtgaacatcatttttataagagccttccatgccattggtcttatggaagccaataagctaccatgcctaatccaatagcaaggttttaatggagacacattgatccccatgggcaaaataaaacttttgatgactataaatggggatgttcccgaaagcaatgtagtatcatcgtttaagtacaacacgtttgtaatattcaattgccctactgcttataatgatatcctgggaagaccatttttaattgattttggagtagtgacataaggacaaatagaggagaccaaagaagtgcacgaagttgttacagtatttcaaccaaaattgtactcatggtctaagaaggaaataaatctgaagctagaaaattttcccaaccatcattggggggtggttcaagaagatgagcttaacccatgaatttgtgaggaacatgtcatcgaaccaatggaggaagtagaagaagtatgcatagatgatgaagatcccacgaagggtatccaagtagggaagaacctgcatttggtagtgaaggaaaaaattatttccatggtcaaagcaaacaatgacgtgttagcctagagtcatttcgatatgactggcattagtgcccatattattttccatgtagtaaacatagatcccaacgctgaactagtacggcaaaatggagacctctggatccagggaggtcagatgcaataattatagaggtagacaagttggcaaacattgacttccttagggaagctctgtatcccatatggctttccaatctggctttggtcccaaagcctaatgggacatggagaatgtgtatagaatacatagatctaaataaagcttgtccaaaagactattttccacttccgtgcattgatcaaatggttgatgctacttcaagatatcaactcttaaccttcatggatgcatactcttgctacaaccaaataaaaatgtatgtggctaatcaggagcatactagtttctaaattgaaaaaggaatctactactataaggtcatgccattaggattgaaaaattccaaagactctaaccagtaaatgtgaataaaatgttcaagaatgttatgggtaagaatatggaggtttacatcaatgtcatgctggtaaaatcgaaaacctttgagagccatcacaaagatctagaagaggcctttgtattaatttgggagtatggaatgaagttgaacccaaagaaatgcactttcaaagtttctttagggaagttcttgagtttcttagtgagttctcaaggaattgaggcaaactcaaagaaaattaaagcttttcttgacatgcctttgactataaaacacaaagatgtccagaagttgacaagaagaatagcagcacttagtagatctgtctctaaaaccatggataagtgcataccattcttcaacatacttcgaggaaataacaaatttgaacggacaacagaatatgaagcaaccttctagcaactaaaataacatctagagaaggctcttatactgtccatactagttaatggagagccattgttcctgtacttggcagtgtttgatcatgccataagtgccaccttagtgcgagaagaaggaaaggtacaacttccagtatattatgtactaaaaagactgctaggtgcagagtccagatatcctttgatcgagaagctttcctttcacttactaattgcttcacagaaattaagactacacttttaggctcacaccataagattactaacataccaccctctccatcaagtgctaccgaaaccaaagtctcagaaagactcctgaagtggcaatggaattgagtcaatttgatatacaatgttatcccaatttttgcactctgacgtggcatcacatactggtgacacgtgaaatcgacttcacatatctgttcgaaagagatatgccgaatagatgaccacacatatctgcacgaacgaagccttcttaaccgggcagtgtacaatttgaacaacatgccaacacttatcaatctcaacacttgcatcttgaatcacaaaggaaatccctataatcctaggatcatatcacagagatatggtaagctgtccaaatcccttaattagtgtattctgtatttactgtgtaatcttgccaattatagtcattgtaaacagaagggaaacttttcccttacagcttatagccctataaatagtgatctatcctcactgggcaaagggtcgaaaaacttatctaagagatatactcagagatatcattgtaaaagttctaagagaagaatcattgcattctttgttcctaagtcaatacaaattaaagggagtaggctaataccaaactgctcggggccaaacctctttaaaaggtctgtgtctttatttatttcattttacatctatagtaactcattgtcgttagccaaaagcgaggccaacattttaatgctttcattgagattgttaaactcaagctcactctttacttcagattcaatcataaacacgatggtacaaactcgtacaggcgtggttgatcaagtgaatccatcgacagtggatcctgcattgtagaatccaagaaatacaagggttacaccagccacaaatcatgagcgaccgccaactgtaggtcacggtgtgacgtctcctttgaatggaatcacacctggtgtgcaagagactggaaatatcagttcagtaaccattctgggtattcccagtattggggtttcgctagcaacaaatgcctaaataaccgttggagacgacaccaagatctagaacctccatgccgctcttgaactcatgcaaggtcatactaataccttgcatcatgaccaggaggagctccctgctgctgtgaaccttgcatttgaagagcaaagacgtctgttcactgaatggagggataaa

SEQ ID NO: 387039 - DNA, 1524 bp, Cannabis indica
cctatgctagttatggtgttacactcttatctatttttcaggtctttgacgtcagttctttgttacaagtgcttcataatctttaatatatcaaagggaaatataatgaagtatttgtatacatatttttttagagaaaatttttctgtataattacgtgtatttttttttttaaagagtaatattgtatgacttttgagatcctaatgtaatttgtaattcatatataatacatttcatttatttatttttttattggcaggaaatatgaatataaatatatcattcatataaggatataatgcaatcttaattttttttaaacacacataactttcttgattatttatgtttgattagatacataaatgagatatagtgataaccacgattttcaatatagtggtgaatataagtgagatacagtgatgacaatagtgtttatgaatataatgacgtttataagtgagatacgatgatgatgacaacaataactttgaatataatgaattcgaatatagttgagatatggtgataactttttttttgaatatagtggcgactacaagacgatgatgataacaattttgaaatcatatgattagttttatatagattcatttgttgtctttttcaattgttatgaatttttatacaatatttaaatttattttttgagtaaaaaagcaaaagaaaaatttagtagaatagttagaacatctccaaccatgctctctaaacactctttagccagaataaagagtgagacttaaaaaataagttccaaccatacaaaaaataattatactctctaaaggttgggagctctctacttttttgttaaacttttttaatggtattttaattaaaagaattattaattttttattattatataaaattaattaatatttgataaattaaaattgcaaaatattattaaataatcaaatactaattaaagtagagagcatgattgaaacaacaataaaaatggttctctaaataactaaaaaaatataccattagaaatgttcttttactcacatttaaaaatatatatataaaaaaaatttaaccttcctatttcttccatcctagtccatcatcgcatccccagtaattgcatccccatcgtacttgatccctccaacaaactgatcctacaacaaattatcacactaaatatctctctctttttcttttttctagactgaatttattccattttatatagccgtatttcgatattatgtgaattgtgatagtgttttagttggtgtatatactgtttgatataatgtctgtgtgattcgtgaaagaattggttatattaagggccagtgatcacgattctgaagcaacttttctatagtttaatttatattctttctttttcaatatttttcttttttgttataagtttattttatattgattttgttttattttgcgccattatttattggctttggcgccttacaaggctttagcacctaattatatggttgggcccctaattat

SEQ ID NO: 387040 - DNA, 513 bp, Cannabis indica
atgcaatgagctacaattttttttagatagatagacttacttgaagtcataaccatgcagctgctccatgacctcaggagccatcctacagaaaaagttccataatttattgatttatatataaataatgatattgtgaatgaaaatgagtgatttctttttatggtaacttgttcatcaaatgaccattgcttggatgatataattccctccaatcaagtcacctagagggaactaagaccctgacttgattcacctaaatgtgcataaattacaaatattaggattacagtcataccagcaaggtgtcccaacaaatgtgtttcttacgcgttgcctatcccctgaatcataaaggcaagcagaaacaccaaaatccccaagctttattgcaccatgtgcaccaaccaaaatgttcccagcctacaaaatcatgtatatcaaaataacaataagcatttgatgcagcaaaagaaagtttgaaaaaaagctaacaatgaattgtgacaaaaa

SEQ ID NO: 387041 - DNA, 2268 bp, Cannabis indica
ataattatatatatatttattgaaagtggaccaaaaatttattaaaaggacggcaaaaacactatacaagtcaattagtgagtcacccataacataacgtattaactattgagagattattaattaagccatgcaatcacacctatcattatcactctgaatcatcgtccatttaatatgtatgggaaattttatttattaggcttgaaagactacccaataacaacccttgtataacactataccaatctatacttatgttttccctttatacttgttttcactcttctcataatcaatccccctactaactctttctcactttctcttctctcttgacaggttcactcttttgtttctccttaaccaaactaaaccaacaccaaataacaccatcaccatccccggaccgttgctgtcgtcaatcaaccatcgcaaggtcagcatcgtcccacaaccaaaaccactatcgaatgtcggaccgtgccacccaatgtaatgggtaagtctttatttttctataaaaaaattatgattggtattatattttagaagtaaatgatttgtttacattagatctgtatctgtatgttgttggttgtttttgtatgttttatctttgaactcgataaatctggttttctaaatttttctgttgcttcgtcatattttcgatatgttctccattatttttcgatggtcccccaatgtagtctttgaaggtcaaggatgaccaatttcgatagtttattgatggtttcacgattgttcaattatctaaatagtttttgatattttttcgataatgtttgattatttctcgatgttgtgctggaaataatgtgttgtacaatttctcgatagttttactattgttcttcgattgtttcttgatagttttccatatgttttgtattaaattacaagttttccgtagataactttcttaactatcttatgttttgtattaaactacatgtttaattgtatttgtgcttgtactgtatgataatgtcttgggtgttaagggtttcaattggatttttaaaagcaaataaatagtatgccattaatggttaaaattgacacaaccttatagaaaatgtgcgagattttatacaaagatttggaggttgaccaattggattatgattgaaattggatgtttgtatgatgtgttggaacttattttaccagaatcttaattcattagtaaatatgtttgattatatatattgtaatctaatatcctaaaatatgaaattcataaaacgataaataaacatataaaaagaatagaattctcatattggttaaaatggatgtaaagtctttttttggcaatttagatgctaaaatattttttatttatggtgtgatttgttggcttttataaaaccgattttctcaccttatttagttgtttttattgttattttctatcataggaaagattctatttcagaaggccttttctttgtttggaaacttcttgtaagagaagaaattctcttatagaaagtttgttctttatggaaactttgactattcttatttttcttattaagttcgattgtgtcttgataagaccagatcaaacacactgtttttggcaggtatcaagaccaaatacatgatcagacacgtttttggtaagtttccttttctggtctggttttctgcagcagaacatgtctctaatgctgcaaatcaggattttctttagaaaagttttgtacagctatagattcgactttgtggctatctctaggatttttatgatctataaatgaaacctagagagcaaccattcaaattatctcttctagttttcatttttgcattttcttatttgttgagagaggggtctttttgtgagaacctagttgttcatctaggttctagtgtttatatatttgttcttatactggtcttacggttggttagaacatcttgattgaacaagagaaaggtcatcgggagaagacttgttcaagccttacttcaggaagaagtaagcacacacacctcaaagacgaagggagttcgctgtttgatgatagttcaaaaatcagattcgtgaagtgtgttacaaagggttgtggcaaagatttagagggagcctaaacttgtataagtcaattgtcttagtaatttttaaaactttactaattgatttctttctctgggtatggccccgtggactaggagtgttcaaagaacagtgataccacgtacaaatctgttgtgtcaaatgatttaatattc

SEQ ID NO: 387042 - DNA, 2599 bp, Cannabis indica
catgaggtttcctacttagtgcacctactaccatattagcctttctaagataatattatgaagggaaatcataatcttccataaactcaatccatcttttttgcctcaaattcagatcactaagtctagagttactataagctcttatgatatgaatatgactgattttttgctcatacaaagaacatctctatatctttaagaattaccaacaagtctaagtcatgggtagggtaatctccttaatcttgtcattttccctcagatcgcctcctaagcttgtacttgaaacattagttgataccatatatggttcctcattattaagcatagagagagtatgttgtggtcaatctttacttcaatttatagaacacttcttaacaactttaaccccatacatattttactttcctccatgtccactttaccaaaggtataacaatcagaaatgaattctttacatagtgacaatagttaacttctaacctaaggaaacttgaaacaaattggtaacattctttggtatttttcattgtataatagagtctaccttagaaggagccacaatgataccatcttgagagattacatgtcctaagaattagacctaagtcatccaaaagtcacacttctctttcttagcatataattgatgatctctcaaggtctgtaatactattgacaagtattcagcatgatcctcacatgtcttacaatacactaagatatcatcgatgagtaacactacaaacttatccaagtaaggtctaaaaactctattcatgagatttataaatgtaacaagtgcacccgttaatccaaatggcatcaccaaaaactcaaactgtccataaacagatcttgaaagcaatcttaaggatatcttcttccctaacccttatgataacctgacctcaagtcaatctttcaaaagaaatttaaacattcaagttgggaaaataactcatcgtcatcaattaggatactccttctcaattgtaaattaatgattcattcattttttatttatttatataattgacacaaagtcgcaaggatccatcaaccttcttataaaataaaacatttctaattggagaagtgttatattcctgatgtaacacttatccactaactccccaatatactatgtctcaattcaaccaactctattggtgccatgcagtaaggcgcaatagaaacaagtcaagctcaaggaatcaaatcaatgcaaaactcgatttccctatcaaggtggtaatctcgacataatccccgaaaatacattcgaaaagccactaaccactgacatcccagggaactagtctaaagtcctagacacaccatcacatgcaaatagattcccataatactctaagtttctttcccccacctaaacgtgcttttaggataaaatttttgccttattacaacctcattggctcaatatacaataaaatcaccattgtgagttaaaagagtaacagctttgcgtacacgatctataatgaattgatatttagagaactaatccatcacaagagtcacatcatactatcctgtaggtaacactaacaagtctcctgccaacgcatgtcccttaacacgataaaaatcaacctaaatatggtggccacctcaatatgtcctccaataagaagaattaaaagtttcccaactcaaacccaacatacccaaacaccactcatataaatgaaattgggtgtaccgatactaataatgcatgatcctaagattgtgagataagaaccatatcatcaacaactccctgacctacacctcctctatatcattaacactaagagcataggcttaagcgtagagttttcattttgcctttactttacgttggctaaattcatcttgccaaatttcctacattactaaccttattgaggcttagtaaatcttacaagggttagagtgacaatttcaccaagtactgcatgcctaaaatgtgcatgaactatccaataaaataatctcacaaacatcacataaaattcactatcatatcatcttatctaaaccatcacatgctctaaccattgtcctcttgtgaggcgaagaaaaatattgctccctaaaatccttttgaattctctttggatcatacaatcactatctattatttaggtcgacgtatcccactaatatgttccacccattttgagcttggacacaacaaaagtaatatggtactatttagatattcccatagtgttgaggtttcactatccgcctcaactatcttgcaataaccatcagatcttatacacttcaaacttaggcgttcagacctagtgaaagatttgaaaaattaaaattctgtcgagtaacacattcatatattgagcaagaattgctcctaaagctccaaaagtggcattcacaaggaatttagcttccgaaaaaaaaagtcattagccaactactagaaaatcgggttttcgtgacacacattgagtaactctaaaagtgtatagtgacacttcaacgcccgttactaattagggtgactagaaagataatttttagtcaccagataatttttagtgacacttcacacgtgtca

SEQ ID NO: 387043 - DNA, 1493 bp, Cannabis indica
tacacaaatacttgctgagggagatccaagttccagcagttatcttgtattgtaatgtcagccaccgtcttcaaatgcgggttaccacttttgatcctttcaagaaggtcatagaactcattatattttagccatgggatccaaggttgattccatagatcaatagaatctcccctccccggaatggccaaccctcccagttgaattatttctctagccaccaaaatacccttccataatggggagtcagctcctctccctttcacctcccaaaaggacttgtttttgcagtatttagccataagacattcaacccacggtttattcaccccgattgccatctgccatgcaatttttgctaatagagctttgtttgtatcttttaatcttctgaagcctagccctccctgacatttaggaaggcaaaggctatcccaactccttatggcattgaatctatctttggttatccctcctgtccactagaattttctgataagcgcatcaatttctctacatgtcgacactgggattttacatgttgacatagaatacagcggcaggttcaaggccactgacttcactaaggttgttctccctgcataggacaaacttttaactttccatccttcaagtctctttaaaaccttctcttttagacgcctataatcttctcttctccttcgcttaaacacaaacggattgcctagatgcagttcattacccatgccttctttaacctcaaggatccttagaatattttctctcttgttccgattcaggttgttggagaatagcacactggattttaacttactgcattcctgacccgaccatgcctcataaatcttaaggcaatccatgaaagcagtagcatttttctcatctgctcttgcaaacaaaatagtgtcatctacaaacattaggtgactaatcgcggggcactccttgaaatcttgattcctttaatgtctcccagttcttgcctcttagcaatcagctttgataaaacatcatggcagagaaggaaaataaagggggatagggggtctctctgctgaagtcccctgttaggaaagatcttcttctgcgaaaccccattgataagaaccgagtaagagacagttgtaatacatgtcattatcaagttttgcacctgactatcaaaactgttggcctctaaaactctcttaatgaatccccactccattcgatcgtaggccttgtgcatatcgagcttcagcgccatcaagcctccacgacccttcttctatttaatagcctgaacaagctcctgggttaggatggaggactccgcaatccatctcccgggtatgaaggcagcttgaaaaggtgacactaatttgtccatgatcgccctaagtctggttgcaataatctttgatatgattttgtatgcaaagttgcgtggattataacaatggataactaatgatgtgtctatatggtggaacatatagaacattctatat

SEQ ID NO: 387044 - DNA, 882 bp, Cannabis indica
cttacaacaagcagagagaaaataaaaagtaattaagatagaatgtatagtggttttttgggggagagagaaaaaaggacagaaaatgatcaataattcatatgtcaatgtcacatacatatgtattatgtatgtaaatttaagtagatggaagtcccacagtccactcagaaataaacaagcattgttttttcttttttggaaacggcaagcgttgtcccttatatagcgaaaggaaaaggaagatatatagtcattaaattatttcatttcatataatgcttgataagataagatcagatccacacaaccacacacaggcttagtgatgagtaattgatcaattaataaggcctatccatcattatatattattgaaatattttatatgtaatgaaacactatatatatgccctacataataagtactaactagtatatgtataatttccatagcaaagcggtagtaattaggaactggaactctatatataagactgattaaataattttaattaattaaaagtacgtacctcgaaatatatcaaataattagtacttaatattaatttgaatttctttgatctcaataactatttatgatttatactatttttttttctttttatttactcactcgtcatattcagaccactcaggagtactcctcaattatttctcatatatatattatatataaaaagtgattattattatcgtcaaagtcttccaataaatataggaaagtttgtgtgaattatgaaaatatcttccatataattcgaacataatattaaaccaaaaaaaactaaataaataattattcgacccaaaaaaaactagagctaaaaaaaacgctactaaatcaaaaaaaaaaaaaaa

SEQ ID NO: 387045 - DNA, 786 bp, Cannabis indica
acttgtaaagtggatgaaagaggattcaaaccaaatcgaccttctctctaatctcaatgtgagacaatgaattcaatcaaatgttcgttgtttaatatctcgacagctcaagaatttgaactagttgctccttcgacccagagtagattttagaggaagggcagatctcaccttgcagtaggaaggtgttcgttgctggggcgggttcaaataggcaatttgctaatatggagccgttgatatcaattttctttcctctagtataaagcgggattgaggacaagaaaatagtagggacaatcaaagctaatgccacaagaaaggaaaaaataacctaatataacaataataagcgaccaagagatatgatcaaaaaggccttgtcacaggttggagtcgaactacaatcccagtgaactactattaattctaattgtgacttgtaacctgattcaccttttattaattctagctaaaatttagcaattgaaacttgaaagcacccctgaagttgttcataattttttttttttttgatatattttctagtttcttagtaagatcatacaaaatattttgtgtaccaaaatatctcacacagtggtgtaacattttatttaggctaataaggatttttactccctaaactttgacatgtattaaattatgctccctgaacttttaaggtcgttaaaaatacccctgaactattgagattgttgaatttaaggactttaatccaattttagtaaaaaagtctaacatggatgaaagtttagagggcat

SEQ ID NO: 387046 - DNA, 707 bp, Cannabis indica
aaaatattatggtattttcacaaaatatgtaattatttaattaaagctcaatatgaaagtccattagattttggttcgtttaattaattgtacaagtagtatcaaataatattaagaaatccgcaagtttagaaactctcttagtaaaactatcatatttggaggtttacaactccgattgaggtaatctgagtggatagaaagataattcaaagatctacaaattttgtaaaaataggtatatcataatttaaaagttttttaggttaaaattgagccctaaaattaagaaatagagggattataattacaatttaaaaattagatacttgtcgatttaatattattattattattattattattattattattattattattattattattattgtcatgattattattagtagtagtagttaacttaaacttattacaataccatatctcatactcttcagtacatgatttttttttatcaaaccgtaaactataatagttttatttttttccctgcaaaccaattagtcaaagcttcattcttctttatggttgctcctctcaacccttccatacttctttttatttttctactttcattcttaaaattttagatttttattcaaggcttgcgagcttgagatatcatattgaaagttgtgaagagttatgaaatattttcttgctcaataatgctaaatgtt

SEQ ID NO: 387047 - DNA, 1749 bp, Cannabis indica
aacaaacattacgtatttgtctaactaattcagccgttaattaaacccagggaaattcgtacatcataaaaaaaaaaatatttagacagaaataaattaagggtttttttttttttttttttttttgtcaatttttaccaaacagagcaatcaaaattcatatagataaaaactacggaaaaaccactaaagtaatccaaattgtaagtttgaaaaaaaaaaattaaaaaatagtatatgagttaattttttaataaactatttattaattaaatgcacattcataaataccaataatttataagttaacagggatatcaaattttaaaaagtaataaggcagatgtataccattttaacattatttcattattgaaaccaatattttatttaggtaagttaattggcacaatatatatttttaggccataagtttttattattagggatattggtgcaaaaatcactttaattttatattttttaaagcttaaccacaaaaattgaaacttttactatataacctactaaatccaggttccgttttgctcattacacttctatctaaaaatctcaattaagtgtcacaatgtaatgcctacgtgtacacaaatatacacgtggtaaattttaaatggtccacgtaatattaattatcaaatattataaaacataatttgaaaaatataaaaataaataaattataattaaaaaaaattattttatttttctttctttttttttcccattttttttccttttactttcttcttcttcctctgaactgaacaaaaaactctagctcatctcatccatcccaaccacctccccaaactttatcttctccactcaattttcctcttgctctctacctcttgagctcagtaactccctcatcgttcacggtgcgagtccggcgagcatctctcatcaatcaatggccaaaatagaggccaccacgggcctcctggcctttgacttcgagacaccgagcccctcctcctccctattttgcctaatcatccccttctctccatcacgtgtaccactgttggatagaacggacaccaacaggggcctagtggccattctcattgtggaaatcaagaccctgaggtctctaagacttaccattcctcttcattttcattttccttttcttcttcttcttcttgcgaactgaacaaaaaaaaaagtattaaaacatttgaaagggtgagagagacagatcaaaggagagagaagagggcggatcggggttgggattttctgggtcttgggcttaggttctgtggcccgtgtggcctaaggtggtcaaagaacccctcgggtgggtgcctggcgatgtacacaaagaaagagagagaaataaaatcgagagcgagagagagagagtagagagggggattggggttgtggattttctaggtcatggagtttgatttcatggcctgtctagccggcttaaggtggtcagagaacccctggggtggctggccgatgctgcgcacaagaaagataaaaattgggagagagagagtgtgaagggatattagggatttttcagttaagaagaaaaataaaaaaaatgaaaaggaaaaaaataaagaaagaaaaaagagaaaaagaaaaagaaaagaaaagaaaataatttatttataatttatttatttttataatttctaaattatatttcataatattttaataattaatattatgtatattattaaaaaaaaattacgtgta

SEQ ID NO: 387048 - DNA, 1409 bp, Cannabis indica
caatatccagaacttagattcaacctaaaattaacttagaaaaccattttcaacaccactaaacccaacagccgtcatttcacaaaatcacaaactcaaccaaagtaaaagcttcaaaaatacaagactatagaatctagggttaccttagctccaagaactcttgaattcctagctgaattctagaaaaatgatgatgagaagcttggtttccttcagttttgggttggccgaataaggagggagagagagagagagagagagagagagaaatggaatttcctttattattattggagtcctacgtacgtacacaactcaatgtatatattaaatatatattatacacacactacccttattaacctctaaatatatatattataaaaaatacttaaaaaattcaaattacaaatcataatgacaagatttgattttgatttattgatactacgcggattctacaaataagtttatagtacatatagaattttaatttaattttaattaaatactattttgaattctgtgttttgtaaaagttactaattggaccctgtgtttttttaaataacaaaatagatccggtattttctaaaatagtacaaatatgaccgatctaaaatagtaaaatcggattataattaatttttaaagtttaattataatccgatctaaaagtactatggcaaaaactgtttatattttttgtatctgttcgtattaggaattgtcttcaagttggttgtattaaaaaaaatgtcaaaaataaagctcatggtcttatttttaccattttagataatgcagaatctattttatcatttaataaaacagagagtctaatctgtaacatttgcaaaacacagtgttcaaaatagtatttacccttaattttataatgtaaattgattgtataaaatgttgtgtacttagtagtaaaaaaaatctaaataattaagaacatgatcatattaaaaataaaaagtacattaaaaaacaagtggagaataaagtaaaatataaattatgttattttcggcagaaacaatgacccatttcttcctccattttccttttttttttctctataatttaatttaattttatacttacttatatagcatataatatcagaaaagatgactttgactagtacataactacttaaaatgtagcttgataagattttaatgaaaatcaaaaagatcattattcattaacttttatgaaagaacttgtctatatatcaagtgatatttatcatgctatgctattagttttgataatattgtttttaataatcattgtctagataataccacaatgccatcactacaaaaataattacttttagtgataattttttagttacaatataatttttttttttactaaatgtgactttt

SEQ ID NO: 387049 - DNA, 1732 bp, Cannabis indica
tttttcgtatccatatctttatatctagctagcattgtagcttttgtatccatacaagtactagtgtaccaccacatgtttcccctcttatctgtcacatattatcccttaaaaatattttctaaaagcctcagaaaatgtcaaagtatttatgtcaatattggtcatatttattttgatatttatatatagaagaatttacactaaaatggaaaccaatattgtatgcatatttagttacaaatgttatcttctaagggtatgctccagggacgacctagaataataatttaaggtgagcgagcattgttgtaagttatgatcacgacgaacgaccattaatgaaaaacgaaattgtaagtagataagtaaaaagaaatacacagtaaatgcttaccatcgtaactaaaaatttaatttttttttttttacaatattaaatgtacttggccatgctgttagaaaacaaatttataaaaataaagttacaaaaaccattttttttaaaaaatattgtttctattttaaaaataattaattttatcaatattttttcactaatttatctcacataaattttcacttattattttctctctcctatggttgggggttccggctctgcgcttcgaactgggattcaaggttggcttcagttttggagttcaagtccaacccctaggtctaagatggggttcagatcggggctgagatccaaattcaagtcaaggtctgaatctgggtctgggtttggatccaagttcaaatcggaattcgactgtcgaagtcaccagtttaagtcacagtcaagttcatattggagtttcaatgtatgaaagagtattttctaaaaacaaaaaatgttcttaaaaaatgccaaccaaacacgttttgtgttttaaatttctcttaatttaattactgaattaaatatatatatatattaaaaaaataccagttttatattatattaaaaatatgttcatatgaaaaatacttaagttaaattcaactttttttttgtcaaaacacttttttattattttttcaattaatcgaacaaccttagcccataatgtaaaaataagaattttttctaattaaatagaaaaaattaaatataaaaattcaataattttttaatattacttatttatcagtaatactcactacatctatatatataaataaaatgaaaggataaatttttagggtagacaattgccaacctgctcaatatagatttgaccttgtgaatttgtatatgaaagagattccaatatatttttaggtattgttaaaaaaaaaaatagttttgtctatataattaatggttatatttcaaataaatttgtaaatagttcattaccattaattgcaaatgttatatgtattaagttttatctgttgtaaaaaaaaatcgtaaactattaaattgcatgatccaactactttcattaaaaaatactaacgaaattgtgagaataaatcccttataaaagctcaaatataaacaaaatagagttacaacaatattatcactgacagaaaatctctagtccagcacaatactctaaaatggccatttagcttcggtttattcaagagattagcttccatttttacaaaattcaaatttatactactacaaatatcaaaattcgtgacgattcttaaaataattttttcggaaactgtcgctaaaaaattaactatttaaaattgtcgggaa

SEQ ID NO: 387050 - DNA, 1158 bp, Cannabis indica
agagagagagagttttttccacttttcgcaaatatgcgtttaagtttaatgtaacatctgactacatagtcgagagcttttctttacaggttgccttatagatatattttaacgatttggttattattattattattattattaacataaatctgtgtaaatattaataatatatacattggacaagattatctttttattgttttgtatttctgaagatgaatgcaaaagtaactttttgtgcaccaactactatcaaccacgcataagaattaaagaatctactttacattagattaaaaaaataaaaatgaaaaagaatctactttacacatagccttgttgctaaaatttatgggaagtactagtgatgataagcaattcagcaaggctactttttcttcttgtcataatttcttatgagatattaaagattttttttttttttttgatgaatgaggtattaaaggttgttaaagcaatttagacttcataaccattatgatatgatggagaggccggtcaagactattacatgtttgcaatattttttgtatatattatattgaatgctaagaaatcgaaagtgttgttttaaaaaaatatattacaatttaattttaaaaaaaatatggaaataagcgggtgatgctccttttttcctctcatagaaaagaagaaaaaaattgtatcgaagatagaatcaagaggaacgagcaattcgaaagagaaactagagcttcctttaatccaagaagaagaagcctctgctcaaacaaaggtgtttttggacccgtgtgaagatctggagctggaatggaaggagacacagattaatccactgaaatcgacccctaaaatgttaaattgagcaaacaagtcggagaagattgatttccaggaatcggctaaggtggcgtagagtaagttcaaaagttaatcaggtgagaactccttcttcccaactgaattttactgaaccattgaaaattgaagaccagttggtaaccaagcttgatttagatgaaattgaaatagaggcttcatactggagatcgtcgattgtctgtatagtattgggggctaaccctccattcaaagtgttcgaaggttttctgtaaagcccgcttagttaatttggaaattagcagttgttta

SEQ ID NO: 387051 - DNA, 2552 bp, Cannabis indica
tggagccatcacatgagatattattaaaaacctatcaagaacacatcgattttccatcgagaagccataaaaaaatacatttcaactaaatttttaaaagcattgaaaaaaaacatcgagagtataatgaaaatttcacaatagcagttccaattagcattaaatataacagaaccagttttagggaccctaagtaacattgaacaatgcgtcaaacatgggtttgacatgtagctctgttgtggactgaaccgccacagctgctaaaatttcgagactgtgttactattttatcaccaatttcaaattatactccaatcggttaacctccaactcttcatataaaatgttgcacatttattataaggttgtgttagtttaaattatcaatgtcatacttctttcgcttttatacacccaattaaatctcttaacactccaaacaccgtcatacaatacaacgaaatacacagacaatcctgcaattcaatataaaccaaaaacaactaaatcaaaataattgaaatagcaatcaattaaaatattgggaaatattgttgataaatagtcgagaatcaatcgagaatctgtcaaaaagcaaccgataattgttgaaaataataaaaaatcaatcatcgtgaaacaatcaataatgaatcgagaagttgtcgataacatgggacaaagaagtttaaaaagacaaatatacaaaccatcaaaaaactatcgataaagaatcaagaacacggagataatatgtaaggaatggttacgaacacaaaattattcgtcattcgataaataattgagaacctactgaaaactattgaggaaggtcttcactgaccttgggacatttacgtctagaatcaatcgagaacatatcaaaagagcatcgagaaaaataagaacacacaaaatactccaaaaaactagatctcacgatttcaacgaagcatatatcaaaaccaaacaaatacaaagaagaatattaggtgtatttttatgtatttttagagtccattttagtgtgtggttttagtatttttatgctttattgttcagggttacgcttgttttattcttattttagattttaatggtaaaatatatcttatggattgaaatgagagaaacatgctaaataagatgaattttagggatttagcatgaatgttagagttgtaagatacaatgggtaaaaaattctaagttttggacgctgagtttgtgattaaaaaaaagtctaaagcttcaagcaaatttttggctatgattcgttcatttccagaaaaaaaaaattaaatgaaagttctagatcttttcaaaacattttgaatcatctaatttcgagttatatcgagagagttatgactaaaataccatcagtcgtcgcatcacgattttagaattgcatcaattttgtaaaattgagcaagattcgtgacccttgggaaaaaattgaaaaattgcgttttgtaaaatttctaatagtcgcaactctatatcaaaggtcgctgctcttgactattttgacagtttcctattttcgacctaaaaacgagtggaggctaggttttcatgatatatttgaattttccagacattgggaggcaaggatggatgactgaaagcataggggtcacaattggaggactccaattagtgttccattttatctttttcatcttttatgtttttaatttaatctttgggaggtttaagatgatttttattggctaaatctttttaggatcattatgtgaatccttctttaatttcttttatggattaaagtagatattcaatttcatcttcttctattatttcaattctatgcaatctaatttaaattgtgaaattattaattaatcacatataatttttatctatgaagttgaatcaaaattcttaaaagtgagatttgaatatgcatttatgagttgttgtatttaatactctttgtgtgattaaactttatcataggaatatagagaatttttacatagattgggtttgtaagtcttaatcagattatgaactatttaattcaacttgtcaattgaataggaagaagagaaattggataatttctttaagaagtaaaagaaagatggttgggaatcataataattcttgtttgttcctcattgtttatttgtctaaattttaattgtagttttttttattcatttttttccaatattttatttaatgaaatagaaagaaaagattaattatttggtaattgataatcagttatcgcgggacgatactaagatttattacaaattgctaccgcgtgcacttacataacataaattttgtaacaagtttttaccatcgatgtcggggcctgattttaattaatatcaataaaattaattttcattctattttttttatttttatttcaatatcaataatgtttttgttttgtagtgttggtgtgacatgtggaacaaattcatatccttcaaagcttgagggcattcacaatggaaaattctaagtggtcatgtatgaagcaagttctctatctttagtttaaa

SEQ ID NO: 387052 - DNA, 1429 bp, Cannabis indica
ttcgtctaaaatgtaaatttcttacacgcacaaacaccacaatgtccatataactattaaagaaattaaaaaatatatgtaaaatataagataccatgataaagacatgtgtaactaacaaaagttatacaattaataattaaaaacatcaaacaattatcctacctttaatgttaaaatatataatttaattcaactattatcctaatttttttctatacgaaggtgtcacataagtaaaatattctaggccaatcaaagtatgcaagaaatttcaagaagaataaaaaactagatataatacacaaacaaaattatcattactaaatatatacacatacactacacactcccttaatatacccttcatacatacacaattaatccatttccttatttttttttgttaatttaatagtacataaaccaatcaaatgatataaagtaacaaaatcatacaatgtttaaaatactaaaatcaattaaagagcattcatatcaaatataattgaagactctaataaataaaaaaaccccaaattatatttaaatttatataaagcattcatatattaagttatttattttccaatccaaatataattcaaaaagttaaaagttaattatttttatatgataacaatcaaacaaaagtccaaaacaagtagttgtttctcctcagttatcacttctctttcattggttgtatatcatatatgataataagcagaagctcaatatatgctctaagcttctagaaaaaattaaaagagtaaatggccaaataagtcactcactgaagtgaacttacaatgattttctatttttttataaatataattagtgttagatgatacaaagaatcactaacaatattcttatagtaatttatattttgagaaccaattgaaatttaagacaaaagagaacgaatcagaggaggaatagatgcactcttaatcccaacttcaaaatgggcatatattttatagttcttgatttgattaaaagccaaaaaattgaaaaagcaaaataaaaaaaaatacaagtagaatctgaaaatggagcacaaaaaaaataaagagatgaaaaaaaataaaagaagaaaaggacaatgaaatacctcacagtggtggtgggagctcaagtacatcggtggtgagaacgtggcggtgaggtgctgagacttcgtgacagtggtggtggtgaggtttcgtgacggcggtcggagaggatacggcaagagtggtgcgactaccactccttcagacagtgaagccaagagtttgtcaaaaggtgaagggtttggaaaaataaagcattcccacctaatctcacctttttagttgggactataagaatatttttatttaaggaaatatatttctatttaaagaaattaatttctatttaaggaaataaataaata

SEQ ID NO: 387053 - DNA, 2265 bp, Cannabis indica
ccctcatctccccatctccccaacattccattcatggacgaccatgagttcgaccttcgatgtgcttggataagtttctaaaatcataagtgtcgatttttggggttaacacatggtatgcataaccttacattcaaagagatcttttgggtgcacatatgttgatcttttggttaagcgtcggctaatctcgagagttagccttgctaatttttgggataaacaattgccccctagtttataagaatctgtttaagtgttcttgtagactaactccgatgagctttgaccccatctttcagctccgtagttatcccttttaacgcttatgccttgaggtcttcttgtttagacccttcttgcgggagtgttggctcttaggtgctatctctatccattttcatggtgggtacttgtcacgtggagggagggttagcctcttgagctctgttgacctcgtttatgatcttttactttgcttgagggagcttttttccacttgggctttctcaatctcttttctagtgtaaccttattattgaaggaatatagactctttgggcaccctcgacctcttataagttactcgttggatataagggagcttgtggcccttaggctgtgcttaacgttttttaggatttaagaatttattgggggagcttgtggcctcttaggcggaactcaaccccttatattgtgtaattatttaattaggggaccttgtggcctcttgggcatcgcttaacctctttttctacattcgtggcacttagagcacattttgaatactagaaaactgatattcctttttagagaggcgtccctctcatagtcatatatgtttcctctcttcttcttcttcttcttcttcttcttcttcttccttttgagctgttttgctcactttgacaatttcgattgacaagtatagtgaacaagtaaaacagacatgtaaagagtgatgaatatcgtatgtaaagtgaaaattcaatatttcattgttaagacaaatacataagcacttgggtacattggaaatttccagagatcaaatttgttgcctatgttaaattagtacaatgtattaaagtgttgggatttattttaccaggatctagatttactaacatgtatgtttcattaacaccctaaatatgaattttctctaatacgatgaaattaaacacataagagtttataaatccttacattgactgcagcagaataatatgactcattccgctcagatttctaacccttgttcctttttgccgcagagtaataacaagatctgagccttgacctccttctctccttcggtttggttaccaccatcttctacactatgattgagtacttgacttgctatgtgagggcatggcactctatcactattggcgaataggtgaagagcaatcaaggaggttttgaaatcactatagaaggtgtctctcatctactagttatctgacagagttataaactatatttgctatgttgaaagtgttggatgagaatgagagcatcatgttccttttatagtatttcaactagggtttaggattgaattatatggattaaaaaagaataaaataataggcaaaattacacactagtggttggccacttaatgggcttctctagttacaattttgccactttattttaaccacttattcttctttcaataatgctatattttctaatttcaatcctataaatgtcaaaactatttatttataattataattaattatcaaataaaattaacatttatattatatattaattagaccatacaaagtctcttaataattaataaataaatcccaatatctctttttttcacaattaagcccttacttagtgaaaattcataaataacacatagtctgattttaaaattataattgattaattaaaaccaattaactaagtctgcatccaccagctagaatttcatggccagttgtagctgttgcaaaaattatgaacactacgcaagtatacgcaatcaagtagtaaactcacacaggtgaggtcgaaccacaaggaattggattaactaccactaaattatacttatgattctatctggaaaatcaatactttttatgaattcaataaaataattcagaaacttaaaataacaaaagaatattaatcaagatgagaaaatagggagaagaatcttgttgttagtttaccaaatcgtttatgcctaattgctatcctttcttgaagtgaataacagattataaa

SEQ ID NO: 387054 - DNA, 1337 bp, Cannabis indica
taatttggagctatacattaccaattgggctcgatgtgattctgctcaattccatcgcttccttcaacaactccaacttcatcttctccatctcacgttcctgagaattttttgtcctcagttgagatcttaacggaggaatttttatccaataaggaatttattatcaatacaatgaaaatcctaagataaagctgataacttaacggagttaactcactgttaaattttacacaaaaaaaggaaaaccttaataggaaaaagttaaaccaagcaagaattctattctgttatatacaatagatagatatattatagatatttccaccgaataatcctaatcctattgagaaaactattttaaatttaaattattaattaatcatttttccttttatataacttttatatgtatataaatacgtatccctactcagacttcataaatacatttccatacaatacttcatcaatttctttttacgagctagcttaaaccattttccatatttctcaagaacacacttcaaatatacatatataaatatatatattatatataacatcctctttcttaattaaacttagtgaatacattttcggctacgtaggctgataattagtcgatcaaaggaatattgaaggtagtttatttcttttaatcaaagttaacattattctaaaaataataattttgacatcagtccaatttcttgttcaataaaataaaaatataatttatgttcttattattgttatatacagatcaatatagcaatggagttttttccaggttttcgatttcaaccaactgatgaagtattaatcaattattatttaaagccgacgatattaaatcaacaaattccttataataaaatgatacatcatgctaacatctatgcttcccaaccatcatcattggcaggtatatatttatgtatatttatagttagaaattaatttatttaataattaatcatcactaatcaataaataattaattgtttgttttggtttatagattcgtacgaaggttttgaaagagaaaaggtgaaagaatggtatttttttagcccaagagtgtgcaaaaatggaattcgtgcaactcgaaaagcacacttgggttattggagaatgtcacagtcagcaaagccaatccaacataacggtgtagatattggtctaaaaaatgttctcaatttttatatcagagacaataaaaacagcatcaagacagaatggattatgcacgaatacataataatcgacaccaacgatgattctaataataataaaaaaaatgattttgcgttgtgcaaaatatacaaaaatcc

SEQ ID NO: 387055 - DNA, 1087 bp, Cannabis indica
ctaacactgatctcttacttatctgattaagaataagaatccaacatttaaaagataaaaattaattaaacgacaacatgaaatcatgtatgaaacaaattgatgtagatcatcgatccaaaccataacaaatcaattaacataaaccccaaattgtagaataaggcgcacgcaatactatatgatcatgaagccacatattaaatcttaattaatgtcccaatacaaggagaccaggtttgctagcctggtcatccgaatcagcggagtcatcgtcgtcctctaaggtgcttgcactgccaacgcttactgtggttgtgctcagcttacctgaggacgacaacgaaaccttaacattgttcacaatcttgtaagtgtcgtcgacatcgtcatccatgtcatcatcatcttgatcatcatcatcatggcattgattaccattctcaggctcaaagcctcccttacatcctccacccttgccatcaccccctccgtgcctcacagcatgaattttgtgttgatcaccggcctctgcggtcgagatgaagaacaacaagataaccaaaagcgttccaaggcagcaaaacataagggttcctcttgagactgccattgtttttagggtagaaaatatatgtatagagagagatagagaaaaaaaaaagattattatctttttgttgaaatagatcaatgagatctttctcttgagctcctttatgtgctttggtgggattatgggattagagatgggatttgagaatagttataagcttttagtactatggagttgtggattttgaaaaagggttatttactatttttaggagttaaaagagtctgtttgataagtggaactggtcacaaggcttaaaagtacatatatttaggcaaaaggaaagggaggactagatctgcatgcacattcaagcatttgttttttcacaagcaaccaatcttagctggcaatatctacgtggaacaagtttgtggtggaagacctagtaaggattgattgaatatgggatcaagtttgttaattttcttaccaattgatttatttctaataattattttattttatttt

SEQ ID NO: 387056 - DNA, 1518 bp, Cannabis indica
agagagagagagaaacagagccttggatgcttatcgtaacctaactaattattaatctaagaatttagttgaatacattacttgaattttgcattaatatgttatgtatatatatgttatacaactatcaatcaactattgagaaaatattgaagattcaactgttttgttaatttaataagaaagcttttagaaatttacattaatgtatcaaatataatattactaatgctttacatttctgttaatatttatgatatgatatacaactctaaatcaactattatacgactatttaaaaatcaataatatagacaatgtataaatgaaaacatttccgccaatgtgaactctgaaaaagtttaaaaaaatcaaataaattttcttttattatctaattgcctggatgtagaaaaataggcttggatcgtcttttatcctcaatggctggtaaccttctttcacttggtattttaattgcagttagtgttttctttattgcattccagtacttgtttcaactttcatatttgcaaacccttgagatgaattcaccactagtttaataatttacataattcattccttgatcaaactgcccgttgaactgtattgcatccatttctttaaattttaaaaattcaatcatggtcagtcaacaatgaaaaaactataaaaaaaattgatcccgatcaaggtattgaaaataatacatatgttgttaggaatctattttacaaccttaaacacttaatataaataaacttaccacaatagagttttctctatatgagtcgtgtattgtcaattttaaactctaattttttacataataatatttcagtatcacaattattaggtaactcataaacaacgtacgtgcaactatttatgaacaatgtgcttggacatcgtaagaaaaaaaattaacaaagtattaatgcattgatgaacaatgagttgtagtttaagaatattttgtgaaaaaataactataagaacactataaactaatgtgaactcaaacaatgttaaaatatgaacaaactgaccaattagaattattttttatgataaacttgtattgtattttctacataaaatacttgcaaataagagtaaaaatagtgtaaccttcttagtgtgtcattattaatatatcaattattagagcgtcaataaaaatgatagctaactgtaatgcaactacatagaaataaaaaatcaaaataatattgtcagatctatgacgcgagatgaatgcaagtttagtttattgtctcgatttgttgaataatttcaagattaaaattcaagaaaataatgttaatacaacaattagaatattagctactctagtgatatatattttttaggttatacttgatttagattgatcagaaactcgagatctatttgttacaggtctacatcttctgaatctgtatattaaattaaggaggaattagttttatagaatttaaattattttacaggattgagtttatgtttcaaact

SEQ ID NO: 387057 - DNA, 1031 bp, Cannabis indica
actttaaataatttatgtaaccgaaaataagtttcaaaataattttattttaacaagcctcaaaaaaatagtttatatttttgacatggtgaattaattataatttctaaaaaatttgtgtgaaattctaataactatattatatatcgtcgtataaaaaaagttaacattgtaataaatttatgtgtcaaaaacttaaaaataatgtaaaataggtcattttttctcaaaaaaaaaaaaaaaaaagaaaagaaaataaaaatactccatatttcatgtctatttttgcaatataaattattgaatttttttaaataattacaatgtataaagctgtataaaaaggaattaaattataattttttttgttttataaaaaagtacttattaatggggccaaaagcatacacctaccaaataattatatttatataactatagtaaaaacgtgtgtagagtttaaaaatatatataaatatcaatattttatgtactactttcattaaaggtgtttttttttgggggttatggtcatgatgcattttttagggaagtcattatgcatatttaaatgggtataagtacaacacaatgtacctataggctaaataattattcattactcctaaaaatataatttttaatcactttttgttaaaaataataatagcacatgaaaatgataacattaaagcatttatggtatggactagtatggaatgtgagattaagaaagaatcataatttagattcatatttatatataggctaattaaaaattttctccttaactttaatatgtattaaattgtggtctcaaattttttagaccgttaaaaatttcctcaaactattaaaattattaaatttaaaaattttattctaattttactaacaaataataaaagctcaagggacacaatttaatacatcgttgctaaggattgttaaggtattaagaaactcccttaaatgcaatgcgctatgcgcattaacataaaaatcacgacaataagtatggtttcagaatt

SEQ ID NO: 387058 - DNA, 1174 bp, Cannabis indica
aaaaaaaaaaaaatagatgaagtataatataatttgaaccgcttacatggtatttcactaaaagtagaggttgatgaagcttacaggagatttatcatagccttatatattagataattttttattatagatttttgcaacttgtttcgagaatttctccactctgtgtagttcttttgtgtaattagacataatttttatctaaaacttgtaaaagtttaattttgttagaaaatattttaccagtatctagatttactaacaagtatgtttattaacatcctaaatataaaaataaacacataagagtttagaaaactttacattggttgcagcggaatataatgactcatttcgctcaaaatcactagcccttgattttattctgtcgcagagcattatcaagatctgagcctggatctctttctctccttcgggtttggttaccactgtcttactcactatgattgagtacttgacttgctatgtgtgggcatggtactctttcactcaaggttttgaattggatgaacaatcaaggaggtttgaaatcactattgaaggtgtctctaatctactagctgttagagaatgaaaactacatttgttaggttcaatagctaagttgacaagtggatgagatgagagcatcatgttctttttatagtgttttaactagggcttagggctgaattatatggattaaaaaagaataaaatattggacaaaaaatcacttaagtgccgtccacttaaaggaccactttctagttacaattttaccacttttttcaaccacttattcttctttcagtaataccatattttccaattcaatcctataaatgtcaaaactatttacttaataattataattaattaattaaataaatttgccatttatattatttattaattagaccatataaagtctcttaattaataaattgaccctaaaacctcttttattcataattaagcccttgcttagtgaaaattcttaaataagacatagtctaattttagaattataattgattaattaaaaccaattaactgagtctacaagcagtgttatctcaactagtgaggggaccatgggcctaataaccgagctttgaataaatagatctagaatttaccaagtaaattctctaacttattaattccgcttt

SEQ ID NO: 387059 - DNA, 1073 bp, Cannabis indica
ttttttacttttttggtgtaaaccgagaagagttagttgttgtggtggttgtagctccaaccatcgattttggatacaaaatcgtgaaatctcaaccttcattgaggtataaatctaatttctaataatttcttaatgtaaattggtttattttttattttataatttattttagaattttttttaggattttctgtattgttgatattaagattgtattgctgtgattttgatttttaattatctacatttgattttattagtttttatagaaaaatagatatgttagaaatattaaatattgtattagtaaaatatgttaaatattatattgttttctaataaggtatatgaaatatattaaatagtgtttgtatattaattattatatacaatatataatatatagttaggttttaaaaataacttttaattcactgactaaagacaaaatatgcatttaagttatttaaaataatttttaattacaacattaaaaattagttacaataataccctataataactttttaaaaaattgttgaaataataagaaataatatttatataataacgtactatgatatttattcaaaataaataattaattaaaaaaattataagtttacaatcactttttaaataaaattattttttagcatatttttaaaacatcactaacctcttttcaaaaataatattattttatatatataataaaaatataatttcaaaaataaaatatccatatacttatattatttgaaactaaaataatatatattaaaataataatctatttttgaaaattttattttaattattaaaataaaagataaatgcacattttagattttgaggtatcaaaaatatctcaaatcttgtttttcaaaaattaataattaataaaagaaattataatgtatgtatatatagtatatatacaatatatacacagaaaatcggtggggctggccattgatggccgtgataagtagtggtggtggttgcaattggtcgggatcaaccatggaaggtcgaaggggaggagcacgtgttgggttttgtgccct

SEQ ID NO: 387060 - DNA, 684 bp, Cannabis indica
atatatatatatttattgaatggtaacaagttagttggtgttaggaatgtgtcttaaaagcatatgtaaaaatatttattatttttaaattgaataaatgaacataataatttattattattatgtctgaattgttaaattattggttgaataatttaagtaaatatcgaaaaatttcatatttattattgaaaatgtaatcttatattagtaaaagagaattaagatcacacgaatgaataaaatagtcaactaattaaagttttagaattctttaattgaaattgtaaatacggtttagtatcatattagtacaaatattatctagattcaaattattaatgtagttaaacatctcgaaaatataatataattatatatattttatatatatatatactattagaaaatgttcttttttcattggttgctgttagatattagatgtatattagctgtaaaagaattagatatttagtagatagttagtagatatttagtctcctaactttgtatataaatatgtattattctatgaaatcaacacacaattcgactcactattttctacatggtatcagagcattgtgattcaaaattcgaaattcgaaattagggttcttaataaaaaaaaatatatatattagggtttgagtttagggtttttcgaaaaccctatttgga

SEQ ID NO: 387061 - DNA, 917 bp, Cannabis indica
gatgaaaattgataacttttgtactcgttgcaataataaaattgctcattactcacaagtcacaagtcacaaccgttatggtgtgttggagctatcaagtattcgaaaattgctcatttctagatgaaaattgataacttttgtaatagtgtaatagtggatgcatgctcacaagtcacaacctttatggtgtgttggagctatcaagtattttgaaaaaatattttatgtaatgactgttattagagttgttactatgtcttaccatagttgaagaacaaagaacattagtaacagaagagagatgaaagatgaagaagaagagaaagataggaaaagactaagacataaagataatgtctcattgaatcaagatgagtagtacattctttttatacaagctcaagagagctaacaaactagaaattgtaaaaagggaaaaaaaaatgtacaattgtagtagaaatctaacaaccaaaccaactactaactgtcataactaaagctattctaactgtctttaaactctccctcaaacttgaaattggtagtgctaccaatatcaagtttacttttgagaaattcaaatcttgagctagtaaacagagaatgcaaccaagttatttcaaacacaacctaagtcagacttctgtattctgcttaggtactcgatcttgacaccgtgtgatgcttcttgtattgccatgccatcagattagagccaagaaaagtagacctcctgtcattagggtcactggcccaatctgcatcacaaaaagcagtaatttcacactcttcaggacacttaagatgcaatccatgggaaattgtactgctgaggttagggttgagcaacggtcggtttggtcggttttttacacaaaaaatccaaaattcggttttcggtttttatggtt

SEQ ID NO: 387062 - DNA, 2855 bp, Cannabis indica
taaaataataaaataaaaatacataacatcagaaactagtgttatattacaaaataatatatacatatatattcatgtatatatctaaacataccggattcttgaagacgaccagcagcatcgcttaacaatgcatatggtcaacagagttactagtaacctacaaaacattgttccacaaaaactttcacaagtccaatttcgctgtgtttccattttctcaaaatcaaaacagaaatttgaaaaggaaaaacaacagcatcaagaaaagaagaagactgaccccggagagagccacacgaagagaggcgaatagagatgcaaagctctctgaaatcgctattgaatccctctcgacaacttcaagagccttcaaaatctcggctctgttaatcggtggttctgactcgtactgaccatcattgcccttagcaaaattagtaatgggttcaaggcctgttggtgagatcaaagtttgggagcttgtcgaaccagaatccccatccagtgcctcccctcctacactttcttccatttgtcacggtttttatcggatgcagcacccaatctgtaaactgatttagtgaatatttgattgatccaatataatagtcaataatatataattggttcggctgaatctgaaaaattatacctttacaaaaaaaaaaaaaaaaaagaatctgaaaaattattttaattcaatatttctaaacaaatattgtatgatgtatctatgtacttttttttcctttacttaacttgctcaatactttgctattacctctaaataccatttttaaataaataaatttaatataaacataatgacatcaacctaacattcattgttaaagcacaaaacagttaggttggttagcttttctgttagaattagttaggattacagtcacttgttgtgttagttaattgttgtacttatagtttctattttttgttagagattgcatcaaatgcttctcttgctttttgtatataatagttgtgttcagctcaatcaatgaaatccttaataagattaagagaaatctgaataattgggtgagtaggaatttgtcttttattgggagagctcaacttatccattccgttctgttggacattaggaatttttggatgaacatcttcatccttcctcagaagattgttgctgccatcagcaagtgctgtagagatttcctttggggcactaatggaaatagaagtaaatttcatcttcttttttgggaaaaagtttgtcttcccaagaagtttggtggtattggtttttgttaagtttggtgtatagatattcaaacttaaaatagcaattaaaatatacctccgacttaaaaaattaagtgataagttgcttgagaagttaaaactaaaattcccacttgcaaagagccaaaacataagaaacaagaatagaatttgcattctcagttcggtacatgaaaggacaatgataagtaaacaaaaattgaaaacaaatgaccacccaaatagtgtaactgggtcaaacaactcaaaccattatgttaagcaaatagtaatacatgaaagtgttaagcttttatagattgcagttgcacctagtacatttgagtcatttttatttctagctagaactgtaatacaattaaacaaacaatacttatataagataacagtaaagaaaaggccacagactcacagctatgtcccagcaaggaatttccaattggaaaaagaattaaccaggctcctgcaatgccattggtactgctattttttaacacacataatttttattaatcgttcactttctactttacacataattacttactttggttcaattctattttcatttattaattattaattgattttgagtgacatttcctctatgaactttctcatttcaagtagcaaaagcatggtaagattggagaaagcattaaccagggcgattggaggaaaaatataagaaatgagagaactgagtcgaaattgaagaagaaatccaacaaagcattagaaaaaccaaaactataaatgaagaagaagaaccaaagatcagagaaccaaaacccatcaaactaaaaacgaactcaataaacgagagtgagagctctaacctttttttagattagagagcctactgacttctagttctggccgaacaagaaaataccatcgtctttattcttagatcgaagagaatcggagaagaacttccaatcaacgggacggggtctcctccattgtaatcgcataagagaaatggggttttgaatttcgatgtaagttattgcataagcggggcgggtcagaccgacccgaaataaaaataaccgggcgggtgcggggacccaaatagagacctggatgacccgtgaaaaaagctccattttgccatgcctacaaatttaaatttacacatacacacattaaatttaaattaaatttagtattatttacatttattagtatagatatgtaaactcccctaaatttcgacaacaccaacaaagagacatccgaggtggtctgagtgtgatttacgaggttagaattctcttactatcgaagagttgtgtttttaactttttcaaaaggggaagtttttatatgatttggatttgggttagtgcagtttgagattaatctagacaaatgtggatatttgggtggaaagggccatctgggttctcagctcgttctacggcagaggaagttactcaagggatcgatggaactggtctcactgccattgttacaggtcttctttcagaatctgggttttcctttttttttaattctacttttttttttttttttgtgatgattatgtaattactggaaaa

SEQ ID NO: 387063 - DNA, 890 bp, Cannabis indica
tttttttttttcttgttttttcaacatctatacggtatcataatttcagttatcatttttaccatatttttaaacttttatacggttactttttaaaaaatttcatcatatacggtttttgattacataatttaactgtcgacacgtttccctctaatatgtcaaatttcaatcacttccctgccagttaccattatctaacccactccctcgatattattgttatattttgaatttcctattctacatcattctcatcttcctcttcttcttctttctgatcatcgagttcttactcttttttttctgcttgtttctaagacttttctttgtttttgagtaatggctgttactcgatctcgttcgagttcattgtccccttctcctaagaaacccaaaaaaagtctattaatgaatctaaaccaaaatcaggtgctcaaacttcttcaaaaccccctaagcggaaatccaaagttgtggttgctgttcgtgagccttcatctaataatgctaggaaagctaagaggaagagaattgataatgatgatgattttgattttgttcgtcctaaaaatgtatttttgaatttattttttgtgtttttcttgttgatatgttgttttcatgttgttgttgttcattttttatttgactgttattttgtttgttgattatttgtttatttctttaattttttgggtttaggatttttctatgttgtttttatgttgtgggtttcaatcgtatttttttcaaattattattctatgttctatgttcttagtttttttgtttattttttattttgttcatatttcttcaattctattctaggttctatatgtatttttttttgttgatgtagtatttctgtttaaacgtagagattt

SEQ ID NO: 387064 - DNA, 1483 bp, Cannabis indica
gaaaatgccactatcgtacaaaccaagcactgacatgccaccaacatgcacaccagcatgcgtcaccactagaccaccacttggccaacttgtgggcaacacctagcttgtaacgtgccatccattctcccccacttcaacatatcgatgccctcatcgacggactgcaggcaaatcatcctgatctcgactcctaagcttactccaagcttcatctgaatcctaagtcttcacttgtccctctatcttcgtagaaccaccctgttggtgacgatctcactcgcccactcttggacttgatcaaagaacctgtgccacttttgctatttgcaaaccaaccatacctaagggcaccaacagaacacacttccactggagccaagtccctccgaaaaattcacatgccaactccatggtgtaccatcctcttatcgcatgataaaatttgttgcgtccctcctgggtgccaatgcagcaccaagtgtactcctgcacataatctctttgcaaagtactcaatattggccctctagtgctaccgcacacccacgaattcatgcaaaaggcccatctgacccaatacataagtgctcatctgaccttctttaatgtggtcaatgatctatcaatcaccctaaaccacaaattttccctttagcttctgctcgtgtcggctctccgacactgtgtcacaagtccatctcctaaaatcaaccctgcatccactgatgactagctaaattcttacaaacttgataacataatgtcttactcttaggatttgaagtcatctcaatccgctatctcccatcagcatatgttcttcgaaccatacaacttacagtgtcccacataacaccaatgtttccattaacacaaaggacacacataacatgccacaaactagcttagtcttgatcttagcctacacccatgcataatacctatctataacttacaacaatcatgccagtttttacactaaacaacccatctgttgtaatgtttccctctgtattcacacacaaaaactgaaaaaagtaccctgattcttcaaacatatgaattagtgagctcccctacttcaacttggcaagaacttctctcttagaagaatacctctcaaggtatagctcgcaagctaatcgcatatttacatatgctccctccattacaaatgtcaatttgataaaggtgttgaactaatgccccagtcattctgactctgtgccccttgagatttctatgttgctttagcaccttaggccaacattgtcatggtgttatcttagtacctaagtcctgccgacattcaccctagataactagcactgcttgtgtcttgagtcttcttgaatggctccagcagaactcaaggagcttaagttacagcttcaggggatgcttgatattgggtttattcgacccactgtatcgctctggggagctccggttctgtttgtgaaaaagaaagatggttccc

SEQ ID NO: 387065 - DNA, 667 bp, Cannabis indica
ttttgaaaaaaataaaatatatttctccaataagaaatttttaagattttttaaaagtataattttcttagagatataattgaatcttgaattgtccacaaataaatgtagtaaattttttgtttgtctctggagagtctggtataggttatattcttgtaaataaaaagaaagtgattcatgataagtttattattgagtagagttttatgtacgttgaacgattttataaggccaatggattgtcttctcgtagaattattaatggctctacgcagattattgctcataggtgggtgaagccttcggatggaattattaaaataaattgtcatgctaatttcgttttcttaatgctagattgagttggtttttgagtggtgttgcgagattcttctggtggtaatttagccactaccacttggccttttgatggtgtgctgtggctgaagctatggctattttaaatgggcctggactttgtgtttttcttggctacgctcatgttacggtggaatcgaattgtctcaatgttgtcaacgctctcagaactcattcgattgattattattagctaggttgcattggtagagatattttgactttttgtaacctcttattggagaacattgtcccacatggattaaatgtaaaaatattaagccat

SEQ ID NO: 387066 - DNA, 2185 bp, Cannabis indica
aacaacaatggacttctaggtgaaatctatatcaagatttatgaacacaagactcatgggagactcaatattcacaaatctaatcaaagttggtggttgtgaggttcttgggaacaataaaccaataaaagtaagaaaagagaatggtccctgtacttggtaactgtgtggatcaatggtgctttgatcaaggagatttgatgtcgacaaagtatggaagactcaaaaaaaaaaaggtgaaggaaaggatatggtgttcttagttgccgtcgagtaagtcataaaaaaagatcccccctacttcaacatcgtactctcattatataggcttagggcttgttagtgatccctcacatgtcggggtgtttcacaaacaaatctcatattttattcctgataatgaatgaaaaattataaataaataaataatctacaaaaactccttatttttaggtcaaaatcccacaaatattggaaaattagttattctcgattatgcatcaaattgaagtggagtgacaagggatgtcaccttcacagcttgaaattgatgacattggtgtagaagtgttagaaatatgtgttttggggtgccatttctcgcacaagatgccacatgggctatggcattgttctctaacatcctacacttaattacactactcaattcccgagtaaagtgtaccagcctgccttgtgagccaattttggactcgataacttcagaattgagctatgactattacacacacttagatttttattgaatatatctttccaatgcaagttgaaccagatcatttggataaaaaattgagagagttatgcctgctttattgaaggaaattttatgtattttgctccagctgtgagcactgacatggccaagtcggcagctctcggcaatgcatgttcttggaccccttggagtgtgttttagactttttttttttagggtgaatcatatttcggtggacccgggaccccaaaaacctcatttcgacgtttgaaaccctaatgggagaccactgccacagtcggggccgaaaagtggcagtggttggccatggcttatgggaagccatgaatggtgtttcttgcttatttcaatcatatggatgctagaaaaaccactttggtcacattggttcttgaccaattgcttaagagagcactaactatctttttggccaaaaagagggcagtggtcgcataagagtgctatggagccttgggtgacttttctcacttatatttgatacatgaatgttagaaatacaatttggccaatgaaaatcccttcctcctatcgtgatcggtccaaccactgccaccatttgtgccaaaaatgtggcagtggtcagccaagtggttctataccacttgtggcttttttcacttagtttgacatgttattgatgaaaagtactcttgggaaaaaatcttgtcccctttcaatgtggctgaccactgccacaatttgtgccacaaagatggcagtggttagctaagcttgtcccttggtgagaaatggtttctttctacctgtgttgcactccttggtattgagggaacacattttaacaattccctttggtatttagtgagtggcgagagctgccatcttcttgtggtagtgctctctaaaaaggaggagaatactaccatcttcatgtggcagtcctctccataaagcaggagaatactgccatcttcatgtggcagtggtcgcatatgccatattgcatggggttcttgtgtaattttcactttatgttcaagtctaagcctttttatgcctaaatgaattaagtccttgttggtttccttgtcgaattgatgtctcaagggtgaaaacgctcgcccaggcccataaaccctagtttggacacacttgggtgtgtgagtcccgacaccaaataattggccgatgttttcgagtctcatagaggtgccatgaggcccttaagtaggatgtcttaactcatttggcctttgtaagtctggttcaaagttgggttgactttagtatcttcaaggcactcttggtatgtgagcccttatgcaagagtaatcattttatttttagcattgctatgaggcacccatggtgcttagcaccacgatgaagtgtcgccgtataattggttagcaattttctataatatttattaaagtaaagtaa

SEQ ID NO: 387067 - DNA, 1410 bp, Cannabis indica
aaattttgcatgatgtcttaaattttataaaatcttgataatgttggttttccttaatattgcgaggtcctgtttttaataccgtgagatctcttctagcgaaatcctactcacgaaagagggaaaatttatcccattaacaaatattattccttacaaataaataatatttgaactctcttggaactcattcataaagaaacataacacatgaaaagaagctaatgggaatattgattcaggtttaaacccacacctaatgcaagactcattacaattagattgggtttggaaagccacaatgtaattggatttgtgtgcaattagaggtaattacacattttggcatatttgtctgaccatgtaattacattgtaactgtgtaattggaagtaattgagagagtaattatatagttacttccaaatacacccttaatttcgcgatgacaataaaccttggccactcgaatgatgccatgaaaaaatctccaaaagcttattggccatattggccactcgaataatgttattggccatattcaatctccacaaagcttccactaactcctcttatgagtagaaatcaccgtaccatcatcaggtcgggcttgaactaagacgaactaaacttatgcctagggctcacccaatacagagaccccaaaattatttttccctttaatatttttcaaaaataatacatatttctttaatgagggccaataatatattttttgtccttaccccccacaaaattttagggcactatcactctccataatagctttgtaatcttacactatattgcccattagcttcaaaatgccacatcattttataaggaatctcacggaaactaatgggaatattcacattccaaagctcttgtctaacaaatatgaagtgagatttaaaaaaaaatgagtttcaaccataaaaaaaaatgtctctataatagagaatagatagaaagctctctactgttttgctaaaaaaattttaattgtattttaatcaaaattattattatttttttattttataaaattaaattatatttaataaattcaaattataaaattttaataaaataatcaaatagtactgtagtagagactagagagcatggttggagcaacaaaaatgaaaataactctattttaacttttagctattttagctaaaaaaaaaatagagagtaccattgaagatgctcttagttaaaatagagagtgagacttaaaaaaaaatgagttttaagagcatctttaatggatgtgtaaataagtggtgaaaagctaaatatagctcatttaacaaatagtgtgctccaatagtgtgccaaaaagttacgtaaatttggtacatatcaaattttgtgccaaatttagcacaacatttgctatga

SEQ ID NO: 387068 - DNA, 1021 bp, Cannabis indica
aaatttatataatattgttagcaaattagaggtttctaattaatcttgtaaaacattccaaaattattctttaaaaatacactaaacacatatttgacatgatgcgcgtgttgacgaagttaaaataagatctatttaagtagaaatgataattcatatttataactatgtcgaaatttagactaacaaatgttcaaattcaaattcaattcatatgtttatgatatatttaattaaacaaattttgtatgtaataaatataagtgtctataatttaaatagattattatctatcatttttaagttaagcgtaagaatgataataatacgaattcttaattacattcccatcttcataaattatttatataactatactcattccattaatagttggggatggtgcaattattaaccatcaaacaatgaggaataacttgataattatttatatagaaaacaaaaaatatatattactaattgttatttgtgttttcggtaataaacacataaattctagaagtttaaaattcattagtgaactcaaataacataaattggatcaagctcaattgacatttagccttccgggaacaatcggacgacttgccaggcgaagttctgtcaacactagtcagcatatagaagagtgataattctgtgtacttggaagaggttctcaatgtatattcagaagctagtcccaattttctatttactgctctacatataaaatagggaatactttcctaaaatctttgacagagaatattatcctggttaagaagaaaaactgaataaattgaagatcaagtaattaataggatacaacatgaatatcttttactgtgatcagatctctacgtcagtgtatacgcattgcctcataggctaggtatcattagataagcccaaactaatatattgtctataaattccccatgagagggaaagggtaactaagtagacatctattactctataaatacacattgaattcttcatgcaaagggttagaaat

SEQ ID NO: 387069 - DNA, 1056 bp, Cannabis indica
ccgatgatgcaatctttttctgtcaagctacagttgggaatgcgagtaatcttatggaatgtattcaaaaatatgagaattggtctggtcaacgagtgagtaagcagaaaagtggagttgtgttttccccgaacactacccctcggatacgtgaggacatcaaaagaataataggtatgaacccaattaaggcgtcagagaagtatttgggcaaacccttttttttactgcaaaaagaaggaaggattatctcttcttgaaggaaagaattctgtcaaagcttgaggggtggaaggcaaaacatctttcacaagcgggtaggacgattcttattgggtctgtcttacaaagcatcccaactttctttatgtctactacccaagttcctactactctttgtggagaattagatcgaattctagcaaagttctggtggaatggcaacctggaaaaaaagaattattgtgctttcaagtgttgggatgaaatatgtcagcctaagaagtgtggtggcctaggatttcgtcgcttcaaggatatgaatatggcccttcttgcgaaattgttttggatgatcttacagggaaaggacaaaatgtgggtgagactcctattggataaatagtgtcataaagttaacgcttggcaagtggagcaacatgatacggactcaagagtgtggaaaagtctgctacaagctaggaaactatgtatggagagtgcgggagttttaattgctgaaggagagtgcgaattatgggataggccttggatcccgaggcgtaatcttgtagatatcaaggaacactttcaatttgttcgtaaccaggctctatggaaagtcagagatttattctcagaaggaacccgctcgtggaatgaaaacctgatcagagaatgcttcgacgaggagattgctaatgagatattgaagatcaaatcattgcaagaaggcccggacatcctgttttggaatgcttccaaatcaggaaatttttcagtgaaaagtgcgtactggaacagccaaaaacatcgtctaaaggatgaatcaaaaat

SEQ ID NO: 387070 - DNA, 1405 bp, Cannabis indica
tctttataaagcccaaccttctattattttgaatccacctaatttatctgaacttattattcatcttctgggcacgaggaagaggaaagctcacgtgtggtacagcccgaacccagatgtgtttcaaactcatttgttcaaaggtaattccagctctgatgttagtctggcatgtcctgaggcagttgatgcgggtggaagtgaagctgagaacttgggaaatttggagttcagggctgggtcgtgtgaagttggtgaatcttcgcatgttcggagtggaaaaaagaagaatgatggcagaagagcttctaaccgtggatctggggtcaaaacaagaagaaggagaagagtggaagcgggtgagattgaaggaaatatagatgggatgcttgacaattttgtcgaagttccgattacatatgcccaaaattttggggatggtgaggaggcggccagattcatgcccccacctgcgccatgaggtgccttgcttggaattgtcgcggtctgcggagaccggcggcagagcgggctattcgtggccttgctcaaagagaaagagtgaatatggtgtttttagctgagacgaaggtggatagtatggctaaggtaagtagtatgaattgtttgggatttccgattgttaattgtattaactcagttggtattggaggaggattttgtgttgcgtggaggcaaggaatgttaattaacgtgaaagatgtgttcgattcgggtttttgtcttcgggttgaatctttggatggaggccaaccttggtttcttttctgcatctatggaactccttatggaaataagaaggctgaattttgggagtggatcacaggtattattcttgcatgtgagggaccgtggttagttattggtgaccttaatgctattcttaatgcaaatgaaaagcagggaggaagggagtttactgctcacgaaggagattatttgggaaattttgtcaatgactgtgggggaattgatcttgggtgtattggctcagcctttacttggtacaacgctagagaagctcgggctcaagttcgtaaaagactagatagggccattgctagtccggattggtgtgtgctgttcccttctgctagagttaatcatcacccgattcttagtcctcatcatgcgcctttattgctggacactcgaccgaatgaggttggactcaagtatcccttcagatttatggaggtttgggcctctgatccttcttttggcactacgatagacagggcctggaatcaaccatgtgtgggaagacaaagctttcgtgttatgagaaaactgtcgtggacaaagaatgctctgaagacttggaatcgtgaatgtttcgggttctgtgataggaaacttcatactctttgttgggttttatgcc

SEQ ID NO: 387071 - DNA, 1056 bp, Cannabis indica
tttattataaactttatttgttttaggggattctccgcaccgaccccgccccctttaggagatttttcaccctattcccgatgggcaataagcaggaatagggacgggggagcactccccgccaattccatgtccattgtttatccctattcgtggcctttgtttgctcatcgatgccaagaaacgatcaagcttgatgggtagaagcgtagttgatggatgcgaaaaagaggacagagagaggttcagatctaggtttaatgatttttttcttccttttctatttgtttcttcattttttgtttattagattcagatctattccaatctcatattatttgtaaatttcattttgtattttgtgtttgaatttgagattgagattgtttaaaatacattgtggtagtggcgggaccgtaattgtgatgatggtggtggtggtgagtggtggtggttgtggaggtgttcttgtaatggtgattggtggcgttcatggaaatgatggaagcattagtagcaattttttttttaactaggattaaaaatatctgatgatggaaaattttgtttttaattatgtttacaatttaaaagtaattttgaaaattaaaactatgaaaataaataaaaaagttataaaaaataataaaattatttggatcaataaaaagtgtttcgtatatatatgtgtatatattcacaattttagttggcatttaactttaaaacttagaggggcttaacccttattctttttttttattatttgataacatatagggtatttttttggtggggtgtacgaaatagcctcaccagtagagatagaaatttataccgcggggatggataattgcggggacccgcccctaatgggatggagattccccgtcttggtggttaatagggcggtggtggaagacaatttcaatacccgaaacgggaatgaggcgggagcggggataatactatccgcaatatatccgaccccgatatagatatatataatttcttatgtattcttaacatatataatatatattgttgggttttatg

SEQ ID NO: 387072 - DNA, 872 bp, Cannabis indica
attattttttcacgttaattttgttttctctactattcagttattgttagtcttactataattagggctatgtatatctactagtaaacaaacccgcacttttaaaaaattttaaattatatatataaaaaataaattatattttttatttaatcataattaagtaataaattgtatcaaattttaatatgatttttcatataattttgtatgaaaaattaagtgtgtatagacacaccgatccaactcatatttatattttttattataatattattttattaatataagaaaaatatttacttcataaataaatttttaatttttaattattaaaaagtataaaaaaaggagaatgtcgtggtataccgtacccactattagtagtggaacactgtagactcctatcaaaatataggataaattttaaggctcgattagagtattttgtaaggaaattataatatatatatcttgatcagcatataaaaatttacaataatgcaagatatgtcatgagaatgaaaacttatacctggtagaataatttattagggtaagatataattggagaatgatctaatttctagatttagtttacaaaaccataatttatatttataataaaaatctataatgctacttaaaaaagattacggtttatatacatatacagtttttaatatactagatgagagttacgtggcgagccacgtaaatattagttttatataagttctagtggtttttgtttaagaattcagtaactaagcaacggcaacaataatggtagatagatctatttaagtttttcatatttgtaaagattataaatctaaacttttaattttcttgatttgagattttgaatt

SEQ ID NO: 387073 - DNA, 973 bp, Cannabis indica
ttcttgggtctatcataatttgtttaactcattttgctaaactaaagggcaaaaaatgccataaaaacttgctagattagattgtaatcccaacagatacacaaaatgttttctaaattcaagcatattatgaatttaggttgagcaggcttttcaagcagtggtggaatagacatcattcccaataatattgccttttctttccatttttatttttctttttaaacaaaaaaaaaaaaaaaaaaaaagaaattaattatatttgattaaactttgattttaaagtcactttcaaggaaatgatcataatcaaacataacttaaaaacatgtctttgagatggtatcatatcatatgattcgaagtccaagtgagacgtaagaaaatgaaagtaaatcaactagaatgaatgattatttggtattatgtgcccatttaattcacatatttattttcattaattgttttcttttataataaagttgccatttttctttcacttggttacgtttggtcacagattgagacgtgtggccaaagttttttggcacaatcgtagccacaattaggactgtttcatgaaataatgaacgtaaaattctaacaccaccaactttttaataaattcttcaattagagttgggtcaggttcaactatgccaatttgggtacccttctttttacaaaatgcttagcccaaaaatatacaatgccacattataatgaaatataaataaaaaaattgagcaagcaaagtacttatcagcattgccattagattctagtggtgcctactaccttctcgacatgttccgttgcgattagctagcgatactatctaagaactattatactaaactatatgagacccgatacttagttggaccaatagcgatattgatgacagtatcattggtgacctttagcatttctctattttattttattttattttggaaaatttgattttcta

SEQ ID NO: 387074 - DNA, 868 bp, Cannabis indica
atgatggtttctagttctaaagacaaaagacccatttacggagatatgtctttttatggaacaatcaatgaaatttgggagcttgattacactagatttcgagtggcagtttttaagtgtgattgggttgacagcaacaacggattcaaagaagacaaaatgggttttaaacttgtgaatttgaagaaaataggccataaagaagatcctttcattttagcatctcaagcaaaacaagtgttttacataaatgaccccatagacgctagttggtctgttgtagtctctgctgaacctagaaacatgagaacaaataatgatttaattgtagaggttgaagatgttgaggaacttcaattaactgacaaatcattaattgatcttgatggcttcgattcaagagaagcaacaataggatcttattatcgaaatgatatggatggcatatggattgaaactacataactaattaatgtaatatatgtttgatttatattcgattttcttttaatttaagtatagttttgttttgttatggcagatgaattaaaaatgcatatataactatatataacacttatgtattggattaccttatgcagagacatggaagatgacgatgataacacacctgtagagaacgagacaccttcagaagataacacaactaaagaaaaaagatttagaggtcaatcaatttgtaaagaaatttggaagtggaaaagtaagggattaaaagttcctcttgaatggaatgattatggccaaccaattggaaagcattgtgctatgcttcaaacttatcttggttatcttgcacgcacacaagtacctatagatatcgttgattggcctagtgttccatata

SEQ ID NO: 387075 - DNA, 2105 bp, Cannabis indica
cgcaagaggagcttggggacgacgattttgccattaaatttggcaaggagacaagagagggagaaactgagtagaaggaactcgaaatacggggttaggttttcgaaccagctacacacccttcatggctgacgatggagcaaggaatagcttggtggtccaccattgaacttagtgagagaactcgagcccgtgaaaccaccattgaaattggtggagcaagaagttgagtagagggaactcgagcctgttgggactgtcgaagccgagagtttgaggctactacttgccgacgatagagaatagttgtggcttgcctgagaagaaagataaaggaagagagagagtacgaggaagaaagagcgtaagggaagggaagagtggggaaagatagagatgaatttagggtttttttttatttttttttaattaagttattttaacattaatgttttttttttaactttttattgttttaaataatttttagataaattttttattttaatgaattttgaaataataagaataaaaattaaatgacatgaacctagcatgagtttccttaccatgtaggaatcgatttaacgaccagatatttacggaagttctacactaataataaaatgtatttttctgctaaaaatacaatttaaatacttatttactaatcaacataaaacttatatatttaccctttaaatttccctaataattatggccataaccataagaagaagcctttagataaagaaagggtatgatttttatttatttagacaacatattcaactatggcttgtcaagtatatatatttattaaatattggtacaaattaatggtccaaaaagggaaaatgagaaaatgtcagtgtcccatagtgatttcccaaaattgccaaccaaatgaccattatcggattgggttgtttatagaaaatcttagtaggccccttattaaaataaagattaagtaaagaagatttgataacatctcaaaataaataaataaataaataaacaagatttgatattgtcataactcatcatgactaaaacagaagaaaaagaaaaagaagtggtagttggtagatttcaagtcctttgagagatgtggtatttttctgtataatacgaaattatgtgtcattcattgagcaacaatttaatataagttaaacatgtaatttattaactaaacgatacccaattgataagacgacaaataccaaattccatgttatggactgctaatttcctaattaataatttatatcagatgaaaaaaataatcaataaaatttaagaggtatttgaattaatgcatttttttcttcagtagtttatgaacgcgaattggtatatttcaaaatatctgttaaatgtggtataaaatattgaaagttggttttgggaacacgtggtggatctgaattaccaaaattaccctagtcactcagtaattactaattgagaaattgctgtaaaaattctcaaaatgttcactttgatacatgtaagtcgttaactttaaaaaatagcggtaaaatagtccaaacttcaagatttttgtaagtctgttggtctttattttaacatattcgttagttactctaaaaatatcacgtgttgatattaaattatggcataagtctccaaaaaattgatacagataaatttctaatctcaaaaaattgttttaatagctctaagcttaagattctcattagtccgtaggtactcaatttaactgcttcgtttcgcttgttgcttccaaaaatactacgtgttaatatgttattggtccaaactataattttatgtaaatgtaaataaataaatgaataaataatttttaaaactaattaattaactttatttttttttttgtctttctatttttttttctttcttcttcttcatctcgttcacacaaaatcccgatctgctctactacgtacgcctctttttgtattagtagcccgtgttattagatttctttcttagttcaaaatcaaaatgtcgtttagaattagattacctcttaactatgtttagtaataaattttaaccacttaataatttaaaaaaaatatataaaaaaa

SEQ ID NO: 387076 - DNA, 583 bp, Cannabis indica
aaagagtctcgatcaaaacccaatcaacacaaatcaaaatcttcacataaaaagataagagagagagagtagggatactttgctatggctatttggaggcgcgttcgatctccactggtgtcttggcaacgatagagagagcgtgaagaccagagttaagctcgtctgcaagagcatcgtagaccaaacgatgtcgtttgacaaggctctgaccttcgaatttgggggagacaatcttgagattgaaatgagtctcgccggcggcggcgttagggttggctttgacggcggcatgaccagcgtgttggtaggaaacgtcttcaatctcaagaaggcttgcttccaaggcagattggagctttgacctcatcctactggctctcgttattaatcccttgcccccaatcgacgccatttttgtatttccaaagcttgcttctcttgatgatgataactcacaatcgagataaacaatcacaattctcgactggatatttgattttttttaaaaaaaaaaaaggaaaagaaaagaggttgcggtgaacgtggatcgaacacgtgaccttcagatcttcagtctgac

SEQ ID NO: 387077 - DNA, 1599 bp, Cannabis indica
gcaggcccgagagacaccttctagcaaaaagccatgcttattttgagcaactaaactatgactgtaaccttggttatctccataaattgatacatcaacatttaccttgacttcattagccttaggaacacaccaccactcgacaccatcacctggttctaaaccagattgaaatggctccatttctgaagtttgagcagctctccaatgtgcaagataactactagcgaatgcaaaaagatacggaatatcaattgactttttttttgccacaccttgtcatttctcacaccctaaattgcccaacacagagttgtaatgagattgcatttctcagctggtggcttgaaaggaaatcatacaccagtccaataatgtcataccaactgctatagtagttgttacccctgccatttcccaatactgactcaccaagggacaagtcaccaaaatgtgtaaggtaattttatcgtgaagaccacaaattggacacaaactatccataaccactttcttagttataagcataaccatagtaggtagacaattcacataatctctccacatgaaattttttatttttgggagggattttcaatctccaaagctcattctaaaattcaaaagttttttgttatataccagtagtcgtttaatttctgcaacaagttgtatgagctcttgacaaaataaaagtcactcatatcatgaaaccagtaataagaacttccaccagggttttgatgaaaggggatactaacaatggttgctctatctctctcgttaaaaagctcggctaataggtccaagttccagccaacaccacctgattgcatcaagttctcaaccgtagcagtaacaagaacagggttagttgatgaaatgaagggattatcctccaaagacagccaaggttcccctagaacagctaagttcttgacatcaccaacttgccatcgaataacaccatgcttgacaatgttttgagcctcccaaatactccgctaaacaaaactcgaattgttccccaactgagctgaaagatacgtaccttaggggtagtaacgggctttgaaattttttgaagctaaagaatgggatcgaaccagaagtctccacctttgtttgccaagaaaagagatgttatgatctctaaggctccaaaaactcatgctcccaacactttttatgcatgacataatttatcccaagatatccaataggatgcccttctctttagaattggatgacttacaccaaattttgccatatgttgctccatatcttgactaacatcaaggggaagaagaaatacactcatggcataactcggcaaagcttgcgccactgttttgatgaatagctctttactcgctttagatagaaatttagagtcccaattgaggactttcttgcggactatttcctttaagtaatccaaaactgagtttttattccttcccattgtacgtagaaagtctaaggtacttgtgttgggttttatgtcctaaataaaactatttttcaatgtaatctttattctttaaataccaataaagaaatagaagtatttatcactcatttgtgtgttatttggtt

SEQ ID NO: 387078 - DNA, 1235 bp, Cannabis indica
aattctgttaaaatactttaaagtagaaaattgaaaaatacaattttgttacatacatttcttaaatataataataatagttggtaattgatttgtgattgtatagcacttgtattggttgattgttagtgaaataaaattcttgcttgcttataataataatgataatgattgaacttttatttctttcaaaataataataataatgtatgcctgaaagaccatcttccaaattatttaaagaaatttattttacgatcactttattattgtatttaatttatttattaatttatttttattttttttttgaaaatgtcgaagcacttcattaaatcaagcaatttgaccatgttggataacgaaagaaaaatgattagtctaaattagaaagcaaaagcagcaattcttttatatgtcaattttttcagttagtcttccactaactcttgtatagagaagtaacaatcacttttgatcaatttttaagaggtgttatatcatattattggtctaatttattaaaatattattgttagaatttaaactatttagcaattataggaagggccaaaatttaaaatgtcattacataaaaattactttaatctaatttgtattattttatattttattaatttttatcaaaattttgaagtctcacttaatataaaaatatatgatcaacgagttccattttatttctgacttccataaaaatgatatctagttggaattattttggtttcacttcttataagttgttaccttttgctttatatatatgaaaaatgaaaggaaataatgaatcacactacaataattatgtagctagtttgaatgattgggtaatcacaacgagttatgttgaaattaaccctataaaagtttgaatgcataataaagaataaagaccacaaatgtatgatgatgtagtgagtcattattttgccagtcattgaaggtaatacatttcagcattaaagaatgaaaacgacgttgtatatctattgagcattgctattaggcaccagtaatgcgtagtaccttctcgacatgtcgcgttacgattggttagcgatacttcctaaaatatattatattaaattatatgggacccgataattagttggaccaatagcgatattgacacataggagtgtgctaggcaccactagtgccctttagcatttctcatatctattctatataaaatgtgcctatataacataatt

SEQ ID NO: 387079 - DNA, 1404 bp, Cannabis indica
aatgactattttgccccttctcaaaactaactagtcacaaaaggtcacttaggggtattttggtcacttctagaattccgactaattctgacattcccaatgtctaactatattgccccactatactaaaaatactaggatgtgattctaataggcaaacaccgcgtttcaatattgtcgggcacaaattatgcaaaattatgaaattccatatatgacatacaaaatgcattcttaattcaaataaatctccataaataaataattcataactaatatacatatttcataattaaaccctaattatctgctaatttttaaattaaagctaagtggtatttacatcgaatatcgagaaaacatgaaacatgggttttgaatatttccaaaaacggtaagccatttagaaaaagggttaactatttttggcgtttcttggtaggaaaaaaggttagccatttttccaaaatgttggaccattttctaaaggaaatgggaaccctgagttttacacatctcgaaactccaccaatacctatctaaataattccaaactttacagaacacttacatagcatccgtactacaatccctacgtaacagaactcaaaatcatgcccttaaacaaaaagtaccattaaagctcatgctttgagcttcaaaatctcaaacttggttcctatttaaaagctacaacaaaaccatcaagtaaacatcaaaatcaatcccatgacaccccagacacaaaaccataagctcacagatcccgctacagctccaaaactcaaagtcaactcttataatctttacttttcaaaataaaggaagaccaaatctcttaactcaagcttttctccttcaaggaccaacacctagctgctacaagggttaagaatataagctctaggctaagaattgaagaagaaaatttatggtggtggtggtggtttgatcacacgaaagagagagtgagggtgtgtgagagttgggtttctaagttattatatatttattctaatttatttataacaacaacaacaacaataatgataataatgagataaggataataataatagtaggaataacgataataatagtaagatgataataaaactcaattaataaaagttttttagtcatttcttagccactaagaaatctctaatcctaggtcattaagtcaaccccgagtacctctaaataccctgataaatctaatatcaacttaccatagcactcctattacaactcctaacttaaccttttgtgatatttttaccatgatcttagatctacactcttacactaagaatttcgaaatatgaaggaagaagagagagagagagtggcggccaaggaagagagagaaggctcaggttttttctgattcagaagtgtcag

SEQ ID NO: 387080 - DNA, 1628 bp, Cannabis indica
gttagtacaatcaagctatactagcgaaataggcttggacaaaaataaatatattcaccatccattcgtggacaaagtgctagaaggaccaaatattttttacaatatagcctttttagccactaaaggcttcatccatctcaaacatggcatgctattattttggggtggagaaattaaaagattgagaagaacaatacataattgtgttaatacaagggcgtatgttgatccatggatcccacgaccatcttcttttttgtaacttacaaaggaaccgtctagtcttatatttgtgtcagaagtaattgagcaactgggaaaatagaatagagagctaatctaccaaattattattactcctaactcataactcatttttctattttattagaatatttttatatattaaatataaaatcataaaataattttacgtgtatgaatataaaatattcgttataattgattccaaatcaattatttgataaacataaatattctatatatggccaattttcgactcaccacttaatttatttcccaatttgatttttcgaattcattgtcaaaatattttgacaataaatgtgacacgaatactgatggagtatctcacctataaatataaggtatcggtccttaagatccccactcattctatattaacaacaaattatatctaaagagagtagagagagcttagaagcatgattacccacactaactcattttcttttcttttgtagatctaaagctcgtatgggattgaaggtcaaagaatcaatggctgtaagtattttgatctctttcatagtttgcatatatgttcgatatatttatattattctgaatttcatatcaattatatatgctttattatttttatataataatatctaacagttgatattacagccattttatctgtgtcttgattatttgagttttcggtgtaagtgtatgtattttttttactttgtctttggtttggccatgaccgattaatgactttttttagtaaccctccagtctgtctatagaagctagctatagtttccccatttactgtttcgtgcagaagaaggaagtcactctcctcaaatctcggacagagaataatatcaagttaaaatagaaaactacataattgaaggtcaagtaactaatatataattaattacatgtaataataggacactgtagcaacagttgtgaccgtgatcaacatgtcaagtcagcatacagtcactgcctcataggctgggctgggttgggttttgcttgataagcccaaagaaatgtattatctgtaacaccccattagagggaaagggtaactaagtatgacctctatcactctataaatatgcattgaatccttcatgcaaagggtgagactttcttaactcacaagcttgaggagagaatagagtgttcatattcattgtaatcccttatgcttttctagcctatttgataatgatactgactcgtagactaagactcattgatgccccaatcacgtaaaaactctgagtattttactcatatttgattcttttaattgaattttatttagttctaaatattaaataatttattttttaaaaatctcggtaaacatt

SEQ ID NO: 387081 - DNA, 1030 bp, Cannabis indica
tataccctgatggggtggtggaattatgtgatgcactttcaggaagaaaattcttggtgaaaggccaaggagtaaagtttagaggtggttagatcaaccgagcaaagacttccatcactttgaaagatgcttgaaggacttcgggtttccatggccttaatgtatcacatttgggcccccaagaatgtattttctcgtatgaagaagtagctggacaatgagaaacattgttggtactatacatgtgtcattcaaatttcaccttaaaaaggatacacctagacaaactgtcaggaaaaaaggtatgttcagaggtggggcgtgcacaccaccatggtctgacataggggacaagatctgattctctatcagaaaaagaaataaccatcactgggttgaaatgggtctctcttcatggttgacgtctgacttcctttatgcaattgcgtccgtgttagattctttgagtgccttccaggggtctcttggacatatgttgagcttggtcttctccgaggttctagagatatgacgaggcctctggatctgaatggcagtatgctataggaaaaatccctatatagcccttgggcctgatgtgttctcggatctgcaaagcttctccatgacctgatctaattaagaggacttgattagtgaccgtttgaggttgtgtttctcattttatgccacgcgtccttcatccaggattacagttcatttagtcttacctttaccagtaaacttaggccttcagaactgcccctgttcttgacattactttgatcttaaagtcttttctcacttcagtagtagtcctggtaatctttctaaacacatccagaaaaatctatgtacctcacgtacattctctgttctactgacaaccccttgatataaactaccatactaatttgtaatgattctctcatttccattgctagttcattgaaattcaggattcttgaactcctctccgaaaattaccaccagagtttgttggaaatattaccaggatcttagatttact

SEQ ID NO: 387082 - DNA, 556 bp, Cannabis indica
ttttttttttttttgatttaagcctgtgaatgtttggaatgtaaagacaaaaaaaaacaaatttatgccgatatatttcaaaaaaattataataataataataattaaaggtgcatgccgactgccaaaggtaacatatgtattccctttatttctccttaaaacagatcatctggtcaaacttttcaaattctagcttaatttgtgggtatgcatgtgttgagtgtagaagaatatgcatgcatcatattgatcataaatatatatacataaggattataataatatagtcaaggcgaataaaaaatgttagtcaaaaaggatatatagttcttatgagtacattaaacataggtagagattttgctttcaagtttgagcctataatagtaataataggacaccatatagtgacactactacaaatatgggctttagaggcggtttttaaggcctttcagcgtcagttttggcaaaattcaataccgacgctgattcggatgatgctaaaggcgaatgaaataaccgtcgttatagggaccctatggagtcggtt

SEQ ID NO: 387083 - DNA, 1129 bp, Cannabis indica
atacccaaacccagacttcgacccggacctcgacctcggacgttgaatcccaaacccaaacccagaccaaaacccaaacttggatgtcagacctcaacctagactcgaacctcgatcctggactcagacccagaaccagacccgaacccggaacccgaccctagaccccaaaccccagactcgtacctgaacctgaaccctgactcgaacatagacccagacccgagacctcgaatcgactagacccagacatcagacctagatctgaaccccagacctgaatctagaccccaaactcgaaccagaattcagacctgaagccggacctcgaacccgaccctaacctagaccttgacccggatccaagacctggatcccaaatatggacctggatcccaaacctagatccaaaacccagacccagatctggagcccggactcagacccagatccctaaccccgacctagaccccagacctagacccgaccaaggacctcggacatatccccgggttttggattcgggtttgagtttgagtttgggtttggggttagggtctagggtctgggttcgggtcgaggttcggggtcagggtctggggtccgggtttcggtctgggttcaagtctgggtcaagtgtctaggtctcggtccgaggccaagtctgaattcgggccaaggtccggttcaatcgggtgtggagtaggatggattcatgtcatggtatggtgtagaataaagaaatttttttagtaagaaaaaatctaaaaataattttaaaaaatttgtgtcaaataccattaaatttttaaaaggacaaaaaactattttctattctcaaatttgaaaatacaactctaaaaactaaacttgaaaacacaaccaaacaacttcttacattttggcttccttcatttttgtcaagctttttgctgtcagtcacaaactcaatgagaattcggtgcaaacagctgggcatacatgtagtcgacaatcaagactaagcctaataatagggccatattagcaagtgtcacgtataatattttaaagtcacaaatagtactgaaattcatacaaaatattgtgagtcaaaataccagtaaaaaaccaacagcaaacaaacaaa

SEQ ID NO: 387084 - DNA, 1188 bp, Cannabis indica
aatgataaatatttataatataattatcttgaattactaaatttattttcataaagttaaattcatcaaaaggaatcttaaattctatttcttttgataactagaaaaattatttcatttggtaatcattaagtttgatatttaattataagataatttacggtcaaactctataaatttttgagtttagtacaatcaatccccattattgaatttttgggataaaatttctcaaatttcgattctgttttagtatccattttagtttgttaagtgtcaaagtgaattatcactgtgtacaaaaatgtatacgtgacaaatttttgttagtccacctaatatgaataatttaaatattataataaataattaaaaaatattataaaatttaaaaaaatcaaaataataatttttttcttttttcctttttcttttcttcttcctcaaatcctctctctctctgcttgcagcgccagggccaggaagccctcccctctcaccttaggtggacctccgatcccttttctcgaacctgagaaccctgaaccaacttccctttctccctattggtgatctcgttatcacgtcatcaccaacactgccaccttcggcaatgcaacctgagaactcacagaactcgaaggttccttcccccttgcaaatcccgacgtcaagcttggtgtggagaagaaaaagaggagaagagaagagaagataaaagaaaagtaactattttttaaaaaattattttaataatttttataatatttaaataaataaaatgacatatactaataaaattatgtcacgtgtacatattttttttaaatgaaagaaatttctcattaagcataagtcaaaaatcaagtctgaagacttacattaacttcgataatcctaaccaccaaactctcctatcatcaagacaaagagcaagtttggcaagactatgaaccataaaatttattgagcaattacaaagtaaaaacttagaaacattaagattgtgcgtttggaaaatcacaatgtaattggatttgtgtgtaattagaggtaattacacaatttggtatgtttgtctgtgtaattacactgtaattgtgcaattggaagtaattgaggagttctaattacactctccaattctcatggcccccatgagaattgaatgtaattacactgtgtaat

SEQ ID NO: 387085 - DNA, 1378 bp, Cannabis indica
ctttagtttgccctttcctcacaggcttcttttctcgtccacgctacacatcacaagtcatctcagtggattaaaatgctcgagactgagcttcatataaaaccactgctttcgctttcaactctgatatggaccgtaaaaattaacaccacactcctcacaaccaattttgttcttcacgcatgaacaaaacacagagattgatctttactttgtatgggataaagttttatgcaaaaagattcttatccatcatgttccttctgatcataaacttgccgactcactcacaaagcctatcttcaactctaaattttcttttttggtatagttttctccaccacaataagtttaggggcctattagtatatagctaccaagctgagttgttcagcctcctaactatttttgttaatggtttagtttagttagctggttgttatttctctagtaactaagtctattagttgtgcattgtagttggcttagcttgtatataaactgttgttatttttttcttgaatcaataaaagaaagtatcatttctcttccacattctcaaactctacactaataacacatccttagtacacattagagagaagatcaatatctaacatattcagatattcacaataaaaagatatcgaaattaagaagggtgtattgttgagaaagtagaataggatatttatatggtaagacgtatgaggctccatattaaaattaattagcaataatagaagtagcccatgtactttatataaggtattaccttttcatacattaccaatgtgagattttttaacatcctttcaagatagtgcctattttttgctcacctattttcgataactcgatcataaatggagcttctggcttacggaattagaagcagctcttttaactcgtatttttggattgtcggtacttttggctcacaacgactctttttggctcactatttccaaattactagtcactcttttggcttatcttttcagacaggttactaaatttagatcagatactcgttagagtttatttgactctgatactataatagaatttagaagtgagtggttggaaaagtggaatatgttgtgtgtgtggtaaaatgtatgaagtaataattcatacatatgatactatttttctagccgtggactctctaacaatagagacatgaatataccaccaactattattgtacacatgcaaagggattagaagcaatacatgatttgaatccagggccgattctaagcatagacgggctaagcctgtagggcccacaccttttgggggcttaaaataaaaaataaaaaaaattattaggtttttatttaagtaaaattaagtgtattataaacaacaa

SEQ ID NO: 387086 - DNA, 1331 bp, Cannabis indica
tttccttgcgaaatcattcatatcaacttgtagcttttaaagttgcttactaaatttttatccatttgtagcagttccttggagaccagttcctactctagagatagccgagcgtcacaaaaccttactgagcctgccctataggttacaagatgcatattttttgctaaatgagcagaacctaaagaacgttggcctccttgcatcagacgaatatacttgcgattataaaatacctaagtatacctcgtggcaaaaggtccccgtcccagaagaagaagaaagtgatgactttgtggctcgcgcacactatctcaagagagtccctcctcgggtagatggaagatcctgaggtaatcaatgtgggtgttcgcccacagtgcttagggccgaacgtaataccttagtctcctttcatgatagtcagtataattttttcattttgaatcctttccttatagatcgcatctcccataggttcgatagttggtacccacatttttatgttcaaattagctgtaacagccctttctatgggtttgctgaacagtatggaaccatgttggatagagcaagtcacatagattcaagctgggacttagattcactaaactcttatgacatatttaggatcacagaatctagagagtttagtgaatattataatccttcctctccatcctctgaaaaatatggtaaccctcctaagtgggagttcttccacatgcttattaattttaacatagtgttaatgaatccttcttgctttggagatatggacatagacttggagaatttgttcaaaagtcctccccaagccgacaagagatccaagaagagggtaacctaagctgatgaggcctcagactccattaaggaacccaaaaggaccaggaccaaggccaacaagaaaaaatccttgagccagcttactatcgaggctgctaagtctcccgatgcaaggaatgaggtctctgctgcagggattgaggtctctgctgtagggattgagatctttgctgcagggaatgccaaggaaaaacccactaggtcggtgcaccaagtgaggtggttctcctcgagccttcttgtcctctacccccaaagttggaactgaggggtcacaactgagctcgcagcatactaccaataattggcgcaatctcttgacgcttggatccagcgactgggatcttgctatccgaggcagtactaaagacttcgccaaaaaaagttgtgagcttttgcattaggttaatcttctgatttcctcgtgtctacttttccttattttgccctctttactaactttagtttgccctttcctcaca

SEQ ID NO: 387087 - DNA, 858 bp, Cannabis indica
gtagggtcgtattcatgtcatatcaaaggtttagagcatttctaataaaagtttgcccataaagtggtctttgttacatgtatattttagtcaacattttcaaactatttatgaacattatagttcaaaaatgagtaatggtaatgtaatattatttatttttttaaaaaagaaaaattactttatcaccaatcaattttttgagagaacatatataattataaaaatttaattaaatattagtatgtgagaccatagtaagtaatttttagagttacccaccactaacgtaatttttagtagaaaaaatgtgttaaatcttaagggaaggagagatcaaataaataaaataatattttaggatgatgtgtattttaaaaactaggtgttgacagagacaaaacccaatcatactaatgtgggggctatcactaacaaaaatattactttttaaaaaattaaatgtaaattttttaatttgataattatggactaaaatagtagaaaaatacccccacaaaattaaataaatctagtaataatgattataatataagtataaatatttttttataataaataagctcctacaaattaaaaattttgggtctctgataactcgtattgaaaatagagttatttatatctttttgggcattaaattagttttgttctctaagtaactttttagtttattttagtgactttttatttggttttcttttaattttgcataaatattaattttagtattttgtaaattagttttaattaatttttttaatttttatttgtttatttagtctcccaattaattaaatacaattgtgtgtgatgttgtaggaatttaaatgcaaa

SEQ ID NO: 387088 - DNA, 988 bp, Cannabis indica
actaaaagtagctatttttttttgtagtggaagataattcgaatcaattcttgaagtagttgtttgatgaggcaactacacagattccattggatgaatctttggagaagattttggtattattggaagagattttggtgcagtactatagtttattattggcattggctgaacatatatataaacaatggtacaatgatcatataattatttacgtagtgaaagttattaataataattagtaaagctgagattatacacaccgggactataaaggaatttgaagaaaatgcatcatatttgtccaagctgcaccggttttgaagctgagaaaattatatcaataataaatcttattatttaatgactcaatgactgtacattaattaaaagctaattaataatttttcccctgaactttgacatgtactaaatcgtgctccttgaattttttttggccgttaaaaattctccctaaaattttaccaattagccttaattaaaataacaggggtcttaattaacaagtgacctgatctgttggtgttggtgggcaagaaatttgagacataattagattgtgatttgaatggtcaaaaatgctctttctgcgttttttcaattcttcagaagcattttgcctcttgaaatatttttgagcatggctagcaacttgagtaggagttctagtcttcacatacttggttgatattcctctccaatccccttttccaagcattttcagtcctagtaaaaatctttgatgttcctcaccattccattgtttgactgagaataattcaaattcaaatatataataattaaaaatcttctacattcttttcaagctataatttatgcataaggaatactttaaaataactaacattctatatagtggcagagcaactacatcttttagtgggggcaaaatatatatttcataaaaaaattattgaaaaatatagtgtatgtttggcatcataac

SEQ ID NO: 387089 - DNA, 1117 bp, Cannabis indica
tattatatattattgaatggttattgaattaagttaaaaaaaaaaattggagggagaataaaagagaaagtggtcccttgtaatagcagcagtactgtaccaaccgaataggagcatagtcataatcagtattaaattgaaaaataaatgaaaggtactgaaatgtcatagacttggctatggtgtgaattatgcatgattaatgacttagaatagagagagagagagagaagcccacacccatgttctaaggcctagaaaaaaagcttctctgtttttatttatattatataaaaaagaattgcatgttttgatataattaaatttaattaagtgcatgctataaataatatatttattatttattattattattattatatacggcttcgtccggccatgtccttagtcctgtgcctgtctgtctatatattttctcctccttgcttaatttcctttcacattaaaattggtacatggggccgtacgtacacagtggccacaaaacaacacgactttcttgctgctatagtttcaattaatatttcataaacacgtaccatatattatattatagtatttctctgtttggtttaattgcaaaaaggaaaataagaatatctctttttccttgaactcccaacttatttaacaagcccatcaacaacccagatgagaaatttacatgatcatcaaatcatgttataatgtttcctatatttttatataaatagaataaagttgatagttgtaaatttattagtgttgcccctgattttgcccaatatacgtggaccaaccaaacaaggacacgtaaatccaaaaatatttgctaagtctttatgccgtaaggcggcttccaggacgtagctcccggagaaggtatatgaaacctcatatgctcccggaagctcgaagtaacgttaaggcatctccgcgaagtgtcagatttctcctgagcaatcaagtcgcatttaatgccgcatgggaggaagcgtgttggggctgctacacacaataaagtctgacagcacaacctccaaccagcagctacaaagtaatgatcatttaagtctagcgacggctacactatgaagagtcacatcagtcaaaagac

SEQ ID NO: 387090 - DNA, 789 bp, Cannabis indica
tcatcccaagttgacccttttgaagataactgaaccaaaaaagaacacccaatcaataataataataatataaaaaactaataatatatacatgtatagtcatacataataagcagtgactgttccagctgaattgccaggtacaagtttgatttgcatatcaatttttccaaacaaatactcttttttggattgaaatccagagcccgaagctttgtcaagtgaaagagttagaagctttccattgttgagcatatgagctcttccatttccccaagtgatttcaaactcttttcttaagtcatcaccataacaaacacctttgtttatggtcatgagaataaaaagtagtgacactaaaataatattatgatgaatatccatggattaatatatatattatatgtgttatgatatgttggtttgtgatgtatttataggttaattggaataataatatgtgcatgggatggtcaagaggtgaggccaaactattcttttaattacatgtagctgtggacagttgtttggcttgtgagaaagtgttaaaacaatagctgtaaagagataagcattaataagagattgagaagaagaagattataattattaagctaactaaccccattaattgttggtacaaagctataatctttttctttctttcactgttaatttagatgtgatcaacaaagtaaaggctttgctattggtttactaaggtgccgtttggtaacacttttttaatcagttttctgtttttaaatttgaaaaagtgaaaatattttt

SEQ ID NO: 387091 - DNA, 1251 bp, Cannabis indica
gcgaagagagagtcctaccatcatgagggattcaagatagaaagagatagaaagccgaaagatgttcacaagggccagaaaggctatgtcataggaacttagaccacctatgcactggtaaaaaaaaaccacctcgatcggatcaaagtaaaataaatgtcaaatcaggccgcccttgccttgaaagaattcacacgcgaccaccagcttttccaaaattaggggagatctgctgcttactactcacgaaaacattcgacctatactatagtcacgtcgtccgcgtatctttctaatctcctttccttctatttctcagatttttagctttgactaatccaaggtgaaaaatggggttggctaaaaaagggggagagaggagtggggtatgctcacttctgcatttttgtttaggttattgattatcaatcgctctttctagtggggaggaatagtgcatggatggcggttctcagacaaggcaatccttgctctctaactaaataatatgctagaatgcttccgtatcatgggcagttggatcgaaattcgtgtgatggttcgagagtggtttcaaatattctttgcatacatcttcgacctttcctattgttggagaataggcctactagttcctgattccatgttaatgtatctatatgaatctaatctctctcttcattcatcttgagctgtccccgcttagtggagcgcgacccccaaagttgacataggcaatgaaccgcaaaaaaaaacttagagtccccttttgggcttaggttcttcgatttgttcaaacaaaatgagagacaagaaaacatctttgacttctatgtctagatagaagctatagattccatatctatggttagcgctcccactcaattgtactatcatgctcccaagttgtacctgtgacccgaaccaaattaaaggctttgactaacaacttaaagaacacaaataatactcttgagatcgaacctaaccatgtcaggattaagatcttttgatctaagatcaaccagtgatattgacttagaaagatacaacggtaaaattataatatctttactaggatcaatatcggtcccagtccaatgtatactccatacattcgatactagcatactttgccattgttctagaaagaacataacacttatccaagctgtaagtaagctttatcgttgactatcacatcaatgtaaatccactacactgatgaataatgggacattaacttttgaa

SEQ ID NO: 387092 - DNA, 1671 bp, Cannabis indica
tgtattgtatatatattaaatattttgaactaatagttctattcaatattgtgaataagaatgagataggagagtcattacaagaaaattaccctatctcggcggataagaacctatgagatagacctatctcagcagtcgtcaaccgttgaggatttgaccatcgacatagagatgatgacctatctctacggttggtaattgttgagatagggtaccctatcttggcgattcaaaatataaccacagagataggtgtgccacatgctcaaatatatgtgcaatgtcaacgctggaacccccaagatagcgtagcaatctcgacgattccttttgaactgtcgagattgctacactatctttgtggttaagaacccataagataggttaatgattgcagtttcttaacaactgccgtaattgattttagaaggaaaaaattattttctttttctaaaaaattttcccaacattagtattcatgatatgtacaatattatttcataaaattcataatatatcaatttacataggttttgttaatggttataagtatgacaactatatgttctaactataaatttaggtaaagattatacttgctagtaaaaaaaaaacaaaaaagtaaaactatactagaaaatactttgtatagtagttgacccattcttcatgtacaatgttaatatcatcctcgtacactcggtcttaccatcacactgccatataagagtacattaataagtttcattataattaaaattaatcaaatttaaaagaatatattaattacttacgtgtttcgaaagatattgttttagatctattgtcatagttcaatctctcattaactgtataatataaaaacaacacacaatgtcattaggttgcctaagacctacatataatatattgtgtcaatatttgatttatacataaaaaaaaaatgatcaaatgaaatacttgtcaatttcaaccctatactttcactcgaaactaaattattttcttactcttttctcttgaattgaacacctcatttattccaaatggccttaacaatgaataaaatttcaatttgataatataatgatttattaacattgtaagatttacccaatccgaaaactaacatagtttatgcctccataattaaagcataggaataattaaataagtaaaaggtagaactatgcaaatgcatttgtataatattggcaattaaatctagtatatatgttttataaaaacttacaaaatatggaattataccttagttccctatgaaccttgaaccagtgtggatgttgcactactttcaagaccttcaattgtatcaatcatagaagaattactcgaatctctttgactatcattaacataagcaatattcctgatatcggtatgctgttaggccttaggataaataaaaagggtatatgggtcattgtaagagggatattgagagagtatatataggagagtattagaagagttttggggtgtgaatgattttagttaagtgagctcttagctcttgggagagagctgggtctctcgaatacccagcaaccttgttatcttttatcttctatatcaatatatcatctctattatctctattttgctactgtttgtaccggaatgataggaaattcctatcaaatggta

SEQ ID NO: 387093 - DNA, 1068 bp, Cannabis indica
taagttttttctttttcttttttgtgggggaggggagcattacctgttcatgtaagttattttacgtgtaaatcactaaaatacacttgttcatcgctatcatatatatatttatatatatatatatatatccatatataaatttgtctattttgtgcacattccatatgttaatgattattttattttacttttaatttcttattattgatcattaaaataatctatcttgcaactttattattttaatagcaatgtgcctcatgaatgatgttggtccagaaggtatttcaaaaaaaactaccctcgtgcttagtgtctttttttaatgaaaaggtgatattatgaatgaatcaaatcaacttttataggagcactaatatatttaggacaaacatcagtttaaatacgaactcctaacgcatatgtaacagactttgtcaataaatgggccacactatttgcatcactcgaaatggcctgatacgaaccaccatcaataatagctaaaagagaaacaatcatctcctcaacaataggtttgtacaatagtactactagggaatctaacccatttacaaacactcaaagaatcattctcagtcttagacaccgaaaaacccatattaaaagccgaaaggagccccactcaaagagccaagagttttgcaacctcaaccataaaaccactcacacacccaatagcccaggctgcccaaacaacccccacatcatccctgctcacaccaccacaaccaacaaaacctcgacccggagtaacaacagcatcagtgaccaaagagaaagaacaccgcaacagaggaacccaacccctgctcacaggcctcgcacctgactccaaaccataacttgttggaaatattttaccaggatctagatttactaccatgtatgtttcattaacatcctaatatgaattctaaaacaatgaaataaacacatataaagtttatgaaaccttacattggatgcagcgaaatataatgactccttccgttcagatctctagcccttgattccttttggtagcagagcatcaccaagatc

SEQ ID NO: 387094 - DNA, 2792 bp, Cannabis indica
gatgaacctccaaaaactatttcttttatcaatgagaaaaagcaactggtggaacaaactatagagtatgaatggctcccaaccacttgtgcagcttgtgctggtttggggcatacggttgtcaattgtaacaaggaaaagaaggtagtgtggaagaagaaatcagtggctgagaaaactgctcctaaagagcaaggaaatgatcatggggacacagggaacacttcagaaaaaaatttagaagctgcccaactggaaaaagaagatcagaaggagaataaagaggggaatatggataatgttgaagcaagcagtaaatggctaactcctaagaaaaaagctgtgagaaatactgaggtaaaaatggcaaaagaggttccaaaagaggtcaattcaagcaatggttatgttgtattacaagctacggaaagtgatgagattatggttcccactactaagacaactcttgatggaggcaaataacattttagggtggaatgtgaggggcatgaataaaaaagataagcaaaatgctattcttgatgtttgtaggttgaataaaatctgtctaggtgcgttctttgagactaaagtgaaacatgataaagttcaagatatgatgtctaataatttttcgaattggaatgcttactctagtaatgtgatttctggaaggatattattagtttggcaggacaagtatgtgaatgtggaagttctctatgaatcttctcaattggttcattgtaaagttaaggtgtgtgggcaaaagaagggctttctagttacggcagtgtatggctataataagatagaggatcgcaagaacctttgggattctcttgcgagtcttggtagtcctaatgagccttggatgattgttggggatttcaatgctatgtttggctatcaagatagatggggaggtaggcctattcaaaatagagacattgcggatgctcaagattggcttgctttgggtcaagttgaggagtttaagtgttctggctccttttacacttggacgaacaagcatgaaattggggataaaatattttcaaagcttgatagagtttttgtgaataacatctggctgaatgactttccgaactctgaagcttgctttaaatgggaagttacttctgatcattgctattgcttactcaggtgtcaggtgtgcaacaatgtagggataaaacccttcagatttggcaatcattggccaacctacaatggttttgaacagagagtgatggaaagttggaataaaaaagtttctgggaaggggcttgacagtttaatgcagaagttgcatagagtcaaacatgttttaaaggtgtttagcaggcatgaagtgggggatgtagctcttgattacaagtcggctaaagagatgtattgcaatgctcaggaaatagcagcctcgaatccaacaaattctttgttacagcaattggtcaaagagaaacatctagcatatatgacagccaaggagagattggctcaagttcgaagttagcaaagcaagatcaattggatcaagtttaatgatgagaactcgagctacttccatgtagttatgaggaaaagaagactggaaaacagaattaccactttcactaaggggaacacggttgtggatgactttgaggaagtggttaatcattttgtcaaacattttgaaacttttatgggaagcaagagctcggcaagcagtataatagatgagagttgtataaaacttgggaattgtttgaacttggaacaacaagttaagttgataaggcctttcactaaggatgatgtaaagaaggctctcttcagcattcacacaactaaaagtcctggtcttgatggcttcggttcgggtttttacaagagtctctggagtaatattggtgacgatgtttcaacggcggttccggatttctttgctagtggcaggcttccaaaggatctgaatgagactgtaatctccctaatcccaaaggtaatcaatccttcctctgctaaggattacaggccaattgcttgttgtaacacggtgtataaatgcatctcgaagatgatttgttccagattgtcagaagtgctccctacgttagtggacagtaatcaaggtgcgtttattaaagatagatcgttggctcataacatcatgatatttcaagatttgctgaaagggtactcaaggaagaatatctttgctaggtgcatcatgaaaatagatctaagtaaggcctatgatacggttgactggaatttgtgaatgatttactcagaatgctttgcttcccttctcgcttcatcagttggatcatgacttgtctgaagggcacaaactaccatatccttttaaatggaagaatccagggtagcttcaaagggaagaaagggcttcgccaaggagacccgatgtcccctttattgtttgtaatgatcatggattatctcacaaggctacttcggctatactcgaatgaaaaaggttttggctttcaccctttgtgtaagactctttgcttgattaatctgtgctttgcagatgatctgattatcttttgcaagggaaatctaaattcgattaggctcactcatgatgcttttgtgaagttctgcaatgacacgggattgtcggccaacacttcaaaatctcacatttactttggtggtgttaaagaagagataaaatccaagattttggagtgtgtgaagatagaagaagggggatttccccttaagtaccttggggtcaacctcaggcctaccaaatggaaggctgaagactgtgg

SEQ ID NO: 387095 - DNA, 1610 bp, Cannabis indica
atatacatatataatttacacataataatataaaatataatactaaattcaaactaaatgaaaatactaattaattcgaatgtcgatgatttggatttttggatacccatcaaacatctgatcaattggatattcaaaaataacattggattcgatcacaattagatatttaatttttggtagtcgattataattgaatcgatcgactatcgttagattagatcgatttatatacactcctatttatatatttgctgttctctcatccgtcttatcttactaatggatcaatttccttattattttgatattggaagattgaaaaatttgaatttgaaacctcccaaaaggaaaagtacattacaccaccttatatttcttctttggaccaattttttttttaaaaaaaatattttttaaaaaaataatactaattataattggaatcgatccttcgatgtcttattaagtaaaaatattattatgcagtttgcaatcgcgcttgagtttgatgtaaattgtgctgtcaattcaaataatatatttatatatagaaagtgtttaaactcatttgtagattcaacatggaaaaaagggtcaaaatttgtacatgtattgatgaagatgatgattaataatatgacaccaaataatgataaaatattacaattaaccaatataatagttgacgaaaattagaatgaccgaaacctatgggtgagtgaaattttgaaataaatttacatttcaaattagttgaaaattcaaatattagttgagattggtgattatttggctatgtcatctgctgattgttagtcactctccttgtgtagcgaaatattttctatctgtggaaggaatttgaggaattgaaatttccatgaaaaatatttacactttgcttagacataatttctttagatgttaccaacagtaagtgggttgcatcgaagattgctcaaaacaattcgtgactatggagtttagtttactagactattcttacttgaaagagtaaaaggtggtcataaaatgtgcttctatattatatccatcacaaattgttgataaaaaatgttttgaaaagattataaataacgatggaaagaaataagtgaacaataggcatcacaaagatgtccccattgatagtacaatggatattcaattattgggactaaatgatcatactcaagatgtttataaaagaaaataaggtaaatattattttggatcttaaaatttgtaaaaattattaattggactctctgttttataaatgacaaaatgaattatatattttctaaaatgataaaaataggacctattacaaaaaactgctacttttagtgacaactttttagtcacaacataatttttgtgactaaatgtgacttttagtcacaacaaaatattacttgtgactaaaatatagtctctagttacaaattgtcactaattatattttagtcacaataagtattgtgacgaaaaatacatttagtcacaacaaattgtaatttttgtgattgatacctttagctacgaatttttttagtcataatataggaatgataatttataattggtcacaatttttttacttt

SEQ ID NO: 387096 - DNA, 1915 bp, Cannabis indica
gatagaccataattttataataaaaacaaatgacaacaaataaattaaaatactgaaaataaagaaaacaattgaagatatgaccaatagtgaaagaattcactaaccttagtaaatcagatcatgacggagtgttttctctactttaggtggtgttaattctaaaaaaagtttaaatatttggccattgactttgaatacattaccagttttagaaattttcaatttcaacaccttagtgagggaaaacaatgcaaacagtaaacaaagcagaccatcaaaaatgtaacttatggggatcaaaaagaatgttccaatcagaaggttgatttaactttggtagtttagggagtgattgtgattctaattgaagaagaggttcaaatgtttcaattttggttttccattctttttcgtgttcattaatggtgtagaatctaacaaagaattacactatcaaaagaacttttaaaattcataccaaaataatttacataatttttgaaagaattatctttgttcagaaaaaattatgtgtagcagaatcaataaattttacctcatatacatcatcacattcaacagatttattaaaagcattaaagatattcaactcaacagtcatatttctcaatgataatttaagaacactattacgatagttgatgattgcattaattgtggctaaaaatggtctacccaaaattataggaatttgagcatttatgtcttcaacaaaatgtgtatcaagaataatgaaataagtaggaaaataaaatttatctatctttatcaaaatatcttctatgatacctctaagaatctttacagaagatcagctaacttaagtgtcatagatgttggtttcagttctcctagaccaagttgcttataaatataataaggcaacaaattcacactagctcctaaatcaagtaaagctttgttaatcacacgatcactaataatacatggaattgtggaacaccctgggggtctttatgtttaacaatacttttatattaaattatagagctgaattattccgttaaaatgcctttttcagaacattagtgtttctttttgcaatacacatatctttcagaaattttgagtaggcaggtatttatttaatggcatctaaaaaagagatatttatacttatttacttgaatacctctaagatgtcaccatactgactacctcatttgatcaggatcaatctttgtgggaatggagcttttggaatgaacgacaaagcttgactcaattcttcaatcgagtctttggtatgtgagctttcaggctgactcttttcattttctttcagtgagtcattgttcattttatcaggttgaggaacgtaatacggtttttcaataatttttccaaacataaggatagaaattgaattagcttcttcaataggtctagttgtacttaccttatactggctctttggattgggaatgggttgactgagaagttttccctttttcctttcagctacagcagtagtaagctgaccagtttgtgtttcaagctttaacagggattgagaatttatgtgtaaagcttgttcggtgattttcattaactattatagtgtatcctctaaatatggttttctttgttgttgaggatatgccatattaggttgggcatgactctgattgggtgtgttgtactggtgtccttggttcattggaggttggtcctgtctccatgaaatatttggacaatttctccaatttgtattgtaggactgagaaaataggccatcagatggtttcctataagtttgaagagcgtttatttcttatgagaacgcctcttggtatatagacaatgatggacaagactgggcattatgacttgtactatagcatagagaacaaacttcattcctatgtat

SEQ ID NO: 387097 - DNA, 824 bp, Cannabis indica
ctctctatttcttctctctcactgctcaatcgatactcactctctctctacgctctacccaacccgacagcagacttcatcacaagaaaaaagattttcgtccaagcccaaggaaacgaagaacagaatcggaatcctctccacccgaaacctctaaatgcgactctctcttttccattttgtgggataaatctcagatccacctccgtctcttttttttgtgtgtgttcttcgtccctgtgatgatttctctctttctctatttcctcaggtcaaagaaggttcgtgccgatggagcttcgagtttcagggtggttcgttgacggcggagcttcagagcattgagtttcagggttgttcatggacgacggcactgcagagcttcgaggttcgcgactgttagaagtcaaccgaatttggggttcatggttgtttattgtcgatggaggattggggtttgttgtgggggaaaaactgattgtgaaattttttattattttgaaattggtctgtttttttttaggttcagttcatggtggttcaatggaggattgttgttcgttagtttcgttcatagaaactgattgtgaattttttttatttgttttgaaattggtcagtaattgttgtaggcattttttaggttaaaatatgtagataataaatagtattgtttaatttttttagctatatcatattgatttatataatattgatgtaactgttgtgatgttagttttgtttgagtaatttttatatatataagactatgcttaatattatatatttattttgattaattattctttgtaatattttgtata

SEQ ID NO: 387098 - DNA, 1004 bp, Cannabis indica
ttaatataaattatgtcctgtggtgttaaatattgattataaggtaggctcaacatgattagttaaatttgtgattagatgattagattttattggataatattatctacataaatattgagtcatatataaaaatatagattactttatctattattaattaattttaagatgaaactataatttttaatatggtattaaaatcatatctctaacggattttcgatccacacctatcagatagttagtcatcaccatcttcatgaaatattggataacattataccacatggatcaaatgtaaaaatattaaatcatatataagaacatagactactaattttgagatagaactccgtaatttttaacaaatctaaattgaattttaaatgaagtatgttgtcttatacaaatgtgaattcgaagaccactaaccatcattttaataattacaatgttagctataataataataataatttagataatttttttaagcaaatttatttgatacactatattaaattatattttattgtatataattttaataaattatattatataatattattttaaattttgacttgacttaaaatttgtttatttaataaatagaatctaaaatctttaaatatatatcactattagtatatgttgcccctgatttcgcccaatatacgtagaccaaccggacagggacacgtggatcagaacgtcttaaggcttgaattatttgctaagtctttgtgatacaaggtagcatccgggacatgcctcccggagaaggcatgctgagctccatacgctcccggatacccaagtaatactaaggcatctccgcgaggtgtcaggcttcccctgagcagtcaattcgcatttaatgtcgcatgggaggaagcgtgggatgggactgctacacgcaataaagtctgacggcacaacctccaatctgtagctacgaagtaatgatcatttaagtctattgacggctacactgtgaa

SEQ ID NO: 387099 - DNA, 513 bp, Cannabis indica
gaagataatttaagtacaatatttataaaaagacgtatatttgaattaaattttatttgaaggtaaatttgattaatgtataaaaaaaagtattcttcaacttctcccaatttcttttatcatctaggcaagtctcaaaatatatgagccatttaaattttgggacctttactttcaatataaaaaaaaattgaaaaagagtgtaatagaactcaaacccaataatgtgtcatgcaccgcaccaaccaaattgtgaatgtttgttgtttatgatatacttaattttacttaaataaaagtataatgaaacttttcattttttattttgttcccttgtaaagtgtgggccctatcacaagccttgttcacctatgcttaggaccggtctgtcgtcacattgtattatataaagaagattactattagacatcaatggtgtctagcaccacctagagatgagatcttgtgattggttaatgatacttcataaaaagtgtgtttggatatgaggtg

SEQ ID NO: 387100 - DNA, 992 bp, Cannabis indica
gtatttttccaatctttccacctgtctccaccttttaaaatggttactttcttgtccgtctccagtatatcgaacacggactgaaaaaaattgacaatcgtagttataagtacaaatcataatcaatagtaaaaaaacatgagtactaaaattaatattacctttatgtcattccacaattagttttttaatgtcttcactcactttaggccacgatatatcttgaagtggaacattaactcgcactcattctccaatttagataacttgcacccatgatatatcttgaaatggaacattaactcgatagaaggatgtcctatttttatacaaatatgtagcaaatggattctacatacatatattcgtgaagttaataacaatatatgaaagataatttgtgtgaataggtgcttattgtgaatagttgtatctatatgtgagaggatgcaattgttaagatatgctattagtaatgtatacttatgttacaattaactttttattggggaatattttattaaaaagcataacaatttattaaatgtacaacaagagtgtcccgaaagtaagtgtaatttaagtatttaaaagagtgtcctaagagtatgagttatatacaagagtattgtaaaggtgtctagtattaaataagagtgtgagtgtttagtgtattatacatattgtggtttagtaaaatgtattcaagtcttagtataattatttttgcaataataaaagtaattacgtttttcctatgttgtgttgtccgacaatttatagttttaacgtatatatattatgagaaaatattgattgttgtgtattgattctactgactattcatcttcttttatttcgttataaaatgttctttaataatagtaccgttcatcttgaaagttgaagcctgtatcttttatcttttatgaattataaagtataattaatatttgtttaaatttaaaattaaaatttttattttgccattt

SEQ ID NO: 387101 - DNA, 560 bp, Cannabis indica
tttttttttttggctaaatacataaggttaaaagcactaaaattagcaaagactaatctttgtgaggcccttaacctagtaaattaaatttataagagaatacaaatgtgaactcaaactttgaattatggatgattaaaagaacattgctattagatgtattattgtgttcaacactatactcatgtgacgagttgtgagtaattagtcatttctcatattatttattaaattaaaatgagttgcacttgatattgaattgtacaaatatcaatatgttacctcttatagtatttaagaccgactgaagggtgggccaacagaaaccacccaagccctcaccccaagaggccccttttttctttagtacatgaaagccaaatatttgacttaatataggtggcatttggtaacacttttttaatcagttttctgtttttaaaagtagaaaagtgaaaatatttttcaaaaacatgttctataaaactgtttttacttttcaattttataattagaaatcaaaattttaaaaacaaaaagaatcactttcaatatttttt

SEQ ID NO: 387102 - DNA, 557 bp, Cannabis indica
acaaaattgtaaaatgcccttagtgcctttttagttttatttttaaattgaaatttcgttgaatttgccaccgccaccactagggaatgagtagtaaattaagtcattatatgttgaataatataataatattgcaagtagcttaataaaaaattaaaattggatgattagtatgtttgaattcaaagattaataaacacctatatcataccaaagagaattcttggtagacttttcttctagtttcaaataacaaatcaccttttatttttactttattctcctatgactaggtaaatacagtgttattccttttaacgtattctcctagaggagccatggggcactatgatataaatttagggtagattaactaaaatttgtactgaaattatatagattaaaataaatttcagcatctaaattatatgagatcaatttcaataataataataataataataagagtaatttgcggcataaacacataagttttactcagagtagcagataagtacttaagtcgttatttttgcggtaaaaatactttccgtcac

SEQ ID NO: 387103 - DNA, 1005 bp, Cannabis indica
gaatatatatttataaattaatacataaatataatttttttaagttttattacatatttgtaaaaattttagtgtaaaaatatttgtaagtttattttattttttagaattaggtaaataaattatttatgtaatttgttagtggaaagaataattagtttgtaagtgtattttttttaagtttaggtaaaaaaaattatttacttaatttttattgtaaaaattaattagttgttttaatttagcttaggtaaaattatattatgtcattttttttttagataattatattctgtgatttagtttaagttaatggagtaatgttatatgcaaagaaaatttattatatgtggtgtaatttattaaaaaaaaaaattgtatatgtttatttgttagacatatgtaatgtgtttgaaaagtcatattattatttattttaaattgttaatgtttaattttttaggaattaattgattttctcatggtgcaacaaagtcctcttttatcggtggttcttcgagtgatcttctcattctcggtatattattgtttaattggataattagtttatgtaatatgtgatagaatttgtgtaaattggttagtctcaattaattatgtcaattaaaaattgatgcatattttaaatttagtttttaggtatcatgttcttggtgttgatggtagagtgtcatagtagctagctttattgctcaaaggtataatcactagaattttaaaattctttatttagtggagtttgaatatcttagatattcattcgtagtgaagtaagttctgcgattagttgtaatgcagtcgaatgggtggaatatgcatgttagataaatttgaatatcttaaatattcatctgtagtgaagtaggttctgtgaatacatgtactgcggttggatgggtggataattttgatattgttaatgttattttgtttattttgttgctttgtttctttatttttttttttttttatttttttgctaag

SEQ ID NO: 387104 - DNA, 414 bp, Cannabis indica
atatatatatatattaggttaagatccttaagcttatggtttatactcgataaaaactatttttatcaaatgttgcttctgcctttataactttgatatggaccataaaaactaacactttcaagataatgtcatcaaggtattaaccaattatcccctctgctaggtgttgcaaaagttgaagtcgtccgacagactacttaaatggaccatgaaacttagccagtttgacaagcagtatcagccccaagtttcaatcaaggggcaagctttagctgactttgtggtcgagtattctagaaagaatgaccacctaaacgagctagtcccaaaacatcaagtctagaaggtttattatgatagagctgttggaatttattttaccaggatcttagatctactcacaagtatgtt

SEQ ID NO: 387105 - DNA, 1106 bp, Cannabis indica
actgtaactgtagtataatgactatattagctacgtggcatttaatattggtaggtcggtggttaagtgatatccaattacatccatgtatcaaagttgctattagcttttctattgtaatctttctggcccctccccatcttattatatggttttaatcatcaagtacaagggggagtttgtgtttttatctttaagaggagaacaaacaagtatttaaaagtgggggacaaagtggagacacaacacttggatcctaagtggatttcataaaatcacatggtgtaatcctattttcccccaaaaatggcgggagttttagcactatccacttcatttaggccacctaaacatatctaacccccttttctcacaatctcacaaatggaaaatttacaaatttataattaattatattatatgtacataaaaacttatttataatttattatacattttttcctttaacataatttatcgtacattttatgaaaaatatattcttaattttatataataaaaacacgacacatcaattagtgagaataaatttattaaagtagagaagctctggattattctttattttgcaattttttttctttctataatatgagtttacaaagaaactgtttgtacttttcattactcttcatcttcttcttttattttttttttcctttcattgtaaatttataatagcaagcctatttctttactctctcctcttcaatttttatttagatttaaaatgcgaaaatggtcgagatgtgaaaattcaggtagtggcttgatggcaacgacacatgacttgaaaggatgagatctgggcaggctgatgcagacgactgtaatgtctctgcttcaagcctccattgggcccttatacccacaaaatgatggctcttatacacgagtacgtaactttggcagcttcatggaatggtgaccaatcctacaaaccaacacgagtgtttccaacatgctttgtcctcactcgcacgcttcttgagaaaacttcccaggaggtcgcccatcctgaaattacctcaggccaagaacgcttaaccatagagttctttcgtgatgggctaccgaaaaacaag

SEQ ID NO: 387106 - DNA, 1744 bp, Cannabis indica
aaacttaattcaagactcgaatcccagacttggatgcctttggacctagacacagacccgaacagggaccgggaacccaggaccgagaccgagaacgagacccgggacccgagatcgggaccccagacccgagaccgggacccgggaccggcacccaaacacggacccgagactcaaactcggaaccggaccgggatcgggaccgggacccaaacacggacctgagacccagactcggaactggatcgggactaggacccgcgaccagactgggacccgggaccggaccgagacttgggacccggacccgaccttgccctgaactccgaccgcactacaagaaatgtgacttttgccagcacatttttgtgctggcaaaagttagtattgcgctggtaaaatagaatttacctatgatgtgttggtaaaagggggttggaaaatcaatgttggtattagaacttttgccagcataaaatgaaaagcgctggaaaaaaagacttttcctagcgcgcaaatgtgctggtaaaagttagattttagccactgcaaatgtacgctggtaaaactttgatctctttgctagcgcagtttgtgaaatgcgctggtaaaagttacttttaccagcgtagcagcgaactgtgctggtaaaagtgacatttcttgtagtgtcgggatcccaagtctcgtccggtcccctaaactttgatatgtaccatatcatgccccttgaactattctgatcgttaaaaattctccctgaactattgagattatcgaacttaaggacttttgtccaatttcattcaattttactaatttagtgattatttatgtactaaatcatgctctccagaccttcatatctaccaaatcatgccctctcgtactttgacatgtgtcaaatcatgctcctccaaacttttatccatgttatacttttcttactaaaattggataaaaatttttgaatccaacaatctaaatagtttaggaaaaatttttaaaattaattttttatttttgaaaattgaaaatagattttaaattatgaagccaaactgactctaccattagacacactttcatattttacaaatatatatgtaaaaaaacgtttaaaatatattaaccaatatgctatacaaaagcttaaataaataaaaaaaaaaatattgttgttgttatgaggatgatatggagaaaaaaataaacaattaagacaacaatggcattttagtaatcagttttgcctcatctagtactattgatattgatacataaataacacctttgtcagcaatgattagttcttatccaaaacaaaaagaacgaatcttcatcgagcttcgatcggttaaactgatgatcaccaagtcatatagtatcaatttgcatcatcaatgcttttgacagctcaaccacgtgttgtgggtgtactggtaggaatagcttatactgacattctcccttatttgggttaagagttcaaatcctacctcaactccttttgaaagggattaaaagagattcaagcaaggtttgatctttgctggtggtggtatcatttgtgtaataggaatccttgaggtgactaccaatgactcaattaaagtaggctaaggtacaacgctcctgtagttgatacgtggtccctataattactagaagtaactgaaagaatggaaaaagaatctataccacatgattctcttttttctcataaataaaaataaaaaaaaaa

SEQ ID NO: 387107 - DNA, 2007 bp, Cannabis indica
ctcacacacgacatatatatataaacatatctttataaaaaatatatatgaaaaccaaaataactaataggccatattatatatgaccatgcaccacccatatgatacttaattacgtacctaaaaagtcagttgtgaggcgcccattgcaaaaccttccggtgggttttttattggccaagtctctgccgtacggcagaaaattgctcttgaaaattgtgggcaagtagttattgtttcccggatccaccgtggagtcgccgaacaccagaacagcggaggctgcagtagtatttgttgggcttccatttgacttgtttagagcttgagcttgggagataaaccatatggtcttcgggttttcaacaaagatgagtagaattagtattactagtagttggggatgtttattaattagataatctaccatgataatgatttagagatagtgggatttgtgcaaaatgaattagctacacttggacttagatttctctttcttgtttctgatattgtcttgtttgtttatatatagttggaaatgtcacaatattcatcatgacgaaaatgccctttgttaagaaatatacttgtttgtattattgtgttttgttttgcttgtttatattatttcagaaaaaaaaaaattgtctatattattatgtatataaatgtcctatttccatgcggttgatgtggtttggaaaccaaactttacttattaaaccgaaggcttgtgtagtctcaaactctcaactaacttttgcatggaagtactccctgacattgacagctgatagtttttgataaagtattattttcttaataaataacagaattttattaatagtaatcaactaaaataatagcctacaatacgtatttctattagagacacaactatagaatcagaattagaaaaacaaactacataatcaatcgcctaattctcaaatcgtttgacaaaaaaataaaaaataaaatcagatagaaaagatcgcatcatcacaattaatcttaaggaaaattatattctgtttcatccactgctcaaaagatacaagagtagaaattgtttcaacacgtccattcaacctcgtagcttacacaactcaactattatgtatggtacgtaactgcattactaataattcagtcacagagaacttattgttattcctaacctttaacagggatttgatggtgagtgatcaaagaacaatgaagaatcaacaacaaaataaaacaaaacaaaatcatgtcacacatacaagactaattcaaaattatgtcacagtataagacaaaaaatgctcaaaactatgtcacatagacaagactaaaatacttaaaaccatatcatagagataagactaatctcagtagcaaaaatcgaattacagtagcaaataaaaccccgatcaagtcgcacctaatatatgaaaagagcatatgaataggagatgagagaattaggtagcttattattagtatttatatatatctctaaggaaaaatataaggcggtgacatgatactttttatgaattttactctaatttgtcttttttctcatttttttatattttttatttactttttaaaattttattgattttacgtaagttattttgaaaaaaaaaatctcatattgttagaaataaatgtgggtataacacttagagactatttgtagatcactatatatttctttcactttggtttgcacaaaattaatattacataagttttgtatgtgtaattaattattcttgcttaattagttaaaatatctagttaaatgcaacacatattattaactttttcaaattttgtgaatactttaaatttttttaattattttaaacaaataaaaatattttatgaaatttcggttatttttattttttaaattatgttttttatttaataaatatttaaaattttttacaatgtttaaaataattaaaaatataaatatgcacaataatttataaatatccatct

SEQ ID NO: 387108 - DNA, 2361 bp, Cannabis indica
agaatttgtcgaccttcaacaaaagtcaattgagtttcaagaatagtattctccaccactcccctaattttgatagaaagcatatttgcaatttcctattgacagtagttataaggctgattggtctataatctttgactctacgactgttaagttgttttggaattagacagatgaatgtttcgttgatgctaccttgaatagtgccctctcttttaaacgatttaacgacttccattagatcttccttaattacctcccactgagactgaaacaaggccaaactaaaatcatatggtcccgggaccttacttccttcacagctgaatactacctccttaacttcatctttatcaaacgacctctctaggtgccttgcgaaggcttctggaatcacttgccattcaattccttcaatacgtctaccctgtcttttttcggaagtgttaatttctttgtttctaaacttcctccttgcttacctgaaccttaggggacgtttgtcattcttatcatattaacagcaagggacctggaaatttgtaaaaagaaatataccatgtacatagtaggttgacacattgcaattggtagaccccatattcatgttacctaaactctttgtaataaagctaatgtgtaacgtgttagaatattagctagaaggtttcaacagtagtctaatgaatttcttactgcgaaaggtttttgttatgaaaggctctaagagtgttagaaggggcaagagtgttagaagacggcatggatcttgatacaaccaaaagctagcctgaaagaggagggtgccaaagtagttatataccaccaatcaattccatgattggtcaatataggatactaaaaatacagcccctgtaagatccgacgtccacggtagcctactttatggtggcctactctgcattggcccactctgaggttactcaggtcaccctttccacaacgttggtctcacttgagagagcaaggctttgataccacttgatatccacttgggtagaactcactctcaaaggtatcctaagtaagagaggagaatgcccaagtagttagttatataccaccaaccaatcacatacttaaatgtgggatgctaacagtgatcttatattgagtttgaatctgggtctctcaaataccgtgtaccagtttgtttcttcattttgattcaatatacacatatcatattcatatttctctatttactcttaagactgctctatcagcagtttccttgcgttacaaaagaaaaagaaaaaaaaacaacttgcacacttcttaaagtactaaaaccagatataaaaacataataagaaaatgatacaacttaagcaacaattatgcattatcaagtaggttggtttgctaattcaaacattgaacgagcaattaactagtagcctgacgattaagaatgataaacttagagaatgaccaataatgtgcaactaggtgtttcaataatctttatattcacaaataactaattgaaataccaattatctatcgttctgtaggctaattaaacttttaaaagccccatttaggaaaccttacagacaccataaaatatctaactaaagtgtgacttcaaaaagacttgattacatgactatatatttataacgcattttagtcaaaaatgtatcacattcatgttgcgattaaaaccagcataacacatcaactatggaattaaacatttgtcaactaaatagattttcaagcttaagaagtaactccaatgaaaaaaaatgtgatggaaaaatggattacaaatagatattcaagctaaccacaatttgcagcaggaaaagctgtgcttacctgaacaaaatgggcaagctccacatcaaagtatacttcttcataaccttctacttttgggataaatggagactgagttaagtattggcttgtgacatatattactgccttctcttccctagccattgtgccaattcccatttcaagacctttaggtacctatacagaaggattcaaatcatgaccgcaacataaattatgtgtcacttcaacttattaaattaagattatccagtatacttacgaacaacttggaaccaacatacatacacattaaaagcaatattcatagcaatcaagaatgttagcaagaaaaaacaaatgcagcacaaacctcagactttccaaaggtaaagaagaacggttctctttgagtacgtggaataatctcttttccatcaaaagtttttgcagaaatcctgatcggaaacatacaataattgacaatttaatgaaataatagataatattgaaaatcagcagcaacggtgcaaacagagcatcctaccatgc

SEQ ID NO: 387109 - DNA, 515 bp, Cannabis indica
aaggaaataatcgagaaactattgaaaaattgtcgataagggtcttctccaaccttagtacgcttaccattgataaaaatatcgacaaaccattaatataacgtaaaaatttctagatctcaccggaaaaaccaaatcaggccatttaaaaaaaaaacaacatattcttcaaaatgtttataaaatattgtgtaaaatacttaaccattattgtgagcgtaacggatttcgtacggtcattgtgcgtggttcgtagttttagtggaatctccaccagtcgtcgtggtcgttaatggatttaaaaaaaaaaaatagaaagagagagtagagagatgagtaagttagagggagttggttttcttaagatacaattattaatatgagaagggtaaaaagggaaagcaagttgaaataggtattatttagtatagattaattgagaaatttaattttttatgcatatagtactttaaaattgatcccccaaacctatatgtattaatatttgctaaata

SEQ ID NO: 387110 - DNA, 622 bp, Cannabis indica
ttgacacacactctccataaaaaatttgtacacttttggggtatacttaataattttagaggtgcaaaaatataactcccattatttaattaattggaatttgaaaattaactatgttaaatctgagaatttttacttagtttgggccattttgagaatataaaagagaaacaaggttttatttattaattaagatattttgtgggtctaattaaaaatatatttaaactatatttttgtttgattattgttcaacttaagcttaaatgaaacaaaagttggcaaaaattaaatcatgggccatgcacgatggatttcgaccgtcaagtgtttttgagcccaattatttttattttagctcatctaatctaattctaaccctatttagagcatatgtgtaatatcaagattaaaatagtatttaattttttttgggatattaatagtgcgaggataattatctcatttatttatgttgttagtgagtagagactattgcttaaagttgttgtaccaattttctaaagagagttaaagttgtattaactacgaaagtaaaatattatggtattttcataagtacgtaatcgtttaattacagcccgatatgaaagtccattag

SEQ ID NO: 387111 - DNA, 850 bp, Cannabis indica
taataatttaattaatttgtgtatatatatcaaaatacaaattgttcttagtaaaccataataatataaatgaattttttagttaactagtgttttatagcataattgtttactacattttgttttgtaagaacaaatattctttgtctcatagaacattttttccctaatttttgcctattactttttttacatttaaattatattatattatattaaattatggatgataagagaatgatggaaatgatgagtgccgttgatagcaaggaaatgcttgacttcaattaattattttaatttgcatcgtaaacgaataacaaaaaataaaatagaagatataaaacagaacgatgcaaataattttattcaaaatgaagatattaatagggaaactatcttggatctaattgacatacaactaaagcacatgcctattgttcgaaaagtaagtttcacttcatatatagaggaacttcaccgaaaagtcttaggtaaacctttgaaggaactcaaacatagtcagaagctttttatgagaaaaaaatatgttcttcatttgatcaaaaaattggtacaagaggatctatatatgagctttcaaaatttgtatgaaggcaaacatacaaaaattatccttgatcaagtggctgaaattatcacaaatatttgtgtagatttcagttgtacacattgtagtttacatatattttcattagttcatggattggcttacggtcctcttcaacttttgatgaaggatggcatgatgattgactattcagctaactagccggaaagtacaaatatttcaattatagttgacaatattagcgaatttataagcaca

SEQ ID NO: 387112 - DNA, 1422 bp, Cannabis indica
ggggataattgtaataaccgcttagctatattataaaaattaatagattattagggcttagttttagaaatagacttctatttattatttacacaattatggagatttatttgaattctaggtgtattaattatgatgtatgtgaaattttacaattttcattttttatgtctagtcatagtggaatgcgacgtatggcttgtatagtcacttagatatggtttgataccttagaaataatagggcaatatagttagatatttggaatatcgagggtatccggggttatagtgttggaccattttacccattagtgtgttgattacttcttgttcaagtacgggtaaaaaggtcattttaccctagattttttcattattgatttttcgtaagaatttttaattaatccctagttattgtttaattttttaagctgaaaagagatgagattaatcttatagtgacacttagcattttaaaacaaaaattaggaaaatctcaaactctctctctacctccttgttcggccatcaccaaagaaccaagaaactagattgttactctcaatttcaactagaaaattaaggatttcaactagagtttctataggttaagacagggatagctcaaggtaagcttctctccctttttatctttgaatttcaagaagaacaatttgatttttattgcataattttgggtttttgttgttgtttagtttggttgagtttataactattttttgaggttattttattgatgtttgagtaattctatgttgattctgaagctttttgttgagaaagacctaagcttgagcttttaagctcaaacttaggtcattcatcgtagatttgattccaggaggtttttcttgcaatttctagttgtattatgtttgttgtggcttaattaggtgttctataaagtttttctgagtttggggaaaatttgagtgagatttgcaatttttagggttttattacagagaattggttaaccggttctgtagaaccggttaactatctctccaggaaggaccctaagaactagtttactgttttggaaatgtagtttactgatataggaagtttctagagctttagttttgatgtttcctcgatatttaggataataccacactatttatcgatagtaaaacttttagttttaaatttaagtccacaagaagtgatttagcgtatcacttatcagttttacatatgttgttacataggggcctgtaaatcgttgagcagcagttttcactcatattgaccggcacacctgaattcagagtcaaggtaagattagtataataatatcatatgtgattacatgtttaacgtgcatgtttacgaatgcctattagataacatatcagcaatggtagttgttatcccaaatttggcactctgacgt

SEQ ID NO: 387113 - DNA, 617 bp, Cannabis indica
actaactattttattaaacaagaaatattataaattcataagtaattaccaactcaaattatattttaaaatctaatgggtatatttagaagaaactatttaattattagaatggtaataattacattatatttgtgtttggatatgagataattatacatgaatttttaatattttgtttgataaaatactttatacgataatatttttagtagataatgtttaatatagaaagttttaataattacacttaattttatggagttataaaaattggagaattggagagtgtaaatggaagccctcaattacttttaattacacaattacagtgtaattacataatcaaacaatcattctaaattgtataattatctcggattacacactaatacaattatatattgagtttcaaaacatccctaattactagactgtataattaagactctaataattaaactaggtagtaattaggctaattagaatttttgccccctgaactttgacatgtaccaaatcatgccccctgaacttttaaggttattgaaaataccccctcaactattgagattgttagatttaagggcttttgtctaattttattcaattttact

SEQ ID NO: 387114 - DNA, 1524 bp, Cannabis indica
aactgtaacaaagagaataaatttgtgtggaaaaagaaacctattgttgacaaagagaacaagaaagattagttgaattagcaaagtgaaacagggggaattgttgggatgacataggataaagaagctggtattagtaatcaatcgaaggttgatgctgagaagatgcagagggtgagggatgtggttattactgaacataaaagtgagtggatcacgcctaagagaaaggcttcgcgacaggcagggaataaagaaacagaggaagatatagaagtggtgaagtcaaataatggctatgctgtgttaatagcagcagcagaggatgagactttggttactaatccaaatttaattgctgttggaagttagtaatatgataaggtggaacgtgcgtggaatgaataaaaagaaaagcaagttgcgattcttgatatgtgtgtagtctgaataagattgggtttggtgctttgtttgaagcaaaaataaaacatgagaaaattaaaggcatgatggaggataactttccaaattggagctgttattcgagtgagattattgctgggagaatcttgcttatttggcaagataaatttgttcaagtggaggtcatacatgaatctaaccagctggttcattgcaaaataaaattcagtgggcagagaaaaagtgcttttatcacggctgtatatgggagtaatgctatggagactcgtaaagagttgtgggacaatcttgcgagttttggtaatcttaatgagccttggattatttttggagactttaacacaatgtttagtttccaagacagaaatggaggaaggtctattcagaataaagacattgtggactctcaagcttggctaccattgggtcaagttgaggagttcaaaagttcgggttcattcttcacttggactaataaacacgaggtgggggatagaatttattacaagctagatagagtttatataaacaatatctggctgaatgagtttcctaactctgatgcttgcttcaaatgggaggtcatctcggatcactgttattgccttgttcattttcatgtgcagaataatgtagggattaagcccattagatttgggaatcattggccttcttacccgaattattctcagctggtgatggacggttggaacaaagaggctgctggtggtggtcttaacagtctaatgaagaagttgtttcggatcaaacatgccttaaaaaacttttcatagcaacaaagtgggggatgttgccaaggactatagagatgcgaaagaggaattttgcaaaattcaagaggcggctacctcgaatcctaatgataactttctacaactttcagttaatgaaactcataagaatttttctacagcaaaggatagaatgactcagtttcttagacagcaaagcaagatcagatggatcatgtttaatgatgaaaactctagttactttcatgttactatgtagaaaaagaagattaggaaagtagaataccactttcatgaaggggga

SEQ ID NO: 387115 - DNA, 844 bp, Cannabis indica
ttttacagttgcactcacatgatatctttacttgaaactgtgtgatttgcgttgttactttttacttttttgactgatttgtttgttgtggtgtttcaatttttccagatacgctcgaatccaaaatgcttagttatttgatgaacacaattaagaaggtcaatgttgttgctgacagcaagggaaaacaaaagaaattctatgctaaaaagtagcgaaccctccatcacccccactcaaaattagagactccactaagacccaattaacttccagagagggaagcagtggtgagactaaatcgttggctccgcctactgttgttcctaaaaataaggaaccgatgatcctctcagacaaagaggattctggggaaggagtggtgttcccaaaatttggcacaacgttgaaacacaccactactgctccccatcctagatgggaggataaaagagccaagcattctgctcccgaaaactctgaatctaccaaagcaggaagtcttcctgctggaaaccaacaaacacccttttgacccaaccaccaatcaacaatgccaatgacaggtagctggtccttgtgacccccaactctttgacccaaattcaatccaaacaacacataaccgatcgagaacacttcctctagcttcaggcagtcaagccatttttgcctcaactttttctgcccatctagccaacgccatttgggggccaaagacgagggagtctacctcctacataactatgtctaagggagttttcttactggtactcaccattatcgaagtaacgcaacaaccagtaaacttttctcaactctcaatgaaagcaccaaaatacac

SEQ ID NO: 387116 - DNA, 2587 bp, Cannabis indica
  modified_base (32)..(32): a, c, t, g, unknown or other
attacatatagatatattatatatatatatanacttttcatggccgccgagaagctgaaacggcgtgaacaaaacgagaatgaagagaagttgtccatctcattcttggagctctcatattcctcttactattattcccaaattgattatgattatgatgaactcgattttccatactaggattataaaccctagaagaaggaagagaaattggaagaagattaggatatggcgggatttcttgatgagaataatacaacttgctataaccaccaccaaacaaacagcaccgtccgatcttaatctcaattgatcggacggtgtgttgttactattgtaaattggtattcctttaattgttttcatctgattattatcagatgaaaacctagttggtgatgatgatgatgaagattgttttctttctgatcggcttggaaagttgtcgattcttcgaatccacggctggtggtggtggcgatggcggtgattttcggttgttgttgttgagagtgagagttctgtgtctgtagttcttactacctcgtgacttcttttgtcttctaattcttcggttttggtttggggactaactgcttgattttttcgccatatatcaaaaggagatctttgagatgattcggtgtcgttttgggtgtttggaagatggatttgaagggaaagatctggaatattattataattataattataattatttaaacaaagtttataattctcttctgataaagaagatcccttgttatgattatgaggcatttttttgtttacaacttatgaatttatatatatgtataggtgtatatatatatatatatgattgaagtggttttggttttggacaaagaaagaaaactaataattgagagagaaaagatgagagagagagagagagaaagaagaaaaataaagagtgtactaattaagtgtgctgtaaagatatataaggcataatggaaaaaaggaagacttttatttttttatttttttattttatttttttcttcatcttaatcaagaaacaaacatccttatgagagagagaattgagatatgttcttaaactattaaaatataataattaaaagaagggaatgaaatttaaaagactatttaatatatatgtggaaggtatattgtgatatatatgtatgtgaatatatatatatatatatatgggtttatatgtttctttgaatatattgtcctcaagagcatatttaggaaaacgacactttaacaaaaaccctagcttgtctcttatatccctcttattaatactatttttattgttttttttttaatttctttttattttatttttatgatagtcaacaagttagtaaaaacaagatagttaaaaaattttataacctttcaaaagttcaggttaaaaaagaaaaaattaccttttgcaatcgatccttagggttttaggattatttcctactttgtctcgggaagagctagcttgctagcgccttctgtggcgtcaatttgtgggctctgggcgaaaggtccatgtacttctcgcagtgattaaacttgcataaggaatgtccttagctctggcgatctttctcttagttatcttttttgtgagtttagtgcgaattgaatgagagtttttttttataaaaaaaaaaaaactacacttgtcaaagaaagttataattcaatttttttagaaaaaacccattgtcgcactcatctaaaaacaagtgaaagggaacacccgacatgcaaaactcggaaatatgtagattactttatagattaatatagcatttatctaattataaaatcttttttaggggattaaatcacaaaatatattgatgaatggttaatatcgctttaattttttttaaaatatatttatttatattttgacacaattttggccatctcaataaataaatttctttgtgtattttcacaaaattaaaaattttcttgaaattttcattttgagatcaataatcctatcatcctttagtcactataaattgaaatattaggtatttttttttaaataaattatgtaattttatcaaacacaatcaattaaaataatagattgcaatctaattgggatatctcctctattgaagacacatgattagaattagaaaaacgagctaaataattagtcacctaattttcaggtcgtttgacaaaaaaactaaaaataaaattagattaaaaagattgtagcattacaattaaccttaaaaatacctctattattcagttttgtgcaaaaaaaaaataaataatttttagtcataacaaaatttgtgactaaaagaaaaaaaaattgtaactaattataaatcataatttttatgttgtgactaaaaagtctgtggctaaaggtatgatatttgtcacaaaaattaaaatttgctgtgactaaatgtatttttagttacaatacttgctgtgactaaaattaaattagtgaaaacttgtatccaaatactatgtatgttttagtcacaaataaatttttgttgtaactaaatgtcacatttaatcacaaaaaaatttatgttatgactaa

SEQ ID NO: 387117 - DNA, 2022 bp, Cannabis indica
tagagattcactttttaactaatagactagataggcttttttgcttaaaccactattatttttgttgtcttttttattatttatattgtgtgtcttttttattatttatatactgatcacatatattttatactatattctttgagtacaagtgagtacttgcatgtttcaatctttattaaatttctcacacaacagaaacaaaacgaaaggttgaatttcccatggtttattattgatgtttgtttgtctgaagagtatccagagaacatcagcttcgactgaagaaattcaggtcaaatttaaatagggaaatttgcggcaaaagtccccaaaatatttactttgatgcagattagtccttaacttcgagaaatagcggtaatagtccccaacgtcacgttttttaactgcttcgttagtccttttttaactgctccgtttactaaatgaaaaccaccacgtgttgaaatatcattggcccattatttaatttttttttaaattaaattattaaaactaaataaattatttagctatcttattactaaaaaaaataaaaaaaaataaaaaaaaaaagtaaaaagagaagagaaaagaaagatggcagatcgtgagcccctctgtcgcaacacccccccccccatcttcggtcctatgagatcccaccatcgatatctttgtcttcaccatctccagccacaccccatccccaactcagccgaccaacatccattcacagccaccctcctccgctgcaaccaatgtaaggtttctcataccttttatgtgtttattttcatcgttttagaaatttatatttagggtgttaaaaacatacttgttagtaaatctagatcctagtaaaacatattccaatagttgcgacttgtagaagtaatttttctgcttgcttattgtataagagccttattcagttggagcctgataaatattatagagttgtctagaacaatctttccttccctaagcataggtttatattgtggcaatcggttcataaccagttgctcacgagagacatgtttactatgtttcaaattgagcttgattttgacagttgtcctgtgtgttggggtgagaaagagagtcatgaacacctcttctttgactgtgttgcttctaaagctattgtaggaggaatctttgactggattgggtttgaagcttggcctaaaacctacaggagttggctttgttggctgactttgaatgattaaggtaagatcaagaatattgctgcaatgttgctgctggtttttgctgccgcggtgtatttgatttgaaaaaatagtaacaattgtgtacataatagttgttgtttttctattaatagaattgtacatgacatcaaagatatattcaagattaaattgtttagactaaggaaaatgaggttaaatcatgttgagagaggcttatttttgcgcctaactcagtattgttgttggcaggtgtgtgtgctgggaccagttgtttgtggccgtgagtttatgtataggttttgtctttgattaacgaattcttctccttagtcaaaaaaaaaaaaaaagaaatgtaaactatttctaatactgaaaatcaacttaaaatttgaaataaagctgcaaaaaaatgagcgcgtgaacagtataccatagcaacagttggtaacatgatcgacgtgatagagtgacattaacaatagtcatacacgtctaacttttttcttttttctttttgaaaaaattgaataaaaatgaaaatagtatataaagtgtatatattaagtaggggtgttcatcaaaccgctcaaatcgcccgcaccgcaccacactgcaaaaaaaatacagtttgaaattctttgcggtgcggtcgcagtttgaatttttcttaaactgcgtggtgcggtgcggtgcagattgcggttttgaattattaatatgcggttcaaaccgcaccgcactgcatactataaaaatactaatttttatatttatttaggtccaatatgtgaaggtc

SEQ ID NO: 387118 - DNA, 1750 bp, Cannabis indica
atctgggtccttgttcgtgttcgggatctggacccaaacccaaacccagactcgaacttgaacccagacccaggatcctaaactcggaactcgtcacttgggacccggacccagactcaacctgcactcagacccagggcccggactcggactgcgatcgggatcgagacccaaactcagactttgaccaagacccgaacccagactaggactaagactcggatcgggacctaggacccgggactcaagactcggacctgggaccttagaaccagagggacctagacccataccgggacgagaactgagaccaggaccaagacacgaacgcggactaggacccacactcagaccgggacccaaaccaaaatcgggacctaggaaccttacttgaatagaggacccaaactcggacgtggacccaagacccgggacctaggacctgacaacagacccaaactcgaactttggacccatacagggacctaggaccttaactagaaccagagtaagatctggatctagactcgagacttgagacctggggcttagacacgacccatatttggtgtctgaatctgggacacagacccgaaccctgaccaaaacctgaacccgaactaggacccagaccaaaccaggatttgaactcgaacccagacccagactcggatcgagatccagacctaaatcaaaactcaatcctggactcaagacccgaacccaaacctggacttgaactcaaacttggacccagacccaaacccaggacctggacctagattgaagattcacaccttgacccaacacggaccaaaactcgggacacgaaaataggaccaattcttaggatccgaactgtctaggtaatggtttcattcatgtcctagtctgagtccaggtccgggtcctagtttgggtccgggtcccagatctagacacctactacaggttggatccaggccctaggtcctaggtcccggctccagatccacatccagattccgatctttggtcctggttaagttttggttcggatctcgggtttgggtttgggtcccaagtctaggttctgagtcgggtcttgattactgtgttcgggtctaggtacacgatcatagtttgagtcctgggacccagtatcggtcaagattcgggtcccattctgggttttgattcaggttcaggtccgggtttgggtctaggttcgggtttgggtccgggttcgagtccaagttcaggtctgagtcccggtgtaggtttgggtccaagttcggatccaggatctggtctaggtcttgtcccagtctaggtctaggtcccagtctaggtctgggtcccgttccaaatccaggtatgggtatgcgtctgggtccgggttagggtccaagttcgagtcttggttcaagtccgagatcaagtttgggtcccaaatccaagaccagtacccgaacccaaaccaagaccagaacccagaatgggacccaaacttgaacacgaactgagacctaaaccaagacaagaaccgggacctgaaccttgaactgggatagggacctgggccccagaactgggatcgagacccaggaccccaccccagtcccggacacacacctaggatctaactcgagacctgacacatgaactagaactagaccgagaaccgagactgggatccaaatcaagacttgaggcttggacccgacccatagtcggtgtcagaatctgggacataaactcggacccgtac

SEQ ID NO: 387119 - DNA, 1417 bp, Cannabis indica
aaaaaaacacttaggacttgtaactaagtttcagcttttgactctgaaaaattcttttagcataaatctattttagtagtttttaaaagcagaagatcagtgaaaaaagattaactccatacatcagttactcaattttatatgatatgaaagaaaaagataaaacaacaaaaaataataaaaataaatatttagctaataggtaaattttagctaaatttataaacacactatattcgtgagttaatgttaaagtattatagctcatctaaggataattttaagaattttgagctatagtttaacttggtacctattatacctcccaatatatagtgctctaaaactatattgtcacataagagtatgtcaaattcatgcgtgatttataagtggacctatcactaactcttttataatagacaaaagtactctgaaatttgggaaacacaaagaaagtaaatgagttagtaacaacttgcctctaatgagtgaaataatccagaggcatcctccgaaatttgattttgttctgttgatttccgtagattgttgttggtcatctatatcatcatcatcatcaccaccaccatcattgtcatatgtttcaattattgcatcactttgctcagacaaaccagtgctgaaaccgaacctagctgcctcttggcgatacaacaggtgaataccacacttttcaacaacacaggagttcacttttctgtcccaactatctattgcatagaattcaaaccatgcctcactaaatgtatctgttgcttccagttcatgaagatacaaaccatagtcataccatatgaacaagtgatctgagttgagacatcttaatcttatggatgtatcttcatcattattatcttgactattataacccctcaaaaagcttttgcatttatgagtattaccattcttgtctaggaaatttaattcacagtggaaatggatttgctggtcgaaattgtcctctgaaaaaggcgctgcaacaacacatagagaaaatcccaagaagttggagttcctccattgatgtggaagcttcacatgtatagaagacccgttccgtcggtagttgaaccacttaggaatttgattcccaggataacaaatgctaacagaagaacattcaggtacctgtaaaatccaaacagattaattaatttatttattttcttacgataacttttgaacgaggaactctgcttgtgtttgaaagagtttgtacataaagtgtacaattcataaacatgtttggagaattggagtgatcaattggtttacataattagctttgttatgacaaaatattaaacaattcatgggataacttgtcaatccccgttgttgacagatagttaatttttttttttgctggaagttgagagatagttcattagtt

SEQ ID NO: 387120 - DNA, 1076 bp, Cannabis indica
  modified_base (997)..(997): a, c, t, g, unknown or other
catatacatatacatagcatgtaaagaaatgtgatttcttcgaccctttagacaagtgatctcacttctcgtgtgttcgttttggtgggggggtggggtgttggtcttctttaaagtggatttgtgattgtgaatttaatattgaaaagaaccaagtgtcttgattagatcgacaatatttatatcatgaagcatatatttcacttaaaactaccacaactatctataatctcacaactattaattttgatcatgttcactaatacgtaatgaaccataaaagaaatgaatgtaagagatgttcacgttcaataatcttgatcatgttagttttgattctttctgagattgtatatgaattgaatgaacattgtctctgaaatactgtaatatgtgttacccttaatctgatttactctatcattggccttaatctgatttactctttcactcattggcttcttctgctccttcaatctactctgtcctacagaaagtacaacaagtataagtgatttacagttaaggtgattggaattggaaagtcgcacagtagtcaagtgaaagatatctcagtcttatccattgttacatagaactttaatggttcagttgacttgttttctattttagcatttgcaagtgccaggtaaaacaaattccctgcttattattatagtattaatttgattctttaaaatgttactccatgatatacttttatgtaatattgcataaagtctttgaattctaagaaatgaaagaacattgttgagaagagaatttgtatgaaaatatctattatatgtaatgccaataatcgaatgtgtatttttcgatgcaggggaagataaagatctttctcaatgcatgatacaagttaacaaataattggatcaattggatgagttatttgatactgatagttttcttttgaaaaatacttattaagtggaaggtacattgatcaaatctttagggaaatttgattttctanactttttttttttttttttttttgaattaaagatgcaaaactttattagatatacctaatattttatttctaaactaat

SEQ ID NO: 387121 - DNA, 1525 bp, Cannabis indica
aaaagggtagcaagaaaaatcatttcatcatgaataccaagcaaatcaagttttctatataattgattctaaatggtcaattgttttacaagtcttagagcgacaatttttagaaaatgaaaatcataaagaagatgacttatgtcatgatagttttattgttgaatacacaaacaagttgaggaaagaagatgatggtgaatatattagaaatgattttactgaaggaatatgggtagatggtgaaatccaaaaaaaaaaaaagaaggaaacatgctcagtgagtaacttatgctgttgttgagtactaatatattaacttgtgtttttgttgaatgctaatgtattaacttgttgagtcttaatgtattaatctatgttattattgagtactagtgtattaacttatattgttgttgcagatgagtaatgcaaaagatgaaaacaggcaaaagaagcgaggcgcaacacaaaagaacaatataaacgatttgaaatctaagggagtcaagaaaaaccttgagtataatgataaaggacaacctataggtgataattatggagagatgcaatcttacatcggagttagaacgagaaaaacagtctctctaaatgctggtgattggaggcgtgtctcgatcaccttgaagaataaaatatgggaagatgtgtcggtaaggcacctcttcttaatacattgatgtagtttaatgcaatatttatattttactaatcatttcctttgtattttcagggtgctttcaatattgacgagggtatgaagaagaaagtattacgtgatgcaggaagaatgatgaaagattttaagtcgaaaatgactagcaactacatctatcccatggcagaagcgggtatgattgaacaactctctgttactccatgcaagtatccagagattgaccatgcagactggattgaatttgttaagcaccgtctatctcctgagtttcaggtactattatgtatgatttcttatgttaaaaacaatgaaaagtgttgaaaacttaccttatattatattatgtaggccttgaggaacgtacaatgtaaaagagctcttcaaaatcaatcatggcatcgaacatctcgtagagggatgcataatgttagagaagacttagtaagtaatttgtatcactagttttgcattcaataactagaacacaccaacatcaattaattatttgatggtttgtagaaaaagaactaggtgttgatcatgttgagcgctgtgaagtttggataagatcacgagaaaagaagaagtccatggtcacagattgggacggacaaattaaagaaagaattgtaagtgtttcaaagtattgtaagaatgaactaattagcctttatgttgtcaatttcatcttggtttgtttcccagaatgagctgaaggagaaagttagtagtggcgaagttgtagttaagggccgggatgacatcctaacgctagctttagggacacctgagcacccaggtcgtgttagagctgctgggtatgat

SEQ ID NO: 387122 - DNA, 1792 bp, Cannabis indica
gatattcttcttctcgtaatgttcttcacatcgtaaagttatttttgaggtggctactccattgcgtaaagagcgagatagatgaatgtaattatcttcaccatatataaatatgtggatagttgcaagcttttactcctaagtatgggagtcaatgagctacaagctccttgatctctcatcttatacattcttattatatactctgtttatctcgaggtacacatattgtctcgtcaactttatctgttaatagttattattcttatctcgcatatgctcacgtggcagcaagtttgaatatttctattaactttaattaattgaaacgagttatttatactgcatttaataatgcaatttaattattatattctttgagctgattcctatttctttggtagtacatgtgtcatctcctagtgaatagctgaattttaggtataacaattaccatatttatcttgtttaaaaattgcatgcttataattttggcgattcaaaactttgaggcacatcatttcttatttaatgctctgactattccattagtataaagttcccatccgttagattggatctcccttgatcaaatggtgagcatcttttgggtataaattcaaaattgaacatctattttgccatttcaactttcaaccttcgagctttttgcaaaaatctcaaccaccttcttcccaaacttgcatgccctcattatctcttatatttttcttacgtatttcgtctagtcatatttctaatcctagaaatcatcaagacccagcttttcaaccttcagcgtttccatcgcgaagtttttctttgcccagaaattcttatcaaaacagtaagtgacacactctctttttctattgatttttcattctattctcataatttctttttcttagttagtgttttccttatttgcattactttgtcatttgggtattttgattttggatgtttgcataaatctagggttaagaaaatttaaggttatacaagtcgaagaattttgggtttatttgtgttctattttctagaaattgagacattattataaataatcatgtctcaattttgctcaaaaaccacaatcctagaattcttataatttgtttatcctcaactttctgccataaaatttaagcccaaaaatcaaaaacctcaaaccagtcttgaattaaacgacaagaaaattaggaattacattgttagggttagtcaagatgaaacttctagtcgctataggcaattcttacaagaaataatagatggtaggtgtcactatttgcgagaagctgcttgacttgaaccttcaaacttgattaatattcctttagagaggccaaagtttttacctctagtcactgttgcaatttcacaaggcgacttagattttgaaattatggctcagaaagcatgcaaatcaaagatccctcaagaccctacagtcaccttcgaggttgaactgatggagtctaaagtcagatccataggatcttatgttgaggaagtattaaggtcatgcggcatcaaaaatgagcaaggatgccgaattaggtatgttgtcgagggggagttcagctgttatccccctaaacgtgtaacttgagaagagggttgtagcaccagcgagccttctaggataggcgcttggagcctataacatattagggttggggcagttttgcaattatcttggcattgcctctttccaattggcgcccaattcataaaggatattggtctgtttgaaatctctatatcatattttgaagtgggagtg

SEQ ID NO: 387123 - DNA, 1585 bp, Cannabis indica
tgttcagtcccttcacaaattgggtttcacttcagccaaggatatccttgggggactagagggttgggccagggatgtggatccaaacttgcctatgtattagcagatttacttcttcttggtacttcttaattgatgaacaatgtagacttgaaagactaatatatttatatgttttttttggttacatattttgttaattatgaactaactatagttttggtatgtaatttattttatgcatctgcacatgctctcatcatattaaaaaaaagcttctatagaatgatatttttattgcttctgatagttatagtttaaagtaccaagaagcttaaatttattaatcctatagcatcactttaacttgagcaaaaactcacagttaacaaaacaggtttaaacgacaacgctttgcctcaccacccaactagcaagagtttaaggagagccattctgatatagaggccattctttgcttgtcgaaaataagcagtccttggatccgaatcaacatcaacaataatttaaaattgttaatgttcggaaaagaaagaccaaattgtaatgtcagtaaaacagtaacataaaatgctaagctaaagctctcttacacagctaaaagacatgttcagttggttgccaattatttgaccatgttaacattcaaatatagacagctcaactggtgttacgatggcattttaacactagcaggattttttcaatagctatacatatcactcaaagtcaaaagtacattctttgatctcacaagcagaattagattaccgtaattgagaggccaataatctgataagacagttcaaccaaagaaccaacagaagaggccaagatatgagatctactttaaagaagacttgctgatataagggagggtctatcgacatgatgatcaacttagtttctcaggaactaggacaaatcttcccttgatagggggaggactgacctttcctcaatggtcaaatggcgaaaatagccaaatcttggcaactagcggtatggggggccgaccagggatctttggcttggcaacaacacccattgtacagctaatggccatcgaaccatcaacaggagcatcgttggctgactagagtacaacacttcctccccaaggggagtgaggtgcctagaggtttatcttcaactgacaaggactgagagcgggtggaaacacccaaaatggcgattcaataagtgaaactgataacttcagacatctagatccactaaactctagaaattggtgtgatatacctcctgtcaacacatccaacatcagttgactgtaggatcactggcggccagaccctgccctttgtagttctggctgaccatggaggaatactaggcggccacaccctaaccaattcaggtctggccagccaagcacaactgccaggtgtaggcctggcttgccaaggtcagctctcgtacttgggaatggctgaccagagtgtacaatttagcacaggtctagccgaccttcaccataccctctcaaagggtatagccggccagccccttgttgggttttctgccctaaataaaacccatt

SEQ ID NO: 387124 - DNA, 2208 bp, Cannabis indica
tgaataagagcgttcttagattaataggtgggagaacgcccacttagctacattatgggttgcgaaatcacaagttctattaatattaatacagttacagctagtaaaaaaatgagagtaactattataaaaagagacgtagttttctaatacccaatgagactcctttccattaagagcattgataactaccctcgagtcgctctccataatgacaaacttggaacccagctccttcgcaaccgatagagccaagcagcaggccgccgccttaccacataacgcatcagagaagtccagcctagccgattgaacccaaaccactttactaaggtagtttctggcaacaattgcactgcacatgctaactaatcccacttttacatcgcaattcaacttaatccaatcctcaaggggaagggaccagatctccttctggcataagtcgggggaggggggaaataaagaagcataaaaatctgcaaaagaagtacaaatagagtcaatacacttcttcacataaactgtaatattactgtgaaccttttcatttcgggtctgccagatcgtgtcaactacaaacgaagcataaaggaaaaccgcatcagcatcaattcccctgtgtttcaggtcccagatgaatttgacccaatctcacatacggataccagtgtcacaaatatgataaatgccccaaggcgaggacctccaagcatgtaatgccacatcacaagagagaaataagtgtttcaaagatttctcgcccgtcccgcacaaagggcagctcgcatcctgaataggaaatctcttcttgataacatcacgaaccgagagagctttggcaaggataaaccaccaaaagactttatggcactccaaaatttactattccatagcttgttccagagcgacggagcaacctcataggggagccctttccatgacctggaaaaggtaggccgatttacatgaaaactgactattcctttcaagagtccaaacccacttatctttgccttggccagaggggggcccactttttaaaattgcatacacgacccacttatcttatcctcgtaagttaattatataattatacacgctctaataattattcgtgatggtatggatattaatccgtaaattattgggaaaaaactatagttaataggaaaaaaaaattacaataatttattttaattttaataaaatctaatcaaacaccattctcaatacttttcaaactcaatttcctcaaatctaattatatgtattgaataattaaaaatattaggtaagcatatcaaaacattattaacaaaaatcaaacaataaccgtaaattaataaaattctaaaaaagtaaattaaagatattaaatatcaattaaactggtttaatatattttgagaatttttttttctttctgagacaattattttctttctttttccagtcatttccttacaacttctttacttcttcgaccacaatgttttcgcctttctcttcttcaactctagccttggttcagacggttccctcactgacttccattctttccggcatcaccacggctttgaccccaccatacaccgttccaccttcccagaactcccattcgttctttactggtaacaatccctttcttagaaatcaaggccatatgcttttaatgataactctggttttcttgcaaattaaggcctatctcgagcctttttcaatcgaccttctcaagatgatcgatatcgctttggaactggagatcaaccaaacatcatttctttgtttctcttaactggccaagataacttttagccttggaagcgagcgacattgattaatatcgctgccaaaaataaaactccattcattgatggcactttactccgtccatgattgaatgatccctctctatctgtttgggatcgatgcaacaacactctgatgtcatggatttttcaatttgtgtctcgtgaaattggtgatagcatcatgttcaaaactattgcccgtgaaatgtgtacaaacctccatgatcatttcaatcagagtaacgaccctcatattctccaacttaacacctctgttaacaatgttaaacaaggtgataactcggtcactacttatttcacccagttataagccctctgggatgaactcaacgagtatcaaccaaacactccttgcacttgtggtgctatg

SEQ ID NO: 387125 - DNA, 549 bp, Cannabis indica
aattttttattccgtagtggggtttggttcaaagtaagttacagttgatatgaacagatcatacttctttacatgcaattggcaacttgcaacacttgcttttttgaccaaactccaaagagcaaatatttggggccctgttataacgtctagtgttacgtgataaactactagattgtataggtataaaatttaagctgggtgaactaactttttataaggaagggaagaaaaaaagaagataattcagccttatgcatgggttattcttcatgtcgtcaaaaaataaaaatggtaatatataaaaaagcaataaaagatagagctacttttgcatttcaattttgagtttatatttcatcaaaaaaaaaaaaaaacacacaaattatgttatgttactattaatgtttctcacagtcacaattgaattgctatttgaaagttgaacagttaactttacaactaccacattttcttttttttttagaaggatataccattttctttaatacatataaaaaaaattgaaaaattctacaatgcacaccc

SEQ ID NO: 387126 - DNA, 1812 bp, Cannabis indica
acactatcaggattagggaacttaatatgcctgctcgtccatccgttcttgtggagggaatagggaaggccgtcctggtggagcatgaggaagactcttcaaatgatgatgtcccgtttgtgcttgtttgggaaaatgcccctgcttgcgtgcagggtatttataatttgcacttacttcttttgtactgtacttttacatacattatacttctaactgtgttgttttgtttgtgcagaaatgtctcagaaggtactccaggcattgaagaagagagttggggacagctcgggccagtctcctccgcccaaaagatctaaaggcggtgagactccgtccaaagagaaggcgccagtcgaagaggtcattaacctttttgaggagcggcctgttgtggaccttccagtccagaagttctcgaagttaaaaagttctagaggggggagctcggacaggtctgatcaaactaggaccccttcaacggccgtggcgttgagcacggaggccaagaggggtaaggatatgctccggtatatttgaaccaatcacttcctgaagtgagtgatcaactgtctggggcggacaatgagctatctttagagctggtcttaggaggagtcttgaaggaagctacacgggtaactatctccttctttctcttactctcttttttgtagctcggacttttaacacttttttcgtgcaggtcaatgtgaagatggcttatgcttactcccgagccaaatcaactgctgccaagaaccttgccaccaccaacacactacagagggaggtggatgtggccaaaaaggaggctcaggacgtgaggaatgagctcagggaggtgaacaaaaagcttcttgctactaacactagggttgaggagctaaccaaggaaatacaagagatgcctccgaccgagcagcttgaggcagataatgacgctttgtctaaggaggtaaatgagcttaaagacgagagggagagtcttcgcactcttctcacaaagttagagggggacgttcggattaagcagaccaaagaggaagagctcgtgaaggaggtggaaagcctggagacagccacccagttttctatgaattttgaaaggccaatcctgaaggaaactttgattacctcggtgaatccaaggggatgtatcttgatttctacgcagattagaaggccaaagaaaaccccaaggcgaccacttctacagttccaaccgacaagagcaacgacacccctgctgctcagactgttgaaccttcggcccctgcagaccaggctgatccatacacagagcccgggaccccttctgtttaaacacttttccttatcttctttttttttatctgttcggcccataagctctttattagagacaaatatgactggccaagcggtttttaaacttgggttatgttttttcatcttaagacaactggcttaccaggcagcttttaatccagttttaccgtgctttgttatcttttttaatgaatgttgacccttgttttgataaccatatgtccaactgttggaattattttaccaggatcttagatttactaacaagtgtgttatttaacatcctaaatatatcaccaagatctgagtctgaatctccttctcttgaatctagattcttcacagccttacacactatgattgagtactacttgatgtgtgtgggcactcactcattcactataggctcactttagaagagaggaagagagagagagggtggtttcggctagggtataggaaggaggctcaaattttatttgaaggaatgagatgcatcat

SEQ ID NO: 387127 - DNA, 1562 bp, Cannabis indica
gcatcctcctgaaattagaatgttgcataagccactctttcattgccggtgacccccataaaattcagaatctgataataacagtcagccactgttcaactttcataacatctggacctctcagaaagactggaggtacctgcttacggaacctttcgtacagtggttccatctgattcacaacagaaaccggccctgccagaacaacaagggcaggagccacctgcacttcagatgcaggtattgtatgagcaccctgctgcctcagacaccaaatctcttcgtcttgctcactaatcatggcttgcattgttacaaacctattctcccattcctgggcagcgcggtgggttaacatctccccgagtcccgaccgcgtgccctacctcttgagcctctacctcagccatgaatattcaggagaaactgaactccctgaacgccactggatctgaccgaattaccctagcttctcgtgttccgcctagcatccactttaatagaacaaccaacgaaatcaagaactagcctggtcagatcgcgatcaagaataaatttctaattatcgcttatttaagaaattaaaacatacacctattcagctatcaggctactaacatgcttcctatcaggctttttttataacatactaataaaacaattactaaagcaataaaggcttactgaaccgtgagtcgagcttatctctgatgatgattgtgcataacgtgacgatcttcgaaagacaacctgttggctttgataccgaattgtaacaccctactagtttagacgtatcattgtgattttatattaattgtgcaatctattgctaatcaatgggtttgttaaaaattgtaattaattaaaactttactgaattatccttttattgaaaacacatatcctttgaatataccggatcctgtatttaaaatatttataattgtattacaaaatattataaatacaaaaattatcatctagcgactaatcaaaatacggcctgctaccccaaagattgtacgctccaggtttaaccgtctcgacatgtacaatcttcatctgctcgcactcactgctgttcagctttcgctttgccctttcctacacatgtaaacggtatttgtgagtcgacgaactcggtatgaaaagtataatcataccataaacattacacagattacaattaggcgcccatacaccaaatcataaccctatcccgcgtctcatgcgtactgagtctagaacgtttgtacgacagtactattgactatagtatcagcctatacttggtattctagtcgtaccaatgtggtagcgtcaatcaatacttatgccaaacatacattcatcagtaatcaatataactctatgtatattgataccgctatttcaatgtaatctaacaagcaatcataaatatgtatactaaatatgtaatcacatatgcatatcattatactaatctttcctcgattctgaatttaagtgtgtcgatcaacctgagtggaactgctgctcgacgatttataggcccctaagtcacaatatttttaaaa

SEQ ID NO: 387128 - DNA, 1043 bp, Cannabis indica
ctttagtggacttagttgcattggattttcagcttttatttactattattggctgatattatctaagtaaaagtcatttatattaatcattttacaaaaataaggaaaaagaagcaaaaccatttttccactcaaagctctctctttctctgtcgaaaatttcttagggcagctacgttttgatttgttttctgcatttcaagctgggttaagcaaggggtttgagatctcaagttcttggtcagtgtcttgtagcttttgttgatttcttgagttggaagaaaaaggaatttttgcatgttttggatttttggtggctgtagttgctgtagctgttagatattgtttgcagaggttaaattatgcttgatcgtgttggtttaagcttgtattcgtggttgctagttagatttaacaaagtttgagttttgaactcaaaacttggagctttaatggtggtttttatttctgtgtatgggtggctgttttattgctttagaaatgttcattgcagtctaattagcaggtttggaaagtttggtttttattggggttgaattgttcgagttattaaaattttggtgattcctgcactgaaccggaattcctgttcagggaggcctgtaggaaccggaattccggttggcttccaggaatttttcccagatccagaattccggttggggcaaatttgggaaccctagtttttcccatttttgagttatttaggatattgccatgtaatttatagataggtaaacttttagattcaagtttaagtccccggaacgtgatttagcgtatcgcttatcagtgttgtgattgatgtgatttaggagcctgtaattcacggggaaaattttccactcaggttgactggccctcctgaattcgaaatcaaggtaagattagtataacagtatgcatatgtatttacatgtttagtgtgcatgttagtaagcctgttagattacattagatatgtatgttggctttcgtgctattttgacagtatcacatcagtacgactagagtatgactag

SEQ ID NO: 387129 - DNA, 5722 bp, Cannabis indica
acgcgaggcctcgtctcattgtcttgcaacctcccagcctcccatgcaagcctctcattactgtggctcgcacagatgctccatcacttgcgtaaaggctccacagctcacccaaatgcttttggccttgtccaacagctcatgggctcacacaatgtctcatgggcttgcaaaaaagctcatggtctcgcacaatggctcatgggcttgcacacccaattatcacaatttagcgatcatactattttagccataactctttcaatatatattggaatttaacgattcaaaatacgttggaaaatgagcaagagatctatggactttatgtctaagagaagatctaactccataagagtccatatgagaatcctctaataattgtaacatagtagttgatcttattagctctactcgtgagttattatggggttgacctccaagttgcatggatattccccaagacttgcaagcattgatcattgatattgatgaaccctaggccacatgcagctattcagtcattccttggctgacacttataggcgatgtctctcgaccgtcgagactaattgttgactaagttcaaaaatccattctttcaatttttagggttaacacttatcatagtgggaggatttcaaggaatccatcctgttattatttggatgaaactagtgatgactcacaatgatatgttcaagaaagaaaatttaagataaagctaaggatagttaaaccattacatagatagttataatttattagaattatgaggataagataggaaatccttctatgtctattcaaaagagttaaacacaattcccaatccttatgaattttcttacaacaaaatagttttatggtatctctggtaattaagtattcttaaacaattattctacactaatataatactaggacgttatgtggatgagttagtctagaaagaatttatcgtttctagaaaaagataaatgtcacaataggatctcccttagtaccaatggtaagaggttaaatgcacagttgtgtatgcattaaaccagacacctattgttgagtgggaaccctcaaaagtgtaatccaacaagagaacatagggatatagtcaagaaagaatctctagattaaaagttacctatatattagatgataggggtgatatttttttttgaacccgtaaatctaaatcaactcaaaatttaatatttgagatggtgattattctagaggtagagaaattattctggatatgtgtaaaaacccatctttaatatcttagttcaactagtgaaactaaataactatgttgctttgaaaaggcactagaaagttattcaaactaaaggaagttcttgactgttttatctctattctatttttggataggatgaaaattgtgtcttctgtacattcagatgcacttatcaggcagtaaagaaatcagtatcccaagacgagcaatccatatagaaaaatggcattccacaatgtcctgtgagcacaataggaagtaatggtggaaaaagttatttcttgttatgaccttatagattttttgcttgggtaaagtcaaacacattacactttatatgaatattgacacaatggtttaattgaaatgcacttcttatttaatgttagtgcaagtgggagtttgttgggatttttgttgggattttatgccctgaataaaacccattacaatgtaatcttattttctatcaatatatgattagaaatcttttaggtttacatgtttcatgattatagttttaacatataagttctattaaatctcgaacatatagttactcatgattatagtaatgtcatgacagtggaaggtaattgtgattatatgcttcaaactatttagtcctatgatttattagtgcactggatttagattgacgtgataataagctataaagtttacttacacaatgaaatgttgaatgtcctttcgagggcattagtaaagtatagtattggatttgttgacctcgcttttagccaacgatagtgagttaattaataaacgattaagaatataattaaaatagagcaaaaacaaataagaaataaagaacacaatatttatagagattcgacccggtgagtgtggtaatagcctactccccttagattgtattaacttgagataaagaacaaagtgttttcctctctcaaagctcttacaatgaatctctgagtaattctcttacacacctctctctgaagcaattctttcgatccctttctcaataaggctaagtcactatttatagggcctccatacatgagggtaggtttcccttttgcttataatgcataaaataggaaattacatttattacataattataattcacaaaataggaaactagaacaggttgccatatttctcgaatttgatctgacgattgtagggattgccttcatgtctggactccacaacatattttgaagtaattaactcttgatgagcaatttggcaagctggatttataccttctcggatgatcagttttttgtcttactcgggtaagcaaaggttatacatgcagacgtacaatatagagtctgttcgagacattcagctccgcccaagtaccagaaatgtaggacacatgtcacttgatccttctgccacgtcattatgcaaaaaaaatggataacattttcccccaagtctacgcgggaccttttaggttgcacgtggacttcactcggtctagatttttgtctgaacgggtggcacatgtctgaggtgtcgattgatgacccgatatgactctgaccaagggtctctttagttttggctcattaatgttcattaacatgtacctcgatctacgccttagaattagcacttgatgacggttattcttcatataattgagtgcataacgtacacttttgggggaattcgaggcatttaaagtttgaaataattactttgcttcgttgatctgcttataaatagggttgaaaaccataatcaatcacttttatccattttcactcttgaagaatcagagtaaaaaatctttttacctttcaattccttcgaagaattttcagaaagcactggccaacgttttctgaccagaccaaaagcttcaaatcagtgagtaagttcttcatttcgttccttttatatgttttcatgtttaatgtttttggtttctattgcaaaacttgattgttcttgaatttattctaggagaaccatagaaaatttaggtttaggaattcgaaatcttaactacgcttaaacacattgcctgatcataactatgttttaattttgattccacgatactcactttcacttacccatttaaggcttagtgaaaatcaaacctaaattcaaaattttgaacttctggattataaacttcattattatgcaaaatttctatttttgattttccgattggacctagtaagtataattaatctattttcattcgttaatccaaccaaatgctcatcttgtgtcctacattttgtatataaaccctagtgtgttttggggagtgaacatcgtatcgaccaggatatacttcaactcttgcacgaggatcatcctcgcctctttgctagtttgtcctcatccagtgatagccattccaagtctagtttcgaagattgggagataagtagtgaacacacatcttctccaaaacctaaagtgcaacaccatttttatcccggctagatcgaaggttaaggctacgaatgcttcatctgggaacttagaaaagtgtagagggcctatctactatccaactggacatatattgtccgactagatattgttgataccttgcctgtagggcatccaaatcatgctgttgcaggtaaacccattgctacattcgttgtaacgatcgccaaacacatcaaccagactctgcctaggtctacgatgatggcgcgtatcaaacaaattgtacagaaatcttacttatccgacccacgcatagcccgtctcaccagaatggcgagtgtggaacaggcttggcctgctactaaggaagaagatattgttagggacattaaagtccaagagatggaggatcagggcgaggtctatcctggcaccccttcggaagatgaagaggagtaaggtgcagctcagaggttgccctttggtggttttaacaaagaaggatgacatgtgtctgagatggggaaatcttggaggctggtaagaattacatcacgacgaatacaccgaggctattcctctgaggaggaagagtacattaggagatcggtgggtttttcctctattcgtggtgactagagcaaagatgaagaattttctcaacggtggttacctaggggatgtctaatgcttccttcgctctcctaaccttttggaaactactccaagggaaggctattgcgcttggtcaggcactcataccaaccagggagctatgttacctttgctttcgtacttcaggaagattgctgactactaccacctttgcctgaccccatttactccgaaaggcatcaaatatctgtctgcctcgttcgtcctctatgcctcaaaaggatgaggtgagccgtccccgcacgatactaactggttcttcgatctgaagtcaagcccaaaacaagcaggtcggggtacttctatttttcctaaatcaaagggacatagttgacgggcaccacagattctgaggtgcgtaagataggaaacttcatggatgaatactactttgtcaagggaaagaataccatccacaccagcttttagtaggtgccatcatactgccctcctttcacattgaggctcaagaagagggcacaagaaattcttcacctgccagaatttgcacgaaacatcaccatcctggccaccgagacaaattttgtcaagtataaactcttcccgactgattttgtgccaaaggcttagaagaaggcagaaaaaggcagagttcgactaggtggtggtactccaccaggaggatccgagaaagaagaagaggaaggctcctccaagtgaccagaacgtgctatcaggatttgggagcctgagagacctgtccgaacgttcgcctaggtggagggaaaaggaaaggtcattctgaaagagcaagaacaagaaaactcctcagacgatgaacccacatctctgcttgttcgcgagaatgctcctgcttacgtgcaggatattttaactttatttttcatcccctatgtattacatagtatttgcctttaactttcttgtcttatttatatgcatccatgtcttaaaaggtgttccaggccttgaagaaaagatctggtgatagttcaggctagacccctccacccaaacaacccaggggcaacgaggttccatccactgagaagtgtctagccgagacagttatcaacctctgggaagaggtggtgcctaatttggacccttcacctagaaggtatcaaaatccaaaagtgctaatggggggagctcagatggttttggtttgaccaaggcctcctctactgtcgtggtgctgatttctgaggccaagaaaggcaaggagatgctctagtactatcttgattggtcactccccaaagtgagcaatcacctgtttggggcagacaatgagctgtccttggagtttctaatgggctgggtcctaaaggaagaagcttgcgtaagtattttgttctttatttttatcctatcttt

SEQ ID NO: 387130 - DNA, 2632 bp, Cannabis indica
tgaaacaattgacttcagggcactatggagttgaactgtacaaattagcatgttgatccagagtataagttgtccgcataggcagaaagtgtgctgacttggtgaagctgtccactattacccatatagaatcgtataaactggtcgtcttaggtaaacctaccacaaagtccatggttatatcttttcacttcaatttgggtagtctcaaaggctgaaatacacctgctagcctctggtgttcagcttttacctactcatgggtcaaacatttagaaacatactcaactacgtcacttttcattcccgaccaccagtatagtgccttgaaatcatgatacatcattgttgttcctgggtgtaaagagtatggggtagtatgaaactcatcaaggatttctctcttaatttgatcatttactagaacacaaactctatccctatatctcaacaatccacctggtgtcactaagaaatcctttgtagtatttgccttcactttctttctatgctcaatcaattctggatcactttgttgggcaatctttatcctttccaacaaatttgattgtaatgtgactttagctaacttcttgaccacgaactcaatttttgttgtagtcatgtcttctactaactttggataaatctgcttcaggtcatacacttgtcctagggctctctgactaagcgcatctgctaccacattttctttgccggggtggtagaggattttacaatcgaaattcttgaccaactctaaccatcgttgctgcctcatgtttagatccttctgagtaaagaagtatttcaaactcttataattagtgtaaatctcacacttctcaccatacaaatattgatgccaaacttttagagcaaaaactactgctgccaattctatatcatgagtagaaaagtgctcctcataatccttgaatatcctagagacataggcgataaccttccgtgactgcattaacacacaacccaaaccttatcttgaggcatcacagtatattacaaacttctcattgctggttggaaaacgcaacacaggtgcggtaattaatcttgcttttaactcctgaaagttgtcttcacccttgtcagtccgtagaaacttactattcttttaggtcaacttagtcaaaggtgttgagatcttggcaaaaccttttacaaatattctgtagtacctagctaaccctaagaaacttctcacctcagttgttgttttaggtcgaggccaatcccgaacagcttcaatttttttcggatccaccagaatcccatctttacttacaatgtgtcctaagaaacttacttgggacaaccagaattcacatttcttaaacttagcataaagttcatgttcttggagatgttgtaacaccatacggaggtgttgttcatgtgcttcctccgactcagaataaacaaagatatcatcaatgaacacaatcacaatgtggtcaagaaattccttgaacactcggttcatcaaatccataaacactgctggtgcattactcagaccgaaggacatcactagaaactcatagtgcccatattgagtacataaagtagtattggaaatatcctgaatagtattttttgtagtagtggcgataatggttgtcgaggaggaaagggcctatccgggaggatagtcgttgtccaggaggggagggcctctctgcgaggatagttgctgttcgagaggagagtggttgttcgggaggatagtggctgtcttgggtcaaagcattgatctgggccaagggtgtcgaggtgggtacatgctacaattggtagggactaaactaaagtaagttctatattaattaattttataaaaaataggggaccagtactgcaatcaagtcttttatgaagtcagtacatttcgaccacaaacgaaatgtgtggtgttgtgggactaattttgtaacttctgttattgtgtttgtgtgtatacaaatttttatattaaaataataatagccatgggacaaaaaaaacctcaaaattaatatcggcaatacaaaataaaattagattctaatttttatatacacattacacacactatgaaaaacgtgtccattaaaataaatagattctctaaataataataaaatatgagtgatcatactttcctggtatatatcatatcataacgaaaagatatagatacttgtagttgtataaattcatttgttgttaaaaacaaagattcatttgcagttttatgatgtgaattaaattcaaagttctgcgattaaaatatcaaaataaataaataatcatttgcatattaaatacttaatgatcacggaaatattaatttatatccaaccccacttcttcttcctttctttttatcttgcaatatatctattcatatgtaacagaattattagtttaacggagttattttaatttttacactaattttaaaagaatattttaattacttaatagaatattctttaataattttataatattattatatgaatttaaaataaattatttaaatattttatataaaaaaaattaattaattatatatattaaaatttaatattatatctatatataatcacttctatatataaaatatata

SEQ ID NO: 387131 - DNA, 1560 bp, Cannabis indica
ttttttaaaaaaaaaaaatatggaagtctatagtttcatttcaagagaaaaataaaaaggtttccataaaaaacataaaaataataatgaaataaaatgttctttagcttccacccgaatgcagcatagtaataattatagtttataagtgtgattaatgccattgctaaaaaaaataaaacaaaagcaaagataacactaataccccattaattgagtactcaagtatgttacttttaacttgctatgacaacgtcttagttaatatttatgtttgaaaacatatatcagaatatatatatttttttaaaaaaaattaatgacggtgtttattacagttataatatcattattgtaaatttttagtttactttgttgaaaataagattgaagttttttaaacacgcgttataaactaaaatattaaaaattctattttcagtatcataaactatttaaaaaattttataaaaataatattataactataacaaatatcgtatgaaaatttttttaaaaaaaattctaacgtataaatctttttttagtttaattgagtttttaaagatagaaaaattgctatccttattgtatttttcgtaattttgagtttatttctaataaggactagaaaagaaatgggaccctttttaaaataaataaaaaagaaaagcctatcctttcatagaaaaatgttatatactccaaaaataaactataaactaattgcactttgttcttacaaagagtataaaatgaaagaggtggaaggtaaggcaaaaaatgacaaagggttgtaattaggatataggggacttatggcttttccacattaaatcctttgtttccatgaattgggacttggttatattaagaagaaaaaatgccaaaaatggaattgaagcttcatattttgttgcctaaatcatagaaataacacacatggggactagttgcttaacaaagtcttcatgttgtcaccataatgccaaatttcaagcccctcctgaaatatatgcagcaaccaaatacaacattaattattatttataattgccctaaaattcatattgagtagaatttttaaggctgatctctgttgacttttctattatactagataacatcaatgtttcacgttgattgtttcatcagcattgctattaagtattagtggtgcctgcctaataccacttatatggaatctgatacataattacaccaatagcagtataacacttaaaaagatgctagacactagtagtacattttagcattaatcttatttcattagagcaatactaaaagacactagtggtgcttagcactctctaatgtgtcaataacgttattggtccaattaagtattgagtcctatatagtttaatataataacttttaaagagtatggctagtcaatcgtgatgcgatatgtctacaggtgctaagcagggctggccctgaaacaaagtgggctatagggaaaaaaatttttttgggcccttatgttaaaaaaatgtggtatttttcaaaatcgttaaaaaaatatataattttaaa

SEQ ID NO: 387132 - DNA, 3270 bp, Cannabis indica
tttgatggtgaattttaagctaaatggagaatcaaaatagaactccttctgcaaaaggaaaatctatttcacctagtctctgttgaaactccccggattgaattgcgtaaacattatagttatgcagtcaggagagattataactgatggtagaatgataatattcgcgccaggtttatcttcctgacttcatttaatgaagatataagagaacagtatgactacttagtgtatgcttgtgacatttgaaagacaatgcacaataagtatactgccgttcatgaccaattggcctatgagagatatgctcatgctaacaagatggacattttgatagagttacgaagctagagagaaagataaataagatttgcttttcttcatgacttatttaacgatggtggaataaattattctaaaccactgacattatttctctcttgcttgaagatttgtgaatagaagatgaaaatgattctaagaagtgagaattctacaaagtttgtgatggaagaaaattttagaagagaaatgaagaagtcaactttaatttaaattttaaagacaatttatttagttttattgttctaaattttaaagtttggtttatgtaaaaattttattttgaacactttatgttctttagataaagtttatttaatttttaaacttatgtgtgcaaagttaacaaaagacttcaatgctcatagtataattctaaaatcaagtttaaatgtattaattatttattttgactaaataatagataagtaacttttttttatagtaacttattgatgtttctataattaagtttgaaatgaatgaaaaatttgtttttgattttacattactaaatttaaagattaaatgagatttaattgaaaaatttgaattactattcaaacatatacaaggacatggaattccattccaatcatgtgtaatggatgatttgttaagaaatcattattagaaacatacacagtcaattagattgtctattgaatgtactgctggagttgatagtgaggctgcaagcactatgatgcagaagttttgggatgcaaaagttctatccatatatggagactttatatggcaaggccacaaggatgcttgaagagcaaactttgatcaagctgttaaagcatccccagatgattgttttgttttagcattattatcccaatttatgcactctgacgtggcatcactcgatgatgattctaacctcatcagattggcctcccacggtctctaaaacatcaagtatcaagtcctcaatgtctttagtaacactcaccatgctctctcttttgctcgcttcgataacaggtaagtatactcttctctattttgatgtaggagttcctctggtagtctctcacttgatgtcattctaggctcaaaatgtaatatcaattgaagtggtttctgtggaatgagatcaaggaaggtgaacttatttccaaaaattataagtgttgacctcacttttggccaacaacagtgagtcaaattaaagcggtttaagaataatttaaataataaatatgaataatgtaaagtaaagaaaatgccaaaattatagaggttcggcccctttatgatggtaatagcctactcccctttagttgtattgacttgtgagtagatgaagaagaaaatcttgatccctctcgaaagctctacaatgatctctaagttttttattcttgaatttagacatctctcgtgtgttttctctgaataaaattcatgtccctaaattgtgaaatgattcccaaaatcaataaggaatataatggcaaatctgtttacatcctataattacaataagtaaaatgggaaactagataggtttgctttctttctcattactacgaatctatcccatgaatttagggatattatcgtgtcttgcaagcttgaggatatatacgatatatctctaaagatatccaactcgtgacctctggttggtatatgcaaactgccttcatgatggagttgattggatgttcttgtacaccgtgtttggatgtttagctccttctcactctgagcattagatctctatgcatggtttcatgtgagaagaatcttccgttcaagttatgaaatctatcatgtgtcacccaagcagacgccacatcaccttgtgtagaaatttggattacattgctccccaagtctgcgcgggagcttcttggtcgcacgtggacttatttagtcatgatttgattagattgttgacgcgtgtccaacttttacccttgatcagacatgattgattgaacatcccttcgatgtctagggcatttaattcctcgctttaaaagttgtacctcgagtcacacaatgaaagttgtgtgacaccgcatgcatgatgtttgtactatttcaatgagtgctaaagtttccctttttttttttcgggggggggggggttaaacccggaaaaattcaaattttaaattaccatcagccccttttaccacctatataagggatgaaatttgaatttacactcttttagccattttcattcctgcatattactagagcaaaaaagaaaaacctttctttttcctctcaaccctttgaagaacccgttgttgaagatcatttgttgaaattatcaagttagcaccctcccaacaggaggttccgtcactcaaacgggacgataagctacagaccaacaacctcaagggggctggccgaccagcttctggacaacacaacgtcggccagcctgcatcctgcaggtgcatggctagccagaattggacctggcatgactttggtgcaaatccttactgtggggcggacctctataaaattctcatcgaattgcttggggctgaacctctataaaattattgtgtctttatttactttataatatttcagtcgttataaactacttatcgcttacaaaattagactcactgtcattggctaagagcgaggtcaatattttggtactttcattgagagttgaactcgagagtcgctctttatagtaaacttaatcacaagtacgatggtggtaaagactcgtaggggcgtggtagatccagtgaatccacaggtggtggatcctgcactacaaaacccaggaaacacaagggttccgccagtctttaatcccggacagccatcaactacgggtcgcggtgtgacgactcctgtggatgagattgcgcctggtgtgcaagagactgggaataccagttcagcagccgaccagggcgttcatag

SEQ ID NO: 387133 - DNA, 1070 bp, Cannabis indica
agtcacgtttccatcattggcggcattattggataagtttggttgatcattcactagtgactctaaaccttgtcgttgcgcataaactttattaatcttgaaaatttaaaaaaaataagaagcaaactgaattaaaacgtcttataataaactaaagtagaacgaaaaataattaattttgatattggttaatttagtctcccgcaatggcgcaaaaaacttgataggaattttttataatgcaagtgttggataaatctccatactaactgtcacttgagaaaaataccttaaacaagttacaaagaaaataaagtaagattttttacaagcctcaacaaaccattataactcttcgagtactcgggtctgtttcataggcttaaatctttcagctttctacaatacaagaaaataaataacaatattcaagactccaacaaattttcaacaactcaaggaaaaatacataacaatcttttataactgtttctcaactatttttctcagctcaacacaacatcaacaacaatataaaaggagtacaacctgcccattttgatagagttttttcggtcctgttttttggcagtagttgtagccctctttatgaagataatattactcagaaaagagagaaaaacagagagagagttagatatatttatgtaattccaaaaaactaaaagaaaaaaagagagaaaagcttgagattacctgctggttttgtggcatgaaatctccataacctggtaactgttgtgatattttgcacacgcaagtgtatgtatcgttacaagtagtaaactcaccaagagtgaggtcgatcccacagggattgtagttaagtacgttgaaattaatcttttacttctatttggttaaataaaaattaagaaagtaattaaaaataaagaaaactagtaagaagcaattatttaagaaaattgacagttaataaaaattagggcttcgatttcaattgtttctattgattatggcctaatataattattttcctaatgttaagttcgatgcaataacaggtttactaaggtaatttatagtct

SEQ ID NO: 387134 - DNA, 2617 bp, Cannabis indica
ttttttcaaataattattatttaattatattaaaaaaaatatgacaaacttaacatattttttttaaaaaaaaatattatttttatacaatatatacatatatataatatatatttgaaaaaattacatatttattttttttaaaaaaaaaatatatatataaaataaaataataataaaaaatatgatattttaacaaatcaaaataagataatgcatatttaaaaaataaataaaatatcaaaatatctcaaaacttatttttaaaacttaataactaatcaaattattaattaataaataaaataataataaaaaactttatatgtatatattttttttattaactgtatatacatgcatatggttcgaccaccatggaagcagttggaggaggtggtgacgaccaatagctgaagagtcgccttagtcgtcggtgataggcaatggcaggatggacaactccattcagagcttatcggatcgtacaacccaattgagaggagaaataaagcataaggccttgtaaacctagagcataacatgccccttttcctgaaacgtttaatcccctttaacggagatactcataggaatacatgatctcctacctgaaattctcatttctgcgtttcggatctgcacatttgcctactctgagaggcaagcgttctggccttgatctttcctatagtcttgttggtctgttgtaccgattcaggaccttaatatttcctttctctagtttcatcccagtgaattggagatctacacttcctaccatataacatctcgtagagagccatccctatagtactctgatagttgttattgtatgagaattctatcagtggtaggtacttgcttcaagagcattcaaaatccatcagataggctcgcaaacacattttcaagtatctgcattgtcctctcaaactgcccatcaatctgaggatggaaagttgtactaaacttgagcttgatacccatggctcgctagagactttgccaaaattttgaggtaaacttcggatccctatctaatataatggactttcgaaccttatgtaacctcactatttccttaacatttaggtctgcatattgatccactgtgaaggttgttttcaccgatagaaaatgtccagacttagtaaattgatccaccacaacttaaatagaatcgtacatccccgtggttctaggtaacccaaccacaaaatccatggtgaaatcctaccatttccactcaagaagagttagaggctataacaaccctgcaggtctctcgtgttcagccttaatttgttaacaagtcaagcaccgggctacaaattctaccacatctttcttcatcacgcaccaccagtagaagggttttaaattttgatacattttggtagtgctaggatgcaacgaataagcagtggtatgagtttcctcgagaatctcatttataagctctacactatttggtacacacactctagttttgaccaacagtatcccattacctgacactgtaaaatctttagcttaaccagctaaaacgtcttctcagatcttcaccaattctaaatcagttaactgtacagctttaattctatctaacatattaaatctcaacgtcaaattattaagtttgcctacaacaaactcaatacctaatctgaccgtgtcatctgctagctagggtgaaatcttgatcaaactagttacttgcccgggaccctttctgctcagagcattatccaccgcattagccttccctggatggtaaaggatttcccaatcgtagtccttgacaactcaaaccaccgtctctacctcatatgcgaatctttctaagtaaagaaatatttgaggctcttgtgatcggtgtaaatctcacacttttctctgtagagataatgtcgccaaatcttcaaagttaaaactactgcggcaagttctaaatcatgagttgggcatcactgttcatactcctttaactgacagaaggcataagcgattacccgatcatattgcatcaaaacacatcccagaccctgtctggatgcatcacagtaaactacgaacttctcgaacttctctttatctaatggtagggccaataccagagttgtgatcaaccactgctttagctcttgaaagtttccttcatacttgtctatccataaaaaccactgtttctttttggttagttctgtcaaaggtgttgagatcttagaaaatccctcaacaaactgacgataataaccagcgaaacccagaaaacttctgacttcagtaactatctttggtcttggccaatccctaacggatgcaatcctccgtagatcaaccttgatcccatccttactgacacactacaacatttaacactaatagcggcggacctctccgccgctattagtatcaattgtggccgctaaagggtaatagcggcggacctcggccgctattggtccgccgctattgcttggccgctattactagtattagcggccaaaaacatggtccgccgctaatacccattaaataaaaaaaacaaaaatttttttataaataataaatatatattaaagttatatataaataaataattaaattattt

SEQ ID NO: 387135 - DNA, 1803 bp, Cannabis indica
aaaccttgacaatcacgaacaagtaatccaaactgcgaaggcatttcaattgaacttttaatagcttgaacaacaatcaaggaatcagtttcaatcaccacattcagccattgctttctttttatccaggctaatgcctcattgataccaattatctccgctacttcaggttgcaccaaaccgatacgactcctcgaaatagcttcgataagatgaccatgtgaatctcgggccacacaaccataaccaaacttgttctccggttgaaagatagcgccatcgacattgacattaaccatatgtatcattggtttcctccagtgctctctagcattgttactatcatctactaacaatgcccccattttttgtgattgagcactaatccattggtcaagagttattctagctgatcgcaccacttctaatgcagaagaagttttaccattccacacaatatcatttcttacagcccagattttccaactcaccattgcagcttctcggatgacatcattggactgcgaatcaagaaaattaaagaaccacaagctgaaatcattaccacttatagcagtagtgttgacacaagataattccagcaagctctactaaatccgcaaccaagaaggatatgaaaaatagtttcctcagctaagttacacaaagggcacataatctcaacattaacatgcttcatgttcaactgaacctttgttggaagacaccccaaaatagcacaccataaaaagtgacgcaccttaggaggaatatcaaattgccatagcctctaaaatccttctctgtcaacttcaaggttcagggtgctgttagactgttgcaatgctttgtaagcagtcttaaccaaataaaaacctgatgaagacttgttccaataccatgaatccctaaccacactatcactcagctggatagagaagatgagttctttatctctatcaataaaaaggtcattcactacttcagcatcccattgtttcatccccaccgataacagacttgacacggattgcccctccaatgacggatgattagagctaacgtacgggtattacagatcagacaaccaaggatccaataaaatactgaccgaattcccacaaccaatagatctccttgcaccagacttcaccaaatcttgggcttcaaaaatgctcctccaaataaagctggggttttgtcccaaagtagctgtaagaaagctacctgtaggataataccttgccttgtaaatcttgcttgccaaagatttttcattagttaagagtctccatccttgtttaccaaggaaagccaagttgtagtcccgaagatcttgaaagccaattccacattcatgtttgtgtctacaaaatcgcttccaactcatccaactcactcctttagaagatgaattcgactgagatttctaccaaaacttggacatccttccttcaagactcgaacaaatctcttttgtaaggaggaaaacactcatatcatagctaggaaacgcttgggcaactgactttatcaacatttcttttcccgcttttgacaagaaatggctttcccaagaaaagattttcttttgcattttatccttaaggaatccaagaatagcattcttgtttcttcccatagtacatgacagccccaaatacaagctattctccatagcttcctccattcccaacaactcgcacatcctatgccgagtatcatcattcgtattcttgctaaaaaaattgatgatttcgcattgttaacttgctgtcccgaggctctttgatacacttgtag

SEQ ID NO: 387136 - DNA, 1057 bp, Cannabis indica
atatatatatatatatctgaaacatgtcacaagacaaaagaaaaagaagccaaaattgaatggtatgatttgtccaaaaaatgccaaacactagtcatgtttgcaaagtcccttaaatgtataatacatatattatgttaaaatatttatgtgttatcattaaaaggggatatactcaaagctaatccatgccccgaaagtaaaaggtaatatttgatcataaaggagttaaaatatatttcagccaacactattaatatatttatataaatatatatgtagattaaaaaagacaaaggtgtctctctatatatatttttatgtaaagtgtgagtaagccactttgatcaaccatggcactcaaactctcactgtgtagccgaagagaaaaaaaagaatgatgcacactatcaaataaaagaaacaactcgttttatgaaatgtttttttttcttattattgggtctaattctaagatataagattcatattacttttacaaagacacaaagtcttcagtaattttgaattttatttcacaacctcatcaaaatagaattgtgactcaaacgatatgtaaattcattgaagtgaaattaaatatgagtttcttctctaaaataaactttgtctctaaagaataagagatcacaaagtttcaccttatgaactacgttcgatttgataccttttaaaaggatacgtaggcaacctaattgccaaaattaggtacaatcgcaatttctaaaattctcaaagaggtcattcacctcagcaaaattcaaatgaggtcatctacctcaaaaatcccaaatgaggtcatttaccttaaaatatcaaagtgagttaattcttcacaaagttatcgaagatacaaaatcttttaatactatcggaactacgtttgacttgattcctataaaaggatacgtagacaacttagttgctaagactaagtgcagtcgccaataccacaaaaatggtataaaacacaactttcaaaattccataaaaggtcatccacctaggaatttttctaaatttttaaatagcaaag

SEQ ID NO: 387137 - DNA, 2387 bp, Cannabis indica
ctggtaaaagttacttttatcagggcaatagcaaactgtgatggtaagagtagcatttcttgtagtgattagtataattaagcaatgtctcacacaatataatttaattaattattataaatatcactaatcatttacaaagcatctcttataaatctaagcactaccatgctcaaattcaaactcagtttttcaacttcttcttatatatataaacattaaatatttagatataagggcaacacgtgtatgtcaccacacatatatacatcaattttttttgataaatttaatcacactatatacatcaaattttgattctattaatatagtgtggtatgtatcatcaataaatgtatatatcaattattatttcttattggacatatgtatattttagtattgtttttattttaattaattaatatatttatatatataaacatgtggatatatagtttatttatttaaagtttgaagtatataggtaacaataacgtactaacgataacacgttacacattattataccgacaaaaatttggtggctatttcactaaaccctaattagttttattttctggctagtatgctaagttttggcaacaatatataatatgagacacaattttattccgtgatgtacttttacgggatgtattccgtagtacattagatgagtctcatgttacactagatgagtgtcagggtacgttactattttttaaccttaattacccctagatcaacctcaaccctcagatcaaataactctctcatctaacgggtgccacacattacggaatacattccatgaaaatacaatcacgggacaaaatcatgtccctatatattatatattaactttctgaatttggaaaagaatgatcataattaaagatcaaaaatgacacttatatataaaggaaatggaggcccattaaataatatatatttatcacatggatattcgatttttttttttttaataaattaatcatacaatttttatttatagtaattagttaaattgatagtttgtaattttatcgagacattttctttcattacagatatgattaagattagaattagaaaaatataagctaaataattaacttcctaattttcagactatttgataaaaaaaataacagcatcaaagttaaccttaagaatatctatactcagttttatctacaactcagaagatacaacagtagaaactgttgcagcatgttcattcatattttcgtagcttaaacatttaactattgtgcaaggtacgcaactacactactaacaaccccctttaggtgaaaagaacttgtttttctcaaccacaacgatttgatgtcaatccatcaaacaataaaaaagaaccaacaacgaaacaaaataaaataatatatatcacacagattagactaaaaatattcgaaaccatgtcacaaagacaagactaacaatataacaaaaatcgatcgcaataaaaaaatataatcccaatcaagctgcatatatatgcctagagaagacccgcgggcctagacaaaaaaaattacaacctcctatagccattaatttaagaaagagaagctctagttttttaatttaatcattattacttgatcataataattaactactaattattacagtaatctctagtttgctataatattttaattaaattaacaattgagggtcaaattgtatatatacctttccaaaaaaaaaagtcaaagtatatatagaactactaataaaacttgtaaaatgaaaagcatatttaaaaaattctaataaattgagggaaggagagctggttatatcctaaattaattagacaaacttacttctacatattataatttatatatataaataaatatatataattttatagtatttttatatttataatattgtataataagtaggaagaaaaagagttttagtatgcatatttttctctcttagctaaacttaaataattaatggattaatgtgtatattgatttatcaatttgtgtagatttataatacaagaataatttgaagatgtaaatgagctagcttgtagtgaatatattttattattgtgtataatttgtctgtaaattggcttggcttatactataaaaaattgtataatatattttggaccaattggaggtgggtcgaagtgttttaaattcaaaaatataaactctgcaaagtagggctgtacataaatttttgtaaaccgcctaacccgaataacccgcccaaaccaaaccgaaaaacccgacaaaaatttcaaaccgaaaaacccgacaaaaaaataaaccgcccaatctgtaaattgggcgggttgaaaatatagccaacccgcccaattaacc

SEQ ID NO: 387138 - DNA, 939 bp, Cannabis indica
gatttctaagccagaataataccacatgcagtaccaatagcaggcacagtaatatgaaaataaaagtgaagtttgttcaaaaaaatgtaccagtggagaatcgtcaacttttagctcggtaaaaaaaaaaataggagtagtcgatcaaactagggacttcagttcacgaactatagaggtctgtcccaaccctctacagctccaatccatgactctcatggctcctgtggaggaggtgcaccatcctcctccacagaggtaccaaaatgatccgacacacgagatctaatatttttcaatcagaggcctgctagcagcctcctcccctagattcagcccaacaaaatctcaaaaaaagtctcgcacgacacccgggtgttgtcgaagaattttcaaaggtttagaacacactgatgtggagcctttaacgagctttcttttcttaacagggatagtcctttcattttgttcagaggttggttggactccaatatctcctttaagtttttgaagtttatacaaatccaactcaccaaattgtttaagctcttgaagagctcttgaggttgaaatttttttggctaagatctgaccttcatccacgggatagctcatttcttggcctaggactgagccgtttttctcattaatttggcccaaatgaaccggcccaacattgtcttcattaacctcaaccacgggcacaccagctttggagcttctctcgccaatcgttggcccactagttaatattagtcacattaacttggcccaaaagagccggcccatttaagtcttttataaccacaacctcgggtccaccctcactaaaattgcagcttatttcttagtaaaaattacaccatatatgggaaaattttaagagcttacttttttatagcataaataaaaaaaagctaagaggttatgagttttttt

SEQ ID NO: 387139 - DNA, 1761 bp, Cannabis indica
tattttgaattgattatgtttttcttattgtaatatgttttcgaagtcaacgatattttataatattttagttactcgatttaatttcgagaattaattgtcaaaatattctggcaattaattgtggcagagactttaatagaatatctaacctatgtataaatatagggtctcgattcctgagctcactactcattttgtaaaaatgcagtaaatccatctaaagagagtaaagagaacttgaaagcccaattacctacactaatcagtttctttttctttgcagatccaaagcttatgtaggattgaagctcaaagaattaacggttggaggtatttcgatcatttagttatatcgtatatatgttcgtttattctgcatatttatacatgattatatatgcttcaagttttcatagaaaatgtctaacataaatgtgtatacctggatatgtttatgtattgatatgaatttttttttatttaagcgtttatatattacaaccatgtttaatttgggactcgaacctaggacctccaacacacacacacccacctatggcgacttgagctagcctcaagtggttttatgtattgatatgtaatgtttgtgctattgcgtttcttgttgagtctttataactcacaggtactttatggtgcaggtaagggaaatggcaagttaggacagtcatgagctataagtcttccttggtaactatacaaatcggctcatccagctagcaattccgagttgtcgagatttttgcatgatggcgcttttgacttttacatgtattttgatataatacttccttttaaattttaaaggtgatccccgactttaaaaatttataatgtcataagttttataattcaaaataattagtaataatttaattaaatcacaattttatttaaactgttagtttattattataaactaatttataaaaatacatacattagagtgttacaagctcctccatgtgaagcttcactaaaagatcagtaatgtactcagtctgagacaattacataccataagaatttctaaaaatctcaacccttagaaaatagtgaacaacgtctaagacttcaagataaaaagacttgtttaaatcttgaaccaattgtgaaatgggaatctaattagatgaccattttactagaatatcatcaacataaactagtaaaatgattaaataaagagatatcatacttagaagcttggaatccccactgaaataaattggttttgagcttctcattccatgctctacgaatctgtttaaagccatagagagttctatgcaatagacagacatgattgggtttagttagatctttaaacctggaggttgttgtatgaagacaatttcagtcaatagtccattgagaaaaacattacttacatcaaatttttttgactatccattgagaagagacagctagagagagaacaattcaaacagtaacaggtttcattcttatacaaaatatttcctcaaagtcaattccaagtgtttgtaggtagcctttagcaacaaatctaaacttaaatttgtctaaagaacctgttaaaattagacctcactgtaacctttattattacagttttacagatgaagtgaaaaattacaaataaatacaaacagaatacaacagaaatcagatcctaggtggcttcgcctctagtggatcaagaactagttgttagttacaaccgaagttgtaactaactcctagttctgtgatcaa

SEQ ID NO: 387140 - DNA, 2539 bp, Cannabis indica
gttcaagctaagaacaaaatgagatggagaaacgtgtgtttaagtcttattattataatgatatatagcatataaattgaaggatggagaagggacaatatcttttgaagaaacaaagcaaagtttagctggccttcttttcttttgaaggcacacttgcatcaaaaaagaaaaagaaaaaaaatagcaaactttagctagagaggaaagacttgtactggaaacaaagggccagagtctcttggctgaaagaaggtgataagtgctccaaattcttctttctaactgcttccatggtagaagaaacgccattgagtgtattctcaataaagataatatgtggatcactaaaagacaggaaataggcgatgaattcatggagttcttccaaggaatctttacttggctggagaacggtatagagatgaattgtaagaattaatccaggatagaatatctttggaagaccaggccgaactcattagaaaaccctcccacgaggaaattaagactaccctcttttccatgagtaataacaaagcgccgggtcttgatggaatgtctgttttgttctttaaacactattgggaatctgttgagaatgatttttgcgaagctgtcttggatttcttccactcagggcgtatgcacaaaggcgtcaatgctactaatattgtcctaattcccaaggtttagaaccctaagagaccgagccatttccgaccaatctctctttgccatgtcgtttataaggtcatattcaagatcatcgctaacagaatcaaaccagtgttacctaaacttatttgcccaactcaagctgcctttgtgcctgggaggaatattcaggataataatgtgattgcccaggaaataatccactcgtttaataggaaaaaaggcaaagaaggtctgtttgctataaagattgacctcatgaaagcttacgataggatgagttggagatttattgatcaggtaattgattgctttggggtgcccctagaatttcgaaattagatttctcaatgtatctcaaccacctcgcttaacatttgccttaacggaggccccttcggaaagattatcccttcgcgtggtcttcgtcaaggggaccctctttctccctacctccaaaattttgtctaggcttctggaagatgcccaagcgaagagatctattagcggtatcaggctgagtaggggggccctatcatatcccatatcttcttcgctaatgacctcattctggttggcaaagcaaatttggaggaggccaaaggttattgggattgtcttgagaaattttgctcttggtctagtcagaaggtaaataaaatgaagacttccaattttctttagtaagaatacccctaacagcatgaaactagggatcaaggcattattgggtataggatcgccggaaggcaacgtcaagtatctaggtctccctcttttcagatctagacaaaaggatgcagacttcaacttcattttggataacctgacctcgaaattacatggctggaaagctaagactctttcaaaatcgggaagggcaacgctgatcaagtcggtaggtctgtcccttcctatgtacgttatgcaaaccactaagctctccaaccgtcttgctgctaagattgacggtttggttcgcgacttctggtggggctctgagaaaggtaattatggtcttcacctaaaagcttgggacaaaatttgccttcccaagtctttaggggggttgggattcagaaaaacaaaagaaatgaaccagggtttcctggctaaatgggggtggaaccttctgacagggaaccaatccttatgttgtcggattttggaagccaaatatattaaaggaaagccctttttggaatgtaacccgaaagcctcaaactcgtggttttggaagaatgtgactaaatctagagcgattattcgtaagggtgcctataagcgaatagtggatggtcagaatacaaaagtttggcacgatccttggatagatcataagaagacttcttacccaggccaagagggccctcgtcgaatgaagatataaaagtggcggatctactcttgcccgatggtggatggaatacccaaaaacttaacagcatgtttgataatgagactatcttggctatcatgaaaggaggaaatccttcgggcataggagaggacaaatggttctggactttggaatcaaatggttacttttcctgcaaatcagcttatagggccacagttgttgatcgagtgaattcttctgaggtttccccatccctgtggaacaagctctggaacagtaaaatacctgagaggctcaaggttctttggtggtgtatcctctcaaaggccctccctgttcgtgcggtcatagcaagaaaatttcatattgaggatgacagctgcccattgtgcggaatggcggtcgaaaccttaaagcattaattcctatcgtgtgactttgtctttcacttattgaggtcaaccccttggggtatttttcctatctgtgatactggtattc

SEQ ID NO: 387141 - DNA, 1560 bp, Cannabis indica
aataatgtaaaataactttttttaaatttgttcaaattatttgtgctactaatatggtaatgagttatattaaaaaactaatattattttataaatgtgtgtatatatacgtaaatgcatcaaattataataaaataaaataatgaataattgagactttaaataaaaaagatataagtaaacttagattaataaaattgtatattaaatatgtacaaaaataatatatattatatataatatatatgttcggtcggttctcggtttaatcggtcagtttgcgattgacaataaaaccgaccatgttaaggcggttttaactgaaggcggttttttcggttttcggtttttcggtgtcggttttttcggtgttcagacggtcggtttactcggtttggtcagtttcttggagtttttgctcacccctattgcccacacacctaaggcacgtgtcatcacatttattgaagccagagacagtgtacaagtctcatttatctacgactaaataagacttggagggtaaattttacctcaagtttctcctaatatacgcggcagctgcaatgtgggacatgtggcaggtagaagcctatcactcggagatgaatagaagatttaactaaatctcctcaaccaataattatgattcaagggcaagctctcgaacatgagcaaataagtccacttcttctccgagaggtgaaggacgaataaactcctccgggccagttaagttggaggtgaatagtcacttcgtatttaatgcggcatgggaaaaacgtctaggaatacccataagaggacgtgtcagacgtcataaacccggctttgggcgattacacgacaatcaagggagctagtgacaactccattacgaagaatcacatcaatcaaggagggatgaagggtaatctcacctaaaacctaagcagcctactgtgtaggtagtgcatgccatattttgtactttttgggaacttgtgcatgctcatagttggcactttaagagaagttatcccttttcttcttcctaccaatcgctataaattcctctcacaaaaattggcgggggggataaaaaaaaagacacaaaaaaaaaaatattctctgtaagaaacacccacttattaataacaaagactcgtgaacgaactacaactcattaatgcctacaccatgtaaaaactacctgcattaattatccctaagctctcattattaagttagatatttggttgtcaaaaaccttggtcaacaaatagtataacatcccaatattttattatctaatatgtccacttaagaaagtatttttaaaatttttatcattgtagatgttctaatactcatatgaagtttagaatttaatatggaatcccacttattttaatttaggcttgattaggatttttgtctctcgaactttgacatataccaaataatgttttctaaacttttaaggtcgttaaaattgcctcatgaactattgagattattggattttaaggattttttagttccaatttttagtaaaaaaaaagttttaacaattggacg

SEQ ID NO: 387142 - DNA, 1300 bp, Cannabis indica
attcctaatttactcacaaaaaaatctatttttaatgatatccaaacacattgaaaactatttttcattaaaaaaagattatataataattatccaaacggtaaaagtaagtcaaagtttatacttattttatacttctagctataagcaaaagtagaagcttagacaaacatgaccatattattataatattttaatagcactccccattggtatgttcatattaatagctaccttgaaaaaaccttggcagaaaacctagtgggtcaagaactcagtcgagagtgcagtgtatattaactctctcttattttagcattgttgtagatcctttaattggtgtattctcatcttgtgtaccatcttatcaaaatatttgatgttggtaatgaatttgtaaataagtttgtaaaattgtcgcttaatcgaacttattgaacatcaatttcagcactctcttgaaaaccgtgattaaagaagtgttgattaggtttttttggaaatcgaattattacaagaatgagctaaggaactatcgtttcacttctaataggcatagaagctatagatgtatatatctatgattaacactctcactcaattgcactaccaagttcccaagatgtaagtattatgcctacatgtaagctgtaacgaacaagttaaagaactcatgcaatatatttaagttagaacttaaccatctcaggattgagatcaaatgatctatgatcaactaagtgacattgacttaggaaagatatatcggtaagtttatgatatcttttccattattaatatcggtccagttcgatgtatagtcgttaatgctagtttactttactaatgccttgaaaaagacattttgcttatcgaagtgtaagtaaaccttatcactgattatcacgtcagtgtaaatctattgcactgataaatcctgggactaaataatttgaagcatataatcacaattattttctactatgatgacatcactgtaattgtgaataactatatgttcggaatttaatataacttatatattaaatatataatcatgtataaaatatgtgaacaaagcatacgacaaggtcaagatatgatttttaatctttattgaaagtaaataagataacaataaaattgattttatttaaggcatgaaatcccattagtatttgggtcctcgggtagacccgcattcgatagggtttttaaatgtgaaatagcccactggtgggtaaaaatatattataatattgactttgggtcgagtgggtgtgttggaaatattttacta

SEQ ID NO: 387143 - DNA, 2514 bp, Cannabis indica
aacaattaagaattgttttccccgactacagctgctacattttgcccataattcaaagcatcccaacagttcgaatcaaaatggaaagaggtcgaacaacaacaatagacagggcaataggaataaaagagagttttacggtaactccaaacaatatcctagggtgaatgtctcaaagttcactgcttttttagtcctaacagaagacatagaaacaatctatgcaactatccagtctatggttccacataagaaacctctcccatgaagaaggacatgagaaaaatagacagccaagttttgttttcatgcggactacgaccatgacaaaaatgaatgtaataatttgaagtgagagatagagttcttaattagaaaaacccgtacttacagaaatatgtcaaggctgaccaagaacaaagggccgcctaggcagataataactaaaactatcttatgcctccaccagtggacggcatcttcaggttatcattggggcccctcaccttgctaaagaatcggacaaagatagagaaaagtatgcctgagccttgcaatacgaacaaaatgatgcaaccctagccgtggaggagagaaaacctaaattaacatgtgtgggagaaataataataacgttcattgaagttgatgctagccacgccattttttttgcataacaaacctttggttgttgaagtgcagattgcaaacaaaatggtggcacaaactatggtggaaaacagagcttcctcaaatattctactcaagaccacatatgtaaaaatggggctcaaccttaaagatttggttccttgcactcaactactctatgggttctccggccagagcataacaccacttggacagattcacctaccccttacagtgggacaagctttgacaagtatattagtaatggcacaattcttagtgattgatgtccctttagcttttaacatcatgttaggttgaccaaccctaaatgacttaaaacctgtcacatcagtatccatatgtgtgttaagttcccaactaaaagtggagtgggctgtctaaagggaaatcaaaagattgcacaggaatgctataaccttgctctatctaaggtcaaaaaggaaaatacttttggccagagtttagagaaagggaaagacatttcccaatgagaattcgcccaagaggaggataaggacatggatccccgacttggagaaagaaatgcaaatgttgggccagtagaagagttagaagaagtggagattgatccaaccatcttgactaggaaactcaaaattggtaaatgtttattgcttgaagtaaaattagccttaataaaatttctaagagcaaacatagacatttttgcctggtcacataaggatagggttagaattgaccccactattagtctcatgccctaaatattgatccacacttctgtctttagtccagcaaaaaagaaggttgctagacaaagaacatgcgcaagcactaaaagaagaggtagaaaggctccgcataaacaagttcatcattaaagctttctacccggcttgggtggctaaccccatactagtacccaagccaagcaacaactggcgagtatgtttcaacttcatcgacctcaataaggtgtgtcctaaagactattttccactctcaagaattgatcagcttgtggatgcaacgactagacatgaaatcttaagctttatggatgcttatttggggtataaccagataagaatgcatccaccagaccaagaacacacaagcttctgaacagacatgggtctatactgctgtaaagtaatgctgtttggtattaaaaatgctggagctacctatcaaagattagttaacaaaatgttcaaagactagatcagataaaacatggaagtatatgtggatgacatgctcgtcaaatccaagaaggctcggggcacatagaggatttggatgaatgcttgaaaaccctcaaaaaatacaacatgaaactcaatcccttaaagttttcctttggggtcagcttgggtaagtttcttggattcattgttaatgctcaaggaatagaagccaatctagagaaaatacaagccctcctggatatgaagtcgccaacaaaagtaaaggaagcacaaagcctaactagtcggatagtcccactcaacaaattcgtttcaaaatcgacaaacaagtgtgttcccctcttcaacatcctccgaggtaacaagaagtttgaatggacagaggaatgaacaaatgctttccaagaactaaaaaagcaactcgcaaagcctttcatactctcaaaaccattgaatggagaagaattagggatatacctagaagtcactgaatatgctgtaagccccgcgctgataagagaagagaataatgtccaacatccagtctattatgtcagtaagattagttaaggtagaaggtcgataccattttattaacttactgtctaatcttagccacaagaaagttaaggccctatttccaagc

SEQ ID NO: 387144 - DNA, 2467 bp, Cannabis indica
catacaactttggaatgttggttcctccaggacaagattgaagaccaggatgagattgaagaattaatcagatgaggaaaattcagccaatataagaagaatggagaaaatcatccccgagcggatgataacaacaatacaaatgatgcaagtggatctcgagcccctcgcaataatttaactatcattggaggaccacatgtcagtggagattctagaaaagcataggagcactatgcacaggaaacagaagaaaaacccctcactaaagtaaataacttgagtgaacagctagaaaagttgtttaaaaaagaatgcgacaacattaccttcatggagagcgacgcaatgtgggtacatcatctacatacagacaccctagtggtagtcgctaacattggaggggataatgtacatcgtttcctagttgataatggaggttttgtcaagcttttaaataaatggggttacatgaaaaagacttatgaccaataacctcaagcttttatggtttcactagaaataccatcgcattaaagggaatgataaagttaccaataactttagggactgcccccgtcattgccaaatcaatggtcgattttccagtaattgaccaacattccgcctgtaatgcggtgataggtcgtcctattttgaaagaaatgaagatagttacgtcaatctatcatctcaccatgaagttccccacccctgcgggtgtgggatcagtgcgaggagtctaggaaaatttgagggaatgctacaatattgcattaaaattggaaaagaagaagtcggtaaatgtcatctatttgctcgaggctcctcctcctcgacatgaattttttagaattaaggaaatacctcatatagagaaaccaaatcttgatcccaggatcctcaactataccaacactgtgcaagccacagaagagacaatcgaggtacctatcgattcttctgataattctaaagtgctaaaaattagttctaaactaactttttagtagtgagaaaggcttgtcacttttctcaaaaaaaatctagatgttttcacgtggaaatattcaagcacggtcaaaataccacccgagatcatgtggcatcggctgaacatcgaccctgatgcgcgaggagtatgacagaagcgtcgcaaaatggaccccgcgaggtaccaagatcttaaggaggaaatagatcgcttgatggcatgcgtctttgacatcttcaggaaagaggttcccacctaacccatgagtctcagtaggcaacatagtgcaaagcattagccatctcaaccgcctttagtccaaaaactacgaactcaaagtctggcagcttggtcagggtggtgtatatgtagtcagagatagcctgatcatatgctttctttgcgttctccttctcggtctcaagattgcgagtaagggtagtattttcttcctctaacttcttactcttatcctgtgaattcttggccctctcctctgcctgatctttggccttgccaagatcttcgacttctttttcttctgtaacaacatccaactgtgctttcttcaaaccttcttgaagagccaagttttgtttcttcaaaaagtcaagatctttgatactcgcaccaaaggcctgcgagtacaccgtcatgatctgcgaggcaagttcagttgaacgagataaaaggtcctcagtaggagcccctttgactttggtaacaaagtcgtcgctcacaaacttctcctgtaaagccatgaaggtgcgagctttggtagcagcatccatcataaccttttttcctttgtcttgcacaaccttttgaagcttcttcgacaaatcaaccacaggagttgtggtgacttcactcttcctcttttgaggtgtcgtagtaggagtcgcggtgttgaccttcggtttgtgggtaaaagagggagcctgctttaagaaagtcatatctgcaaagagatacacaaaagtaagaatttgagaaagtttaagataatattatcagtaattgttaagtcatattacctgatatttttctcgctgaagtatagcgtcaagtggaatcaacttgtgttctcgcaactttgcagaggtacaccacaaatgccaatcgtgatcttgaactggaagatagcttaacacttcagtgatttccacatgacttttgtctaatacagatcgagtaggtctacctgcaagcatgaagtagatattagtgtctgtaaaataacaagaataaaagctaagtgtaaaagtatgcgacatacgaggtcagcggttgaagtcaatccatacccctaacatcttaaacgcatcaaaccattttgacttccaatccctcatattggaaaccatgccttctaccccatttatctcaaaattggcccatttgctaaaacagtagaagccattatcatgaccaatgctttttctatcataaaagtagctaaaatcctcgact

SEQ ID NO: 387145 - DNA, 1930 bp, Cannabis indica
gtgtccaaagattcaaagaatatagtgtgttaattaggacaattcatgtatagactcaaataaggttctcgttagtgatagcacaatttttattaagtatttccatttgatttgagataaatttttttgatgattgtgtatatttcacatgttcagtgggtataagcatatatgatcctagtcttatctattggtgaaacaatgtttgtcattaatgatatactcattttgtattaagaattcaagatatgatattattcatggaatattcttgaattcaataaagttttcaacacttttggcatgaaagatacactactttgcgctaattgttattaaaatgaggttcaaagtaataaggtatctatagaacacatagggacaaacttcacattttcaaatacgaatcagatatggatgtggtgttatttaagattgtgttagtttagtgagctaacataaatttatggtttaattctgcagataaagtatgaacttattttttcaatactttgaatattttctttctattagggtttaagtataagcttaaaaagaataaagaattgttcccaattaaggagaactaattggagataggtatgctaagatcacatgtgcatgtaattttcatgttacgcatccatgattgatttatgtcatttagttatattgatgtatgtgaccattgaagggttaagccacgctaaatgtggcaaaagccgctttaatcctatgttggtataatcaatagacgagattgttttgaaatatctataattatgatagtaacatttaaaagcttatagtgttacacactataagaaaatatatgtagcacaagtgtaagattattggattaaaataattaatataggctcatatatataagtgtgtactgctatctaatttttgatcaagtaatcattttagtattcttgagtcatcaggtatataaagtatcatgggctaaagcgtagataccttaaagtgatattttctaacttattgaggggttgaattaaaaatactagaaattatagcctattaggctatatattggtagtggtggtcatcacttgaggctaggtcaagtggccataggaaggtgggtgtgtgttggtggtcatgggttcgagccccaggttatggattgtaatatataaacgcttaaataaaaatatatatatattggtagtagtccccaagaaaagagctactctattcttatattttcccatcaagagagaaaattagagaaatcctaagtcttgtattcttgaaagatcattaccaaaaaattaggtactcttccgctatttaggttataggggttaaggaggctcttagttggctcaaaaataagagttgggataaagtggagattgaaaccgacagcatgctcattgcagttcaggtcattcgtacctctcatcgtatgtcctctgtttttgggttggttgttaatgattgtaaacttctactttctattctcccaaatgtttctttgcattttattaaacgatcaactaatcgagttgcccgttatgttgttaggcattctcgattcttatctggttatagcattcatgtataaaatatttttcctaatttacaaggccttttgtactctgaatgctaaattttaatgaaatagctatttcatttcaaaaaaaaaaaaggttattcttctttttgcttcatcaaatatattttttagatttacgtttatacacttataataatatgtaatatatttatatgttaaaataaattttgatattgtatattttatgattgataaagaattttaacatatttttgttttacaatttcaaaaagtaatttagttattgtaatctaatcattttaatatatagagatctgttggaagttattttaccaggaacttagatctactcacaagtat

SEQ ID NO: 387146 - DNA, 1899 bp, Cannabis indica
ccaatagaatcctattcattttttaagcatgtccattttgttgtgaattttttacaactctcttgtgtctaccaattccctcaagttgacagaacctaatgaactcatcagaacagaactctaagccattatcagttctaagtttctttattttcttccttgtctgatttcaatcagtcttttccgagtgataaaagtggtaaaggcctcattctttgttttgagcaggaaaacccagaccttcctaatatagtcatctactatactcataaagtaacttgcacgttctagatttttcattctagaagccccccgtaaatcagtgaatatagcctagtttttcttttgtagtgtgtttccctagtgtgaatttcaacttgcaacagttcccatatacacagtcatcatagaaatccagcttctctcttagttttcccttaagaatgccttgtttttcatgttgactcatgcctctttcactcacatgtccaagtctaagatgccaaagcctagtgctttccatgtcaagacttctaacaaccatgtcattttcaccagtgatggtctttccttttagataataaattcgattcttaagtttccctttcacgacaactaatgaacctttcatgaccttaaaggaactatcaatctttatagtgtgacccttttcaatcaattcaccaatggaaagtaaatttctctttaaatctaggacatacctgacttcatgaattgttctgacctaatcactatgaaacttaattctcacagttttaattcctgcaactttgcaggccttgttgtcacccaatagaattgatccaccatctaatttcttgaagctatgaaagaattcccttcttggtgtcatatggaatgaacaccctaaattatgtatccatgagtcacctgattcttggctagacacacccaagacatcagctaattcatagccatctgtcacaacacttgcatctcctctttctttgcttttgtctctctgtagtttagctttcaatgctctgcattaatctctgaaatgaccctctttcttgcgatagtagcactgtttccctgccttggaattggacattgctttgtgtgattgattagagcgtttgtactgtttgcttttgtgattcgatttgtgaaaaccgcctctattttcccttgtttctgttctgcctctaacaaaaaacccttcaccatagccatttgatttatcctcactttttttctgaatttctttggagttcaaggcagatttcaccactgtcacagtcaaagattccttcccataaagcatggtgtccacaaagtggtcataacattttggcaatgtactgagcaacaatatcccttgatcttcaccttcgatcttgacacctatattgctaaggtccaagattatcctattgaactcatgaagattcttccttagatccttggtttcatccattctcattgtgtatagcttcttctttagataaagcttgttagtccatgatttcttcaggtaaattgaagccaaatttttccataaccccactgtagtttcttcacttgacacttccctgagtactacatcacctaaactcagtagaatggcactgtgtgccatgttctgaatttccttaatcttcttctattcatctccaagagaagcaagctcttctcgatcaatggactctgaaattccttgatgcactaggaaagctttcattttgatcctgcataaactaaaatcatttgtgtcattgaatttatcaacttcaaactgagtagaggtccttgcacatcagttattgttcctctcttgatgttcttgattcaattctttgatgatgcccctcgactgtgctctaataccatttgatgtgatcaatgcttgatcat

SEQ ID NO: 387147 - DNA, 885 bp, Cannabis indica
gaaaaaaaaaagtgaaaaaatacttaaaggaaaaaggaagaaaagcttgaacaataaaaagtttgaagtctttttttgaaagagactacttttcattatttcaagaaaaaaaaaaatatttgaaattaaataagtctataacatattattaggttagagcttaaaaaaatgagaacaaaactagaaacaaaaattatccaagctcaacattatccacaaaaatatcctttcaagtatagtttcagaaacaaaattaaatacattctatcttaatgcttatttcgccaaattgtgagcagcaaagttatttttttcaatcaatttgtgagatattctaaagtgagaatttattgtgtttcagtatataaatttatacataacatattttcatttagtcaacctttaaattaatgtaccttaataattatctttcttagataacaaacacattaatcatgtcaataggtcatctttttatgacgaatattccatgtatttcaatgtatttgttacttaacaatgtattttatgtatggtcgtactaaaaatgggcctagaattgtgttatatgcaaggctaattaagatttttttcgcccaaattttgacatatactaaattatgttctctaaggtcgttaaaaatactcctgaactattgagactgtacagttaaggacttttgtccaattttagtaaaaaaaaattaaaatagatgaaagttcaaggtgttagacttttatttgggcttacattaaattttattggttttattaaaacttgggttgattggtatagttctttgctgtgttagcccatgttgttggtgatcaattgttaatgggcttagcatctgtgtgtaaagtctaggtgaagcagaagtgtgg

SEQ ID NO: 387148 - DNA, 1252 bp, Cannabis indica
aaaaaaaaaagagagagcaagttagattgaataattatgataaagctaaagaaaataataaagatttttattaacgaaaggaaactcgtagttaagaagcttctcaataaagaatctcaccatcagtcatgagcatttgtctgcaacagtaagaaaccaagcctaatggatcaagagctagcattcctgcacactgcacaccaataataaaaagtcaataatggaacttctctaagtatttcaaaagaagatgttggttaataatataatagacaacgcaaactaagaaagaacaaattaacaaacccaatccaactttactatacttgagaaatgcataaattatgaacctttctttcttcagttttataaattttttaacaaaatccccaaactttatacacctgataaggtcagattttgatataaaacttaagccatcaagcattatatataaatccataaacaatggaacttcacaagcttctagtcatcttggggaagcgttaaggctgatgatctagggggtttataaaaaaaagtataaatttcatacaacaaagtgaacaaagtaatttaagaaaaatgcacataaattaaaacttatcataccaaaaaaatatataataataacaatacactcagaattttcaaactccaaaaaagcatatgagataaaagtgaaaacagtaaaatctggaaaagaatttgtttttaccataaatcaacaatctaacaatcaaatgctatacttgcttgtttagaaataaaccatgaaccatcacaactatgtgagatccaaatcaagctaattaaacatgccaaagatgaaaagaaaatggaaattcatttaaaacctaaattaacaatagattaatgtaagataaaagagaactcagatgtctatggatcttcgtacctcaatcctatacccagttagcataaataatctaggttgggcctcagtggagaggataccagaaatattgacatggaggactgagttgagccaccgttcgactaagagatgtacaccataaattggccaaaatcgttgatcgcacagaagaagagcggaggagtggtcatggtgtttctggagaaaaagtagttgaatatttgttttatttaacttaaatgaagggtacaataggcacgttacttataaatgtgggtatatatgaatgaataaaaaaaagaaggtaaaaattaaaatggcttagttaaaaggggtatacaatctaatttcctc

SEQ ID NO: 387149 - DNA, 954 bp, Cannabis indica
atttcccaagaatagatagatcctagaaaaagcttgagacatcactattgtgttgcttcttttagtgtgactggaaagattcgacaatgagaatcatctcaaatgcctggcaggttagtctgtacttcaaagttgtgtatgtgagaaaatggctcttcttttctagtgtatggatgcagcactggatttctgaactttgaaggtatctcaaaaggattgattctatctgaaaaggaaaaaattactcttgatctaactcgtactctattgtctttgaagtagtgatacccttaaccaaagtagcatacacacatcatgcatggtcatgtgtgtatcagcttgccgcttcaagttaatgttgttaacaggctcttttatcttccaaatcaatcataggcattgattgatctaggatgtaattgtttcctggtcagatttatcttgtatgatgatagggtcatctctcgagtgtttgctttgtgagcagctactcatagtatccttcaaaatagtcttccttagagtgacatgtgtggaaggagttaaatcgattgctcaagttcaacatctctccatgcacccttgggaagtatttgtaatgttggctatcaagacctcgggcaaagtacctaaactaagcacctcgttcattacaaatgtatttctgagtgtggagtaggtcatttatcttcaccctttgaatctcatactcttcacttttgtggtagagcttctgggttcatcccctatgtttagctccaagtccctttccctttgcagggtcacagggtagtctagagtcattaaacttctgaagagaactctgtggaggagattggcttcccttattatttgaaatgcttttagtagaattatagttggtcttaccacttgtgtgtggtggacttctaggttagttatcttaagtctgagtccttttggatgctcgctcgt

SEQ ID NO: 387150 - DNA, 686 bp, Cannabis indica
accactgagagcatgaaaaataaaataagttggtgtacaattcctttttttttttttttgaaatacataccttataatggtcaaaatactctatctgcatatcaaaagaattaattaattaaaatatcaccttgtagtatggatacatacatatgaaattaatcacgcttaacaaatcaggaaaaaactataataaagttcttcgcaaaatgcattatgattagagaattgctaataattacacattctttagtgtgatatcgctattagtataattatgtatcggttttcacataatttaagaaaataacttttagataatatcgctaaccaattataggctccacctatagaaggtggtgggttgcccaataacaatgctattatgattagggtgacaattgggtcatcttaatctcttgagtcttaggtataacatgtaaatattaaattcaaaccactcgactcatttattaatcttcttaaaaattaaaattcaaacttaacctatttataaacgagttgacctgatccaacttgtgtaagctatttatataaataatcatatttaattttggttaaaatatcaactcatgtttatggtacttttatgacacagttatttaatatgtttatgtcttatttaactaatttaatacaatttatatataataaatataatattg

SEQ ID NO: 387151 - DNA, 1247 bp, Cannabis indica
tattaacaataataagtatatataaataactattcaagatacaccttacattaattattcatgtgtgtttgaagaccaggatacaaaagctgcttagtctgaacttataggcattttttttcttatgaagaaagaaagtacatttgaaacagtagtgaagaagaaaaaaaaagaagataacagtagttttttttttaaataataataaaagtgaataacagtagaattgcacggctattctaagaacatttacattaattatttaagcaaaaacaaaaaggaaaagaaagaaaattaataagaaagtgaggtgagtacgtaaagtgtgtttgtgtgtatgtatttctattttaatttttgtttggtttgtgacagggccaactggccaagatggaatgaaacacgttatagctaaataaagtttatataatcaattaatgcttgtatccacatttcaagttttacagtagtaaagttggatattaatgggtttgcccacattttgatattatatatatctattaggcctaacttgcacttttttcttaagtatcaactactgaaatgttttgaatatgtgatacaaaataatagaatcaagtacattacaattttattacatgaagatagcattgaatagttcatcaatgaggttattttttggggggcagattcttttattttatgtcttttttacctaactattgaaaactcgtggaattagagagtagttcctatgtttgtctaattataacacaaccctacttttttataagaaatgttgtcctggttctctactagacatgtcatgttaccaccacagggagagggccaataataatctggcatcaaacaatgacgtggcacaagctatgggggtgtccacgtcaagataagcttgggaagactgtttctggagacaattgtcatttgcctattagacatatggatcagtacatttatctaagaagcagtgtctaataagaagagatagaaagtattagaagaattccttaaactagctgtagaaagtcttttgtaggttgcgcgctaaaccaaacatctccttgtgagcatatctaactaagattttcgcggctcatggttagcaaagcatgctctgcggttagacggagctatcctgactcgaggaggttccagtcgacggacgtgggcgtcgtaaattcatgagtaattttaatcactttgtcaaaaatatatatatatatatatattcttaaatactt

SEQ ID NO: 387152 - DNA, 1385 bp, Cannabis indica
tatatataatttttatattattttttttaaataatttacctctataataataacatatagtattttttttattatttttttttaaataaatttacatacaatctttaactatatttattatacgtgcaacgcacgtcccaaaactaatattcatataagctgttatacaaaaaaagaaaatattcatttaaggagcggggaagtaatattgagtaaataaaagggtccacctttaaatttcatttttggaatgacattctttatctttatgttaaaggacgaaaaggactaagatagtaatgtttgtaaaatgcatatacatgtgccaattgccaaaaaataccaatatatataaccaaatcatattaggactacttttcttcctaataaacaaacaactctttttataagcaccacgattagcgacccaactatttcattgtttttttttaagttattttaagttaaaaaaaaatatattagggaagggaagtttgaacttaaataaaacattattgagcacttattcattccaaagtgagtaatgtacgtacatacaaagaaatgcattcaattaggggtgtttgcggtgcgggtgttgcgagttatagcaatttttttaaattaaattgcatatgcagtttttgtaatttttaaaatcgcaaccacaccgtgagattttaaaactgcaaaaaccacactgtgaaaatccaatgtggtgcagtacgatttaagcggtttacactatcatcattatcaaatattataatgaaaatttaaaaataaaactaataaatctttaacaatacaaaataaaaaaatttattaaaattttcacatcataacatatataataatcatcaagtcattatattaaattgtatctaaaaaataaaataatatacacatacattttatatatatttgttcttatatgaaaaaaagaataaaaaaaatatattctaaaaattagtacttttataatatatagtgcggtgtggtttgaattgcaaatattaaatccaaaaccgcaaatccaccgtaccgcgtagtttggcaaaaatgcaaactgtaacaaatccaccattcactcattattgagttaaattttgtttgtcttatttcaattaaggtcatgtttgattttagttttgaattgtatttcttggatattgttactgctgtaacaacttgttttgagggtgaggattcaccacaaatggtatcagagctcagggtttagagttcaagaatcacattcaactaatcaagactcatcttcaacatttcaagaatcaaactcgaactttcaagaatcagattcaagcaatcaagaactggttttaatggcttcagcaaggtttgaggtggacaagttcaatggt

SEQ ID NO: 387153 - DNA, 1059 bp, Cannabis indica
aatgttggactcttaatattattcatgtatatgtatatatatactagctaatgccaaattacttgaacaaccaaagcattatatgccaactattttagagagagttttctactaaaaatattaataatccaaaggctatttttttttttcttttgctaagtgaatctaaaggctattatgatatgtttctcacatttatggctgcctctaaactcgatctgttgcagtctccttcatcaccacatgttcaacccaaatcttcatgatgttgatcaagttggttttttaataaaaaaaattattaccatgaaactactgaaaatatagatatgcttattgtaaatttgtatattttacttattatatatttatattatatatgtttaggtttgtagttgtactatttgaagaaataagagtttgggtgttcttaatcaacgtcgtcttcttcttcttctttttcaattattaatgagctttttacctatagtcatgtgtgagttttgattaattatcttcttaggttaaagtaaaaaattacacattaattttgttactgttaaaattattagtattctatctaccttttttaaatttgtgtatttttatattacctacataatatgatttgtatattttatagtatctaattaattatataattttatgataaatatagcaacaataattttactattttgtgagagttttatattttgtaaaaagaaagtatatgctttaataataaaaaattaaacaaattaaaatttatcatgtacattacattttttattgatattagaattattttatgtacatataaactcaataataatgataataatatcttacaaaaataaataaaaattatttcttactttggttaaagaaaaataaagaaaaaaaaaaaaccaaacaacctcaatagaaagaaacaatcaataatttgtatagcatccaatttacaatttaaaaatgtattttttaattttattcttacactttttctaaagatttttttgttacatacttctgttggaatttattttaccaggatct

SEQ ID NO: 387154 - DNA, 902 bp, Cannabis indica
ataaattttccttttctggcatcgccctttgaaatgcatgtccttattattatatccggatcatatgtatagggacgacatgaaatagtatagaacgtaaagaaaacccctaaaaaattatttctttttaatgaaaatgagacctttatctccctcatagaaacacaagtaaagcttcgtggcgtttttgtttatgtttgtggatgattgttttggtacagcattttcattgaacagctatgtggagattctgtggtttttttcactttaaacttagattgttcagctctcatggattatatcccaagtgagagttgagatttaatgctgactttgattttgattctaactgaattgttgccctaggcaggttgtaaagttgtttcttattaataatttagttcaagttaattcaatatttaagataaagtgaagaaatggttcaataatactataatcataggattctgataggttcaggttcagctaggaacaactaaatcagtgagtgttcttagtgttagtggcttggctatctcgaattagcgttcgtgctatctatgctttattgactgacttggggactaggattttggcttgagtaataaagaagtggaatttcagatattggttgagtttattagagccctatcaattctattcatattcattgttgaaacttgtaggacactttggcttcccagatggaacttgtaggacactttggctatgcctagatgaaacttgtaggacactttggctgcccagatgaaacttgtaggaccctttggctatgcctagatgaaacttgtaggacactttggctgcccagatgaaacttgtaggacactttggctatgcctagatgaaacttgttgttaggccttgatattagtctcaaa

SEQ ID NO: 387155 - DNA, 976 bp, Cannabis indica
ttcaaattgcaagccttagcctacagaacatctccaaaaatctttgacctagaagaatactcatcttctttataagcttctcgaaccaaagacctcatttttccttttgctaacttttggtgattgtgcgtaggtcgcgactgtctaaccttgcatttagggcaagaatctttttccaatcttgtcaccaaattccaacaaccgatgctcatacagacgacgagttctccattaaagcgagtcgtggccaaaccatcaaacaacccgtaggacctcaaacaaccataagtaactagtgattctttattaaaccttctgcaagtaagtatttcttctaccaaaactgttatttcttgctttaatttagaaatgtggtctcgaatttgtagaaatatacacctttgcatgcgtaggatttagttctgaatattagggttactatgtgtaaaatggattcgcacggaccttgggggaaaatctctagaattagggtaatgccgagggtttttccctttgtttactgtgggtgttggtttggaaaaaaaatttggtttagatgttttggttaggcatcttttgttttaggaaattttttgggaaaaacccattctctttttatccttttttttgaaggaaaaatttggaattttgcttcttttgcattgttgggttcccaattcgtcaccataatagatttcttcgtgagggtgtccttttaagtgacgagtctggtggggacctgtaaagaccgcttagtttaatttggaaattagcagttaatcacgtttaattatgaaattatttatagctatttaaataatttattatactgttattattgaattcagaaatgtatttttatgtcatgtagtagttttcatattttgcattttcggtgcccggtattttggaactcggtgtttggctcagtaaaaatcacaacttagtatgttagtagtttgagacggtttattag

SEQ ID NO: 387156 - DNA, 2216 bp, Cannabis indica
tcgattttccacttcttcctcagtcctcctccggcaacaaccagcggcggaaccagtacaaagactgctcagtccgcctcctcaggtatataattatatatacataaaatatatatatagatatatatgtgtgcgcatctaaaatttcaaatacattttataattaaatttgcttttgacgttttctatttttgctatataagaaaataagattgaaatggtgaatatatgtattggatgatctttaattgttaaaagtatatatatttgttttcaaactgaataaaagttttaaggatttagtaattactaattggtatgacgtttaaattaaaagtatatatatattttctaatgttcttttttttcttttattttgttgcatatatttctgttttatggattggcttgttgtcttaaatttaaaatcatgacgaccttcaatgtttcttgaatcacttcactgtgtatgaatctccatcacttttacttttaagtttgaattaatgattgacttcttgtaaatgactgattttattaatgttgtttaagttggattaggcttcttccttttctgatgaaaagctaattaaatcaatgtagattgaaaagtacaaactaatattttaggtgcttaaaaggaaaatcaacttacaaaaaaagacatgactctaaaaaattttacataaagaaagagaataacagaaagaaaattaccttgaaaaattggacaaaaaaagccttacaactgagaggtaatacaattaaaagaagtcagagcttaaacctaagaccaataaaccaccttaaaaacaaacaaatagatcaattacaactatttgtattcaacttaaattaggcttctacttagattaggctaatggtttgtcaaattagcatagtttatttttattttatttgtattctatttggtccttttatctgcagggtgttgttaagagttttttcgagcgaagctcacatgttcaagttgcttgtgggtcccttatacaaagagatgattatgcaggcaatctttgcctatgaaactttcagagatgagctccaagggaacacgttgcttaggcctggcatataaggacaagcttggagagcttttagattattactctaacagtcatcattctcacaaactgttgcttgatacaattaactattcaggcattgaaagtgacttagtttttgaagggattgttggtttgagagtgagtataattagtcttattgtgctattgtgttttaagttagactcaaatttgaaaatgtgtttaacaactactctggacaagaccctccttgtgagaaagttcacacttcagtaagtaagtgtgttattttattctcaaaaatttcatggtcttttcaaaagtattttggacgctatgcttttctgtcattccttgttatttgaaactaaaggtgggtaatattttaccatgaataaatatgttaaataatgtagggatgtcctagtaggttcaatagtatttgtgtaagccaaacttgaattgaaacttgttcttctttatgttttgaatctgacatgtggtttggtatattatcaatcattatttgcatcacatttttataaacgcttttttaattaaactttatgaatattttaggttgcattcccataacaaattgagtggttaaggtcactaacaataaagtgacgataaagcatgtaatatagatatggttcattaacaagaaaatgtaaacttgatcaggagcattaacactttaaagttgatcccaaattaaaattgtgcatttttatttaagatttaatttactaaacatatctttgctatatggttaaagagaaagtgagaaaaatgatcaaatcattgcttctttttagaagagatttgtagttaaggaaaattacaggaatgcaacacccgaaaggaacactaaaaaatgaaatatgccttgaattgagacacagtgtttacctaaataagatgtgtcatttatcttatttaaggtaagaagtctgtctattaaggtgtatcgtttaccttattttaaggtagtgatttatatttttaatgataaattatattttggtttatcaaatttatgacacggaatttacctaaataagatatatcatttaccttattttaatgtagcagtttaccttttagatgataaactatgttttattttaccttatttgaggcacg

SEQ ID NO: 387157 - DNA, 584 bp, Cannabis indica
taacataactaacacttagtgacgttttataagcgttgaaagagaaaccattaaatatggaattaaaagtaggaagcaagcaccttgagatacaatgagagattccaaagagaatcaaaggcatgcctaggaaaggatagcaaaagctgagacaaagtagtagacgtataggggcgtgaattgggtacaagtagtgaaagcgtgctcgtgtcagcaccacctgacacctgaccaacaatgactccagcccactaccacttgccatcaaaatagtacatggtccctatagggaccacctacaactcattttgtatacaaggccaatagagcccaactacaaatacccctctactccattagagagggggttggagccttgtaatttagagaaatctttttctcaatataaatatttcacatcttctctcttaccctctctctctcttatatttttacattaagatcactacactatttttattcatcattagagcatctccaatagagagctataaatgtggtgtattgctatttttttagaatattttactaaaacttaactccaatagtgatgtaaaatgtgt

SEQ ID NO: 387158 - DNA, 971 bp, Cannabis indica
ctagcacacgaagcgcgggctaaacacctaaatatacaccactactcttaaatagttgtaggtcatgtgctaggtgaatatacaacttaatgaaaaaagatgatggcctatttgagctaagacttgttaagtcagctcaaatgctgtattaaaaggcaagtccctaaagatgacacaacaactgacgtattcgctcgactagctagctatgccttgacaaccaaggcaaacttggtacctgctcagttcttcaaagaactaagcatccatgtttcaaaagaaatagacatgttggttaatcaacatggatacacctatagcagcatacctctaaacaaaaaccttgccagaaagcaagggtaaggggatagctgctaggtggccaatcctggacagcataacgcatagacatggtaccctaataccacctataagaagtgttaccaagaaagaagttgaactgctattgaatggagtgcataaaggctctatggcaatcgtattgggggacaaagctaactgagtgtagaagggatcaaactgtagcattaacctgctctctagaaggttggccgaccatggcctcagcaagctggttggccataaaattaacaacctggctggccactacctccacaggctggtcggccatagcctcatccaactggtcatgcaatgctccctcaatttgactagccacctggtctataccttgactggcttgatccaccaatagtctgctctcatacttttggtctatgacatgtccaaagcctatgataggattgaatggtggtttcttttgagaatcatcactacaagaaatgtcacttttgccagcacatttttgtgctggtaaaagtttgctatggcgctggtaaaatggaatttacttctgatgtgttggcaaaaggggttggtaaatcaacgttggtattagaacttttttcagcacaaaatgaaaagttctg

SEQ ID NO: 387159 - DNA, 539 bp, Cannabis indica
ccccacagattagagtggatgtaatctaagggttgttttgatgtgtgcatgccagttgggaatattatcctataacttttctcaaagacacattgttcacaaaaatcttgtttcccagtttgtttacctttcataatcccttgcttgtcaagtttagtccgtcttctctcactcacatgtccaaacctttgatgccaaagtcttgtttgaccatttaatttgttcatgttagctccattctcaaaacaggtgcctagagttgcaacaccaataacaatttctccaacaagatagtacaaaccatgtttgtattctccatttatgactgttagagatccttttaaaaccttgagataattctcatcaattttgactgtacaaactttagtagcaatggaaccaatagaaattaacttttcctcaggttaggaacatacttgacatttgttgatgttctttgaacattatcatgcatcttgatgatgattgttgacacagtaatctggactagacttctaagccacacccgctcactagat

SEQ ID NO: 387160 - DNA, 1639 bp, Cannabis indica
taatgcacaaaagagctaaataaaaataactctattgtcatagagttatcaacgacacatgtcaaacggggcgctgagatgttaacttcggcactgggatatgaatctgggcgttaggtcatgaactgccttcagtaagacaatcatagctcactcaatattgatcagagtgacgctattcaacttgcttttcaaagctaatttaatattctatcaagtcatgtctcacacttcaacttcaattttaaagatattgacaccacatttcatccccaaaagagttacgaaaataagctccaagttactcgtagcaggacccgtcgggctccgaaaaatagccatcaccaccaaagagctaattttcaccgttagattatcattaacagccaaaaaaaatctaatttgtatttttctcctatttttgtgggcctccttcacctataaaaggagagctccttaagctcgtttttcactttccaaaaagtacccaaaaggttagagcttttctctctagtttctctctttaaaaattggagcttctaacacttagccttcttctatagtaccatctcgcaagaaataaaaactcgaagtagacgtaactccattactgtcacgatacatggagttaactactataaatttgttgtgtatctcttatacttaaactacttttgcattctcatgaatctagagagcgggtgtggcttagaagtctagttcagattttctgagtcaataatgtttttacgaaagaattattttatctgaatgtagtgttattatggattgttattgattttttagattacagtaatttatcaagcttaagcacaaaaggttaccgaggttgttcgatttgttgcactaacacatagactcgtcgattgtaaaatggaaaaaaggatatgtggctcatagacggtacattcttaaagatcatcctgatagaaaaagaaaagaaagaaagcattcaatggtactagctattcataatattgattatctacaagttgggtagttctatttataggagaatctctactgaaatttttgaaattgtaacactaataatttaatacaggtgcatttgggatggctttacatgaattgaaacaaattttcaagtttaatggcctgaagcttatcttcatggtgcaaaatataaagtcgagcaatttgataatgcgactacaaatttggataattggttgggaacaatgagaaacaaatacaaaatattcttcattctctggaatatcaagtaaaacctataatccttaagagataatttaaaattattctatttatttcttgaaagtatttttacacttaatcttatatatatattttagtatacattgaatgctcgagatcgttaagccaaagaatattatatatttggaccctctgaagaactaccaacgtcccaattcaattataacactctataagaaattttttagctaagttatgttcattaattgaacttataatataatttttaattaatggatacgagaatatcaagggcagaatgagttactttgaccatatctaggaatagcagaaggagtttgttcaaaccagccaaaaaataaaggtgggagtttttttttatttttttatttttattact

SEQ ID NO: 387161 - DNA, 3173 bp, Cannabis indica
attaaatacctaaagttatatttatattaattttatcactaccagtatgttaaatcttattaacacagactaagttcacctgttaatatattagtggtccactcatatttttaataagaaaacttattaagtaattttaaaatttgtacaattgtacataaacataataaaaaaaaaaaattgttaagtatttttcaatcaaaaaccttattaaataatttgaaaatttgaaaaagtaactaaataatatttatttaattaataaataataaaataataaaaatacttgattcttcttcttctcttatttagaatgtgagtatcattttctaattttattattatttagttattttttatttttaaaataatttaataattaattttattgaaaataagagtaaatcactactatgttgacacgtgtcaacatagtctgatttcaatatgatttaacggaccgttagcaatgaaagtaacgtaaatgtaactttaggtatttaatccgctagaaaaaaatacttattatataagtgtgaaatctaaaacattaggtatttatatcgcaattatcccttatttgaatatgatttaacaaaatagtagtgacagaaatgtaatttaaaatatttaatctgtcaaaaaaaatatacagtatttaagtgtatgaaaccgaaaacataaagtatttatgtcgcaaatatctctattttaatttaataaaaattatagaaaactgccaaccaattataaaacgtcatatcataatagtactagatttctttttaacatggaaatgctttgtttctttttttttcattgtctttgtgttaaacttccttgccatgatgaaagagaacaagaaagagaagaagagaaacaaagagaagcaaagagaggtaaaatagaggacaaaagaatgaagaaagagagttacattgaatgagctgaacacaaccattatatacagcaaagacaagaagcaatctctaacaaaaaatgaaactaattacagctagaaatagatgaacaagacaccaactgtaactaactgacaataacgaactctaatagaattctaaccaacttctaactgattacatgctttaacatcctccctcaatcttatgattgaagcatcttcaattgtaagattggttctgaagttggcaaacctgttgctagagattgctttagtaaggccatctgctaattaatccactactagaacatgcttaacagaaaccagaccttgttaaactttttctcgaataaagtaaaggtccaactcgatgtgctttgttctagcataaagcacatggttctgtgtgagcaaaatggcgctcaagttgtcacaccaaataactggtttatgaggcaagtgaagttgtaactcagagaacaatgactatagccaagttatttcagtaatagcacttacgggacttctgtattcagcttctgtgttggaccttgatatagtatgttgtttttttattgccaagtgatcaagtttgggcctaggaacacaacaaatcctaaagtagatcttcagtcatcaggatcagtggtccagtctgcatcacagtaggcttaaagctcaagaaaattagaccttctaaggtgcaaaccatgattcattgaaccactaacatatctcaggatccttttgacagctaaccagcgaacttgaagggaattgtgcatgaattgacacaccttgtttacactaaaagtaatttcaggtcttgtaattgtaagatactgcagggctccacaatagacctataaagttgaatgtcttacactggattacttccaaaggcagagagccttaacccactggtcatggggtttgagtttgttttggtcatgagtaagggaaggaatgttcatcaaagatagcatcactggacatgtaaagtctccatgtggcatcaagacatttatagcctttgtgatttaaactataaccaaggaatgtgaaggtgcagacctaaattgtagtttatatttattataaggtcttatgtttggataacaagtacacccaaatgtcctaaagtaagtgtagtcaggtttggcttaaaacaggaatcctaagggggatttgttacctagcacaggtgtaggtaatctgttgtgcaaatagaaagtggttctgaaagcctcatcccaaactttcaagggaaaattggcttgagaaagaagagcaagaccatattcaactatgtgtctgtgttttctttctgcaagaccattttgttcatgggttgtaggacatgaattcctatgaataaggcccatttgttctagatgtggtgtgaatgatctatattcccctccccaatctatttgaagacattttaacttgactcctaactgtaattgagcctcagtcttaaagtttaaaaagacttttacagtatcaaatttgttctttaacatatagattcaagtaaatctagaatagacatcaatgaaatgcacatagtatttgtatccattgaagaatagaatgtgtgcagggccccgtaaatctgaaacaactaatttaaagtggtgctgtgtaaatagtttgagatgcttttggaaaaggtaatttatgaatttcaccaagacaacaagcagcacaaacagaatgagatgttttattaatggaaatattggaggtgttaagaacttgttttataattttttttagatgggtggcctagtatattgtgccaaatatcaaaatctgatagatttgtagtgttacagcttatacatgggcttttatttggatctatatgaataaaaggttgagaagacacaatgttgcctgacatctgatgttgtgatgaagatgaatgagatgactgggttgtttggagtggtgaagacaatagttgaaggtcattggagtcaaatgaatacatgccattcttgtatctccccatgagcaaagtagctcgattcacctggtccttgacaaaacaatggtcaggatgaaattcaaagaatatacagttatctagcaaattttgacacactaactaagtttttggttagctcaggaacatgaagtaaattttaaagcaataatggtttagaaggtaatgtgtttgaagaaatgaaagcatgaccaatatgcttaataggcaaacctgttccatcaccaatatacatgc

SEQ ID NO: 387162 - DNA, 2828 bp, Cannabis indica
attactttcaattgattttcttaaaaaatacataaagttaaatatgtaaatataaaagttaatattcatattttgatatattattaaaataatatgtttgctaaaatttaatatgaaattaaaaaaaaaaaagaaatatacaaacacatttccaaattttgtttatattttataaacaatgtatatacatatactaaatatttaattagtattattaatatttataataattaatcttatgtatttgttatgataatatttgtgatgatatatttttttatttaagtttgtgataatatgttgatataatgtctaaattaaaatttaaatacaaatttataaataaaatatatatatatttatatttatttttattatatatagtttgcatataaattaagaatatctttttaattgtaaataaatttttatgtaaatgtaacataattaagtaatataatataaataaagttgtaaaattctttagtaaaatatagcaaaccaaaccaattaaaagatatcatctgtaaggatgttccttttaaaaatcatatgttcttaatgggaaatttagaaaagttcataattacaagactataagacaactgtcagtattatatatttgtggtccagtaagatattattttatgtggttctgcttgtatatataatgtgggtatatatataaataacattcgtacaagcttttaggcacagagtaaaggtctcagaagataaatttggaggtgtcagaaaggatgatttaacagtgttgatctcacccccatttaatccccacatagatgcagcgtggctctatctattctatgccttgtttccttcttcatgtactcaataacactgatcaaaggacaaaagtacacgataaacgacaacttgtgtcatgtcgttgattaggaccggtacttgcttttatgtatgtgttggaaaagatacatttatgtctatttgtatagatgtggggatgctatttagtaggggactatataagtaggggtcctcgtaaagtccctagcagtgggaaatttttctttgaatgtatatctaatggtaaaataatagttggattattttatttagtgtggattatcaactcaagtcccatatggaaagaatatgcaagagttgtcttaaatataagtattttaattagtgttggttatcaactcaagtgctaatgttagaatttgactcaaattatttatttatttctttatctatatttgttaagttttaattttttgggggggtaattattaattgtcgaaaagggaaaatcttagtggccatattttgatgagtcttcttaaggaagttttagaatgttttagtccccaagttgtcttaatgctcaagttttctaactttataaacatgtgttttttttgtgtgtgtgtgtgcatggagaaaaataatgagttgtaaaaagaaaattttgcgagtttattgtgtggtgagagtgagaaacaaagggtttattgggatttggatgaagagattaagatagagagcatatgtaattttgaagtaataagtgaaatatatcgctctttatgaatgaaagtatagtgatactctcaatatatctcatacttatcaagctcttgtgacaaggttagaatcaagtcgtggtaggagtacatcgagagaaagagacaatcgcaatcattcacactcttcaagagaagtgctactattgtcacaaaaaaggaaatgttaggcagaattgtgaagagttgaccaagcatctcgaagcaaatgaggaatcatgagtggaaagacacgtcagattctacaaatgttgctagtgtgactctgatgttctgtctatcataactgatgacaaatttttgactcttggattttggattctagtttttcgttccacatgtgcccgtataaggagtgctttgacacttatataaggcatacgatggttgtactattttgatcggcaatgatgttaagaatactgtaaatctgaattagccctaattaattcatatgagaatcaaataatagaattaaggaatatcggaagtgtaccggagtccatagaatcaattttgtaatgatatgatcttccaattttgcatcaaagtttttctctggaacttgagtttcttgatgatggggattcaatattagagttagttagggaataagttagtttttccctgttatttcccttctcatggcttttgcctatatacatgtatcattccttctgtacagaacacacaatatacatgtatcattccttctgtacatgaaaccatggtgcgcacacgggccacaagtttagctaccacttctgatgatccttctagagtcgaagctcccatggctcctccaccatcaactaattctgctgaaaatctatctcgagcacatcttcctcctccccctactgttcatcgtcccaatccagttaatagaccagcctacgaggatgttcgatcaccctactatagaagcatagctgaccatcccggtttatctcatattactccagttctctctaacaaaaaattccaaccatggaaaagagatttcaagctctccatcggagcaagaagctctcgactttgtaatggtacgatcttctaatttttccatcaaagtttttctctggaacttgagtttgttgatgatggggattcaagaatatgatatgtgaagcgatgcaaaaatggggaccaatacctgtctattaataactgaataaacagtaaattaatcttttttgactatttctaatttggcccctcatcaaattaaatattgtctaattggtatccacatat

SEQ ID NO: 387163 - DNA, 642 bp, Cannabis indica
tcagtccaatcagttgctttcgattgaaggccaagcgagtcgatgtactgactcagcctagattgcttcattcgagcgagtcacatgatagatgactcgtccatctttttattgaccacctagtcagtcaaaattgcagatcccaccattctcaaactcattcaccaacgtagtggacccttagtaggccatgtgaatgggccacttctcgtttctcatattcttatggccctacatctacgctccagccttctctacgtctctcacctatgccagctcatgggttgggccctcctcattggattacacaccatgggtccattaaagctaacccaaacccaaaagttttataatttacaacgagtggacatgtcacactgggcctgcgtggctccttacaaaaatacctatcctttttgttattttacttttttactatcatatttttatttttacatttctagtgtactaaatttttaaagatacggtcttaaagtatcaaaattataaaaatattgtatttcaataagataaaaaataattaaaagaaaattatagaataccgaaacaacaacatgaaaataattataaaacaacaaaaagacagctacaaaaaacaaaaatataacaagacattgacct

SEQ ID NO: 387164 - DNA, 1768 bp, Cannabis indica
agagagagagagagaatgctagtgagggaagacatcgggatcattgtcagggacgctgagttgggctgacgaagtcagcgatgctagggatgaggatgatggagagagggagagaatttgacggactagttgtggttgttagattcttaggagagatggagttaggcgggtgaagagggaggcagatgagaatgatgagtagtgtttactgagattttcaaaaaccaaattaagtaagagcttaagaagctagataagtaatcaagtaatgagatggagatttttacgtggttctgatatcaattaatcctagtccaagagtcaatatattggcttaagaaggcttgatgtattaaaaatgggtcttaaaaattgaagaagcctaaatcttgctatagtgttttttcctctaggtttctcttagaagaagaaagcttagaaagaatctcaaggttgttttttccgtcccccttgcatgaagagctgaatgggtttttataggcttagattctaattcgggcataccgtgacccgtttaaggtttttgtgcaaaataggcctactattgggctaaatacatagaatacatgaatttgaggcccactataagattttggaaagttatggtaaaaagatagatctattttggaaaaaaaaaggcttgtaagttggtctcaaatgggaaggataccaatatttggaaggacatgcgagctttccatgggcaagagttcgttcctacccccatggcccaccatcttaatggtatcaattgggttgcagacctgcttttagattcgagagaatgggatattccaaagctttactccctctttggctctgagacaatcggtaatatcttgaaaggaggaaagcctagtggtcaaggaaatgataggtggatttggaccaaggaacactcaggaaacttttcgtccaactctgcctatccactccaagcgtttgactgggcccttccctgtgatgtggctccattccttttgaacaaactgtggaactgaaagtgttagagtgccataaggttacgtggtggagtattctctccaatgtccttccaatttgtgctactatagctaagagaatgcagattaatgatactaactgtcctttatgtaggacgggagaagaaaccatggagcacctatttccttattgcaactttgcttaccacttatggaggtcttccccttggggtctaatctcggtttttgagtctggtgggcatatgtggaactgggtcaaattcttatggggcttaaattcaaaggttgtggttgtcgaggatgtgttcctttatacatccattgtgttggatactatttggaagacccgtaatgataaggtacataataataatccgaataacataaaaaattatattgactctatcactcactatacgtagattatggctcctctttactcccttctactcctcctgctgctactccccttttgtcccctcctctggaagactagattaagattaattgcgacataaaagtagggagtaggtcaatgtgtgtggtagcattggctcgagatcacttgggaattgttttatggattgcttccaatagacttgctttcttgatccccttattagtgaagtaactgttgggttttatgccctaaataaaactctgtttcaatgtaatccagattattctatatcaataaagtaacagaagtaatttttcattcacttgtgtatgttttggttcacttaatcaattgcttgtctatt

SEQ ID NO: 387165 - DNA, 867 bp, Cannabis indica
aattaatgaagtgtatatggtcccatgatcatgatgattgagttggggtacttgaagaaagagctttgattatttgtttaggttttgataggttaatatcttgtaagcattcctaacttgtcagggtcagaatgaattttaggccccactaattattttagtaccttattcatatcattttatagtaatgaaaattttccactgctaaaggtcttggttattgtttttttcctctttatcctcttcctgtttttagaaaggacatcttctatctagcttatgtatgtttttggtttccaaattgagctgtcttattagctattatagatatttgaccaaaacaattcaaattgtctatattagattatctatgaaactttaaaatttcattgagatcaaataaattctttcaaatcgactagtatttacatattaggctcatatatatacatatatttatagaatcatgtataacagtaatgtgggtgtatattaaattaagataattggagagtaaatcatcatgtgtcattcatcactctaatccaaaaaacaatatgtatagttaatttgagtcccatgtgccatgtttcagcaaagtgacatagattacttaaatttaattacatcaattgccaaagaacacacctaaggtattgagcccctttgttggacccatcataaccctccttcctactaatatataggatgagatatattaattataatatacatttatatatactaggtgaatgtacgtgccgagccacgtattgctagttttatttaagattttggtctttttaagattttgaatgtattttatttttaaagattacaaattttttgtttgaaaaaattaaatat

SEQ ID NO: 387166 - DNA, 1209 bp, Cannabis indica
ttaaccgccgttggatctgccgtctccaccgacaatcgtccactgccgtacacattataattattctcgaagcataaccactttggggagtctctcgtctcgggagaaagccttgccggggtatctttaggttcgggagtctccggtaagagagggagagtcacaaccttctcttctggaaccaaacgacgtcgttttcgtcggaagattcaggcgaagaagcgtttctcttcttgatattgcaccgtctggtgttattgttattatcttttactatccttctcttccctctaccacctcgagcatgggtttcacccatctcagctttgttaccaccggagacgggtacaccggcaacgggtttgggtgcgatcggccggaaacggagcattatccggccaactttagacatatcataaccgtacacaccaccaccacctcctccagcgacatatctagctatgcagcaaccacctctactatccataacctttctcttcttcaatctctctctaaaactcggtggttatctttacttttttttatatttctctctctctaaaactcagttgcgaatcgttttggaatcggagtttaatgctaaggttgataagaaagagtttggttatatagcatgggtgagtacgacacgtggggagaaagacacgtgttgtgaaagtggcttgaacagcgcagatattggattggctggtataaaggagacgtggcattgcgggtgcgtgggccccacagttatggagggttacgattggccccacagatgaaccaatgggagctcgaatagcgtctacagtagttcctagagaagggcacgtaagctgttttcctcacctcgtgcatcgtgtacggatttttattttttagttttcttaaaaaaaataatcaaagtgaaatgactgtttccagaaggtggacacgtggtccaatagaagttggatagaaacgaggcccaagattttagggtttgtataattggtaggagatgatctcgccaagtgtaaggtcagataacgacacgggtttctggttatttatttttggttaattagaatttttctctagaactttaaaatgtactaatcatgctttttaaggttggtttgtaacaccgtattaggtcgtattgtattgtattatattgaattgtattttatgtaatatttttatgtaaaactatatgtggtatta

SEQ ID NO: 387167 - DNA, 1182 bp, Cannabis indica
ttcttcttcttcttcttctgatgttgcctcgacttcttcatccaccttcttagccttctgtagtaagcaaggacttctccaatggaatttcctaggaaactcatatcaatccctgaatttgccagccaggctcggtagatggaacgtagtccaataacattacatcgctcaatagtctcaacttctttcccatcgagcattactttggctgcactaagttcctcttggagtttttggtattcctcttggagtttcttgcatgcctcgatcttatcctttgtctccttcttagcagcttcaagctcagccttgtgggtcctcttcacctcctcgacttctttggttacgtgagcgacctttgccttggagtcattccattccttggtcacaacctcgccctgatctattaaattttggatctcgctctccatgtacttcattttttgcatatctcgtcgttcggcgacaaaggatacaaaggtttgctaaaagtaaataaagaatgtgtaagcaagtctaaaggatgttaaaaagggaagtaagaggagaaggatagaggaatttaccaagaggccatgggtgacactcctttcaagcatctcttcaaggttcccattgttgatcaagtcccattcattgggaatgaaggacttgaagtgatgccaacaagtcgcacccaattccctagtattcctagcctcgacaagcagagtctgaagtgctttgctcgaagaggcagaagcttgattcgctttgggaatgggctcttcaatatgtgtgggggccggaggatgggtcggagcctgagtctcactctcagggacctcaagatcaacagcctaggaggctcgcttgttattggcagttgtcttcctgggccttttgagaggctccacgttgacatttgatgaagtctctgaggcgtacctttttcccttcttgcttgaagattgaaagatttcctcgaggtttatttctttgagacaaaccaatgtgttaacatttgtttgaaatcaagtaaaaggggaagttgggacacaatttctcgcctaagggatttaccataatcataagaagacgaggtaggagggctataatattcactaaagtatttacatcctgtgatcctgaatatattataggagttaattggttctaaatcccagctcgcatctatatgac

SEQ ID NO: 387168 - DNA, 1290 bp, Cannabis indica
ctagtgtaaattagcaggtattggtcagttgaaggaaccttggataattctaggtgacttcaatgccatgttcgcttataaggataggtgctgtggtaggaagattaaggacactgagatccaagatagctaagatttgttggcccagggtcatgttgaaaagctcaaaactttgggtttgttctttacttggtctaataaacatgaggagggaagcacaattcacttgaagtttgacaaggtatttactaatgagagttagctagacaacttttcgaatacagaagcaagttttagatgggggttctctctaatcactactgtcttattaaacacattaaggtgagttattgtggtactaaaccttttagattttataactactggatgctcaaagatgggggtataaagatgttctcctcaaggcatgtaagggaatgaaagtaattgatctaaagagtctaaatgagtagttgtttagaattaaacatgttttaaagagctgttatgtttctaagcattaaaatattaccagcaattatagaacaacaagagaaaagtacagtaatcctcaagagaacctggccaaaaatccgttatgtgatgctgcagcgaaggaagaaaaaactctacatttaaagttcttagatgccaaaaaacattatgccagctaccttcaccataactcaaagatttattggctgagatttggggatgaaaacactagctacttccacgcttcatgaacaaaagaagacttgagaataagatttgttcctatagtgtaggtggaattgtggaggatgattatactaaagttgtagagcatttcctcaatcattttcgtagctttatggggaagcatagctcaactacaaggagaatggaggttgattgccttaataatgggaacaaactgaacctgatacagcaagtacaaatatctcagccttttaacaagatgtatgcgaagaaagcattattcggtatgcattcttcgaagagcctaatctcagatgggtttggtgttggcttttccaaagctatgtgggatgaaataagagatgatatatctagagcggtcctagggtttttttaaaatgggagtctcccaaatccttcattcccaacaatgagaatccccaaagtgctaacgactataggcatattgcctactataccacaatatacaaatgcatacccaagatgtaactgttggaattattttactaggatcttagagtatcctttctgccgcagagtaatatcaagatctgagcccgaatgtcc

SEQ ID NO: 387169 - DNA, 1296 bp, Cannabis indica
agagagagagagagtctgaaaagtttatagtatttttcaaatttaaaactgatctaactaaagtcatgtatttatgtttctgatatatattttatatatatatattgttttattattaataatatatataatatatatcttaataataaataattaaccaaatcttttatttaaggggaattaccccatatactattttttaactttttttttttcaaatttacggtttgggtttctaaagtgattgcagcgctagttgcagtaggagtttctgtacgattttttgttgcaatttaagttgcagtgctagttgcaataagggtttctatacctaattctataaaaataaaaaaaaaattattttgaagtgtaaaaataaaaaagcacctttatttaatacccaaaaataaaagataatttatttttaattcaaatttcaaatataaatatcgtgattaatgaaaatcaattataatcttttatttaataatatctttttaattttaaatacattatctgatcatatttaatgtatcgtatatatatttcaagattaaaagcgttaaagtttaaattaatattaaaaacttaaacataagacaaatataaattgaataaacgttaaattattaaacaacattcttaaaaatatagataaatatatatatatatatatatatattaatgtagtgtagattctgaatgttaactttaatattcaaataatactaaaattatcaactataaagtttacatttctgattaaacactataaagtagaaactttaaatataaaatagtttaattagtaaatgttatttatgtaatatatattatagacaattttagtaaaaataaataaattattttattcgggttatttaagcaggttagaatcatattcaatccacacaatatattcattgaacgattcagatattccattaagttattcaagttgtattttttgttaatttattggcatttcttaataaaaattattttgtgaaacatcacaaaaaaactaaaaaaaaataatagagatccattattgaggaaacaatatatgtttataggtatttttaagaattaattgcacatagagttatttgcggcataacctctttaagtggccaggtttttgcaattaacccccaattctaaaagtttggtggtaaaactccctaaactcatgttctgttaacatttagccatttccatccatttttaggtgttaagtgccacactgtattgtctacgtggacaatatgtacacatggcattatattattggtc

SEQ ID NO: 387170 - DNA, 989 bp, Cannabis indica
tagtgtttaataaacagattagctgtgtcaacttgaaaatgacttaaatttattttagaaaaattgaaacccatttattttatgcaattttcaaattgtgtcattgtgtatgatcaaagttgtaaatacgtgcgtgtcgtgttagcacatcccatattttttgggttttttaaaatacagattgtgttgtgccggaccataaaaaatatgagtcatgtcgtgccataaaaaaataggtcgttccatgtcgtaaaaaaattttatagggtaggcccaacataaaccgtcgaatttgtgtcgtgctttattcgaatcgactgtttttcttaaatagaccaacttgtttttttatatagccctaaattcgtgtattatatttttatatttttattacaattgataaataaattactaaaatatatatttattttatagttttaattacattctaaaaaatattataattatttgaatttgaatatttatattattttaattgataaataaattattattgttactatttttaaattattagactttttaatttgtcgtgtttttgaactaattaatttgtatttagaagcagtatttttaggtttattgtgttctatcgtgcatgtgtcatgccaatttgcaacaattcttatgtatcgtgtttaaactcctattttttatctcgtattatattaaagtatatatacttttttgcattagatcgtacccgaactcataccatgtccaaaaaccctatccatatttactattctgaacaccctatattaaaaaaaagatgttaaaatcgtaaagtttcccaaaaatcaaaagaatacaaaaagtgatagaatacgtgaagctgttaaccgtacaccacattgatttacggggtatattgagaaatacctcttttatttatcaattaaccaaaactacctctaattttatatttaattataacatacctatttttatatgtattgtacccaaaa

SEQ ID NO: 387171 - DNA, 1212 bp, Cannabis indica
ttttttttaaaaaaatacaagaatgtaataattttttacttaaatcataactgaaaataataataatttattgcatcacatttaaatttacagacaataaattaaaaggtgttttcacaatatatccctttaaataaaaagagtcacacatacaatataattgtaatgtacatgacaataaaaaaaattagactaaaaaacctctcaaataccaaaataaatagggtacatcaatgcaccaaaaaaaaggtgcattgtaaaatatttttcttaaattaaagtcttaattttataaatacaattaataataaacataaattaaatattatttttataaattaaaaaaaataatatatatatatctacatatataaaaaatgaatgcattactacagtgccacgacatatactgcagtcacacgacaaatatagggtgaaagtggaagtctccttggagacatattatgcatcatatattgattatgcaatctatttggagttgctctgatactcaatacacaaatgtttgatctcttggttatatgtggttcaatttcttatgttcaaagctctcttctcttcctttgtttagctaaatctttatgttttagtttctgtttttccaataaaatctttatcaatttaattaaataaataaaaaaaaaattggaccaagaaattttagcttgccgcccactatatatgactatatatgttgggccaaattaaaatttttgtcatttattatctagtctcatttaatgttaacaaaatttaaattaacaaatattattttaatttaatttaaaattttttaactttatttattgatttattttataaaaataaatatatattttttacgttaagttacaccaaatgcagaaacacaaatataaaattaagccgaaattgttgagatcatagcctaaattgccgaaatgctagtttggagtgggctgtgttgcttgagatcatcatggaaccattgtagaagctttcaagaagggaacgacgccaaaaacttgttgtgaaaattatatacgcaagtatacgcagtcacacaagtaataaagtgataagtaagatcgtctccacagggattgcaaacaaagtttgatataaaatcaactaattacaacttaaaataaaaagaaataatatgtaaatggttgagtaatgattcaaaattaaaattgacaagaattaaac

SEQ ID NO: 387172 - DNA, 730 bp, Cannabis indica
taatcaaacttttccaagttcttacaaaatttctctaaatattttccatcttcaatcctttcacctggcattaacctagaacttgattcacattaaattgtgagtcaatataacatataagattcttaacttttaaagcttcggctattctcaagccagccaacaaagcctcatattttgctttgttgtttgaagtatcgaattggaatcttagcgcatagtcgaatttaatgttattaggcaacatcattatcactcctgccctcaagccattctcattcaaagctccatccacatataatttccaagtttcagtatcatgcttgacaagttgatcttcctatgagagtatcccttcaattagaaaatcgatcaaagcttggcctttgattgatgttctcgattgatcattttatcaatcttcgtgaagcattaggtttagataaaacttgtcttaatggttgatcagttaggacttttatgggatgcacctagaaataaggccatagtttgcgagattcatgaatcaggcataaggaaagttgttcaagagggggatatcttgactcttcccctagtaatcttttactaacatagtaaataggtttatggtgctttccctcttctcgcaccaaggctgcactgattgcattctccgagacagctaaataatgttataaagtttctccagttatttgtttagccagaactagaggtgttgataaatgtt

SEQ ID NO: 387173 - DNA, 970 bp, Cannabis indica
aaagttaaataaaaaagtaaaaggcatgtgctgctataaggggtgttcaaatatctgatatataatgatctgaattttatagcgcttcgaattttctttattcctctcttttatattttttttttctataaattctcttttttatagttgacctaattaattcaataattaatatagactaacaaataatgatgtaagactaatcaccataaaaattacaaactcctcaaattttcatttaatacaaaaaattaatactgaatgataaaaataataataagaaaaaaattatttttactctattataaaacaaaattaattataatattattgtagaaattcaaatttctaaaatttaaactacaaaactgtaagaaaaatatgtcattacaatattttgaagtaatagtatacttaccaattatgctatgattttattttaattttgttgtttagattaattatattaattataattaggctaaactaatgattataattaatgtttttttcacattgataaattattaggtattttataatattatatgttatgctttttcaaaaaaataaataatatatgttatagaatgaaaatatttgttgtagtgaggcttaacaatgtaacttgcggttgattattgatattttttttttcttttgaatgaaaatatttacattaccataattaaattgtaagacatgaatgtattaatattaggaaatttaatttacaccccaaaaatttctaaacactccatttaaataatttttattttatataaaatttatatttttaattgtattaaagttttttttttaacttttttttttcaatttcatattcttaaaaaatatacctatcaaataaaaataaattatattttaaatattatgacaaaaaaataaagtaaaaaattatatgaaattttcttaaaaaaaaaataaaaataatatatacatgagttag

SEQ ID NO: 387174 - DNA, 1044 bp, Cannabis indica
ccgggataaaagggtttcacacttattggctcaatgttattttatgttacatatggattgttgtatatatggtttatatgtgccctgtgatgtttgaaatgatttggataggtttcggaggagttttgggtgagtgcaaaatttgatattttcgtgccaaaaaatggtaggccattttcatcaaaacgacctgctattttttggaaattccgaggagatcaaaaatcatatttttgtcataacttttcactctagtgtttgtttttgacgttctatataccatttcgaagcttgcgacaagttgtacaatatggtgtatgttttagagccaaaatatgtgtttttattttagtgtatttataccgtggggttttttacgaaaccctagactgtcttatgtgaatattaagcagtgttttgggatagacacttattggtttatcgttgttataacatagggttcggaatagttgatcgttctcctagcaggttgtctagcatacctaaactaaaacttgaggtaagaaaagtatattgtattgcatagcaagttatattgcaatgtaattcaaattgttgagaattgattgatattgggatggagatacagttattattgctatgtaatgaaaatattttttgattaggcaatgacaatgtgatgataccatgaatgtgatatataggctcacctaattaggtgatgcgatatacctatcggcgatacctgattaggtataagcggcagtgacatatgaatgtcaagttatggcatgactaaaaccgttgttaggtttcttcctatcggcgattcttgattagggatgaggggtagtgacatgtaagtgccaaatttaggcacagactcacctgattaggtgatgtgatatgttggtgccaagaaagggtacgggcttatttgatcaggtgatgcaatacatgggtgccaggtttcggcacgggctcacctgattaggtgatgcggttatgcgatatatgggtgtcaggctatggaacgggcttgcctgattaaacaatgcaata

SEQ ID NO: 387175 - DNA, 1006 bp, Cannabis indica
aaaaaaaatgtagaaaataatttttatttataaattgtatttgagaccaaaaatattatgctcattaattaagtctaattaatataatgtgataaaaacttattataacaaacatagttaataatatatttacattatatttattgttaatttattaaatggtttctatttaaatagagtattatgtattaaaaaaaaatgtcattgcttcaagtttgaccaaatttaaaataaaggttattttatattacaaaaatatatatgattataatttttagtctcaaatatttttgtaaccttttttttttttaatgttggtatagtaagtacaccaaataagttaggcttgcaattaattaataaccaaaattcggtaaaaagtttgttttaactaattaatcaataaactagtgatgattcaaccctatttctaatgaagtaattaataacttaacacacaaaactaccaccactacatataacacatttcatcacctataaaatgagaaaaatttctaccatatcatcataaaaacttactacaataacttaagaaataaagaaagaacaaaccctaatcttaatttatataatcgatggcgaagagttttttcggtgtgaaatttctttgtgtggcaattatggtgatggttatagccgcaccagtcgtaaatggagacattacttgttcacaagttaataacatcctctcttcatgtgtaaactaccttagaaatggtggttctgtctcgacggattgttgcaacggtgtcaaatcgctaaacgctcaggcaaacacatcatctaaccgacaatccatatgcaaatgcttgaaggattcttataaaagtgtcaaaggaatcaaatctgatcttgcttctggattgccctctaaatgcaacgtcaaaactccttctcccatcagtctttctgtcaattgcaccaagtatgtatatcatattatatagagtaatttgtggtaaaactctcttatgttttaattttt

SEQ ID NO: 387176 - DNA, 970 bp, Cannabis indica
atagcaaccctattggtgttagtactgtattgtttgacaatcccataagacgagctattacacattagttgaacgtgaaacttgagttaccaactctatgggctattacacaaatgcaattctagatgtagaaattatattggctatctttaaattttacaaaagttgtacgctcgacctaaggacagtaggagaccatccataaaaacaagaattattacctcgaggagccccttctttaactttggtggcttcccgagttgttatattttcaaggtagtgaatgcgagcgatttagtctcagtcttcttcatcctcgggcactgaaactggctgccaagtaggatacttgggatccttgtagtccatggtgcatagatccagtaggatacttgggatccttgtagtccatggtgcattgatcgttgccgagaagaccacgtgacttaaaattatattcatgcaacaaaaagtacttagcagctcacaacctatggggaagattcacccagatctcgtgcctcctttggacctcgggtgttgggattggtttctttgcagtagctaaaaatgtggaagaaagaatagaattagcataagtataaaatcataaaaaatctaaaaactcaaaaccaagattttgagaataaattgtacttacgtaaaattctaaatttggtggtattaattgggtggaacttgtcgtccagaagaagttttctttaaacttctttttatttggaagcctgacaatgatcctgtgattatttgtgtgggtcccctaacaaaagcatctcacaccatgctttctcgcgggacaagctttaatggcttaaaaacaaagaataatcttgagaggtgtgaggcactccaatcctaaaatgtggtatagtgacttcagactgttgggttttatgccctaaataaaactttttacaatttgattagtaatcaatataagaaatttgaa

SEQ ID NO: 387177 - DNA, 791 bp, Cannabis indica
ggagagaatacagaaactctagtgtttcttggggacctctacctatttataagctcattatataatgagttttgggtatttataattttggccccttaacaaattataaattaacttatggtatctacacattatttctatgataatttaatattcttttgatacccataacataattggtcacttaattttgtaatcatactttataagaacatatacattatatatatgcgctcacatagaatttccgatgggaccactgtatatgttcacaattaaatggccaacaaccccaaacagcaatctttgaacatgttgaaaagaaaaaaaaaaagggtgtttcagcaattttagaacatgcacgatagaataatgagtgactatatgtgaaaagaaagaacaagtgacatatctactttcttgttccaatatttaattccatctgtatggatggcatttaccaatgaaatatcaaatgtacaaggatcgtttattttatttaagataaataatgataaagtatttaaaattttaagtttataagtgactataaattttaatttttattttttagtagtataagtatttgatattggattaaaatctttaaggtgaggtcatatttatttgtgtatattgctatataatgtttgatccaaataaaataattattttagtaattgtaggttattgggtataaagtttcataaactctacagggtaaataccattttggaccttatgttttgcaaaagttaccgattggaccctctgttttgttaaataataaa

SEQ ID NO: 387178 - DNA, 3519 bp, Cannabis indica
tttctcagtaaatgtaacttatttaagacctcaaattcataatttcatacaactcagtactctcttttcaatctgatcagaaccataagtttgaaaagccatggcagagttcattctctctccaattgctgacaaaatcattggtggtttgggatctgaagctgtgaaacagatatctctggtttggggtgtgaatgatgagcttgaacaactcactgaaaccatttcaacaatccaagcagtgcttttggatgctgagaagaagcagagtcacaacaaccaagtcaagaattggctccaaaggctgaacactgtagttctcaaagcagatgacttgatggacgaggtcaacactcaaggtttgcgacaccaactcataatgtcccaaaacccattggcaaaccaggtactattttcattcaatctcataagacatttttatattctagattgtattcaatgatcatgtaattaatattttggttattatttattgtgctctgtaatttatttccgaaaacaaaaaattatgccactctacaggtgtgcactttcttttctggctccaaccaacttgcttttcggttcaagatgagtagtagaatagaaggcatcaagaaaaaactagtggccatttccaatgataaaaacttccttttggagaaaggacttggagagactctgagttctatgagagtgagagaaacttactctcatgtacgtcatgaagatgttattgggagggatgaagatagagcggttattataaataagcttttgttcgagagttgtgaagagagtgttccgatgatagccattgtaggtattggtgggttactaaaagtgtttttaatgatgagcaagtccaaaagcattttgagttaaagatttgggtgtgtgtatgtgataattttgacttgaaatcaattattagaagtatcattgagtctgccaaaggtggtagcagttttggagaccttggaatggagctgttgctaaagaagtttcgagaagtacttggtgggaagcaatattttcttgtactagatgatatatgggaggaaaatcgtaataagttgttggagttgaaaaatttaataaaaagtgatggacatgctgggagtagagttttagtaactactcgcagtgaaaacattgctaaatttttaactaccaaacaacaaccctatcgactaggggttcttgatgaagttcagtcatggtctttgtttaaaagggtggcttttgatgatggatcacaagagctggatagctctagcattgtgcatattggaaaggagattgtgaataggtgtaaaggaatccctctggccataaaaacaataggaaatttgttatatggtaaacgtttagaattgcagtggtcttccttcaacatggaattttcaaaaataactgagcaaaatgaagatgatattttacccacccttagattgagctatgaccatcttgcctctcatttgaaactttgctttgcctattgtagtttatttcctaaagactatcaaattgaggtgaaaactttagttaacctttggatggcgcaaggatttcttaagttgtcagatccaagtcgaaataaatgtttagaggatgcaggttatgaatggtttttgaatttattggaaggatcattctttcaagatgttgtggtagatgaatgtgacattattacaacatgcaaaatgcatgatttgatgcatgatcttgcagttcaagtagcaggagaggaatgtatcacttttgctatttcaaatggtcaaggaaatatcaaggaaactactcatcatgtgtccttgcaagtgatacttactcaggaagggaaatttcagcttcgttggcttatgccgaaaatgttcgaactcttttgaaatttttcttttcaaaggaccaggcattttgtgatgcaataatatcaaattgtaaatttctacgttgtttggatttgaaacgttcaagtatgaagttagtatcaaattctattggcaagttgatacacttgagatatttagacctctcacgtaattcttatctcaagtcacttcccaattcaattacgaatttggtgaatttgcaaacatttaagctcaattattgctcaaatctccgaaaactacctggagatattgagaaactcataaaccttaggcatcttgaagtttcttattgccatgatttgaattctttgccaagtggacttggtaagttgaaacaattgagatacttggatctttctagtaatagtggtttattgtcgctaccaaattcaactaatgatttgttgaatttgtagacactgatattgaatcgttgctcaaaacttcaagagttgcctagatatattgagaaactcatcaacctcaaacatcttgaaatttatgattgtgatagattggagtatatgccatgtggactaggccagctaactaatcttcagagattatcaaagtatgtgttgatgaagagcgaaaattctatcccaagacatggtggtgaactaaaagaattgatgagattgaacaacttgagaggcagattggaagttataaatttgagttgtaagaaagatgtagcagcaaagtatgagagagcaaaattaaaggataaacaatatcttcgatcattgatattggtgtgggattctaatgttgaaattgatgaaactgaggctattgtgggttatgaaatgtcaatagaaggtcttcagccgcaccaaaatattctagaactaatgctagtaaactatgggggtgttaagctctccaactggctctcgtcgcatacaaacctagagaagctaactttgaaagattgtgaaaattgtcggtatctcgttccattggagcaattacaatgtttgaagcatttgaaacttgagaacttggtatctttagagtacatatccaacattaatatgagtgaaggcttgcttggttcaacaacaacattattgcaatctttgcagacacttgagttgatacgtttgcctaatctaaagggatggtggagagagattgtaaatagtggtaaagaagttgatcattcttcttttgctccaaatgcaaatgaagtcaaacacacctcctttccttatctcccttcactttcttcattgtatatagaatgttgtcctaagctgtcttgtatgccactttacccacatttggaaggagaattgcatctgggcaacactagctcaaagccattagaagatacattaagaatgctaatgttgagaagtaatgttggatctttattcccaacaaggtcttctttctcacctcgctccatgttggaaaggctagatctgataaacattgatgatctagaatgtcttccagactgcttcaagagccttacttctctcaatcacttggatattattcgttgctttaaattgaaggatttgtgtccaggcattctacatctctcatcacttcgacatctacagattacaaattgcgaggtgttaggagacatgcttaatagcgatgatta

SEQ ID NO: 387179 - DNA, 1726 bp, Cannabis indica
agatttattagttatatatattattgtttgtagatagtgttattattcatgtattttataaatatatatatttaaaagaagaaataagtttagtactctttgtttttaatattgtttatttgatcatgtattcgaaaattgtatatataactagaatagtttggtcgaatttataaaatttgattgatgaaatttaaatttagagtatcaactaatacatatgtatggttttaaaaaaaatgttatggaaatgtaaagtattaaatctatatttccattaaacaaaataccaaataccaactaacacctgtggagagctttctcttggggagtgatggcagttttgaactctggagttcgtatgtaggattgagtcaaattcttatggggtttggagtctaagggagtggaggtcaaagagatttttttgtatgcctcggttgtgatggacatgatttggaaatccactaataacaaggctcataataattctatttgtaacatcaaacattgcattgattctatttctatgtcttacgtagattatagttcttgtctttttcctgcgccggtgacagctgagcctactgtttggtcctcttgaaagattgggtcaaaatcaactgtgattttaaagttggttgtgattcaatgtgtgtggtagcactgactagggaccaaaatgagtcgattttgtgggtagctactagattgctcaacttctctaatccgctcactggggaagttgttgtctgtctgttagctatggaatcagcgatctcctgaaagcattcctttgtgttgatcgagagtaactcagagacggttatcaatgcactgaaggaaacttgtttcgtttggggtattgtaactatgttcttcattgcaaataactctctaatttgtttattagctataattttgtatttacttcgagattgtataattttgcgactctatgtggctaagtgaactttcgttagtggtgtaactggtatagtaaatcattcttctatactaaataatattttatgtattgaccgtgaggtctaattttattttggttaatatatttacgctaattattcaaaaaaaaaaatgccaaatgagtaccatctcttaaacaaaagtaaaaaaaaataaagaacaaagagtaaaacaaaagatagattctccaactcaaatgaagaaaaaaaacactaaatttaataacctattgcagtctttagaaaagaaaagaagctaatgcttttttttttcttcttctcaagcaacacaaaatccacaaagaattcctaaactgcgaacataaaacttttttataatcaacatcagtggatcacgtggtgtagatagaaacggctctgaaatttagtaagttataactcataagaaaaaaaatatttttaaacctttatttagaattaaatatgatttttttaaaattaataaattaaaaatatgtcatgttaaaaaggagattttttttactaggtaagtcctaaatacaagcctaatttgtttatgcataaggtgcaaatcactttttcatttctttagtatagcctagacaatttcataaattacgtgctagctataagagttttatacttcattttctcttaattagtcatcaatatatttgtctcccaagaaacttaacatttacgagacaaactaaagacatccctatcactacaccatgtaaattgtgtttattgacatg

SEQ ID NO: 387180 - DNA, 1357 bp, Cannabis indica
aatgaagaagaagagaatagaaatcgtgtgggtaagagaatgtgggtgagtaaattttaataagacaagacattaccttttttgaaattaaccaccataaagtagctttttttttcaaatgaaacaaaaaaaggaaacttaaaacaagtacccactcacacacgatcaaccagcaagttatgtcctttttcgtttttttttttaattaaaaagatttgcaacaaaaaaaaaaagtaaaaaaaaacattttttttttcgaaaaaagagaaaataaaaaaccacaaaaaatagggaccactaagccctacacgatcaactctaattaactttccattttcttttaaacaaaatcaaaattaaaaaggaaacaaagacaactacattatgacaagtatcatacataacatataaggataagttgatataaataaagacttgatgatcaagaatactttagaacaaataattaaaatgtcaattttcaccatatgttacaattaattcagcccactttaaaaatcatgattttattttattttttatttcaaaataaatgagaatgacaaagtccccaaaaacaataatagctatgatcaatgtgcattatcttgaaaaaaaaaataagacaagccaaaagaaaatagatgttagtgtatgatggagataaaaacacttgtgatttttgaacaatagaaagaattttcgagagaaacaagcacaattcaattacaagcacatattcttcaagaaagtcaatctacatgtaagagtctgacacacattttttcttaaataaacagtgtaatatttttcttgaaaagtttaaagcatatgtatgtgatagtgtatgcaagggaatattgctcatttgataagagagtctttttctaaatttaaaaattgtaacctatgaagatgctgtcacactacaccagtggtagccattttctatggtagtgtatccgcttcataattgcgaattacaaagtaccaacttactcaaaagaaacctttcacacactgatgtaggtagctctattcttacataggagcttgaaacaatgctgcataaaggatgctcaaacattaaccattgattgattgactcgaatatgaaaggaggaattgattatttttgtcttcaagaaaaaacttctaaaatcacaaaaaacacaagtcaatttatatttcaaaacacaaaatacaattttcaaaaatattgccagatttcttaaatagaaacaaatacatttgatcaggcaacaaaaataaagtttgataatcaaagagaaccaacccctaaagattttcggagaaattaaagcgaaccgaatcaagagccttagtgaaaatgtca

SEQ ID NO: 387181 - DNA, 946 bp, Cannabis indica
ttttagatggatgtcaaaatttgacacttgcttcaatacttccatgaaggccaatataaatcaatatatgattgggctgcttgccccttgactcgagggtcccttactgattggatagtatttattccttctttcacaatttcctgcaagacaaagaaacaatacacagtttcctaatcttttgttgagttcctatattgttacatggcgactgtcattgaaaatggcttaaagctttgcttgcaagtttggatatctctcattaggattgaacatcaagagggttgatcaggtttcaagttggaaaaaaaaacttgtgcctgcccgtaaaatgattaggttcatcgagctagtgggttttcgtgtcaataggttcatgggttcgggttgaccagatcaacatgtatttaaatacttaggttgtagctgttggacttcgtgaactgaggaggaggagaggttgctatacaagacaatggtgacgaccttcgacgatcactgtgagaggatagtagagctccaaatgggcttccggccgtctttgtcgtgggagggtcaatctctggtagaacagtcgaacgaggctgtcgtcgtcgatcgagtggagggggctttggtctggcttagggtttaatcttggagggtagggggagttagggtcgaggttgggggtgtttggtctggtggcttagttttagtggaaattacactacatatctcgtctttaatttttaccatctttttcaaaatctattatgtttacctcttttttcaattattctaccaattttactttttatcactttacgatagtttttatttttttctaatcaaaattttgccaaactttcccacaaacctatatatccatctacaaagaatacaaatctattatatttgaaattatgttttaattatgtgagtgtgtgaagataatttaggtaca

SEQ ID NO: 387182 - DNA, 1106 bp, Cannabis indica
gcccctcgggcttggtatgactcactgaaacaaactctaatcaaatggggttttgttaactcacgggcagatacttctttgttcctgctgaagactcccaagtttgtcatcatggttcttatctatgttgacgacatcgtggttacaggtaatgacactcgagaactcaatatgttcattgatagactgaattctacttttgcattgaaagattcgggggatcttaatttctttcttggaattgaagtttttcgagatgtaactggcatgtatctttctcgggaaatatgttatggagcttctcactcgccttgatatgactaacattaaaccatgcacaacgcccatgaccggggggaaaccattgtctctgcaagatggtgaagaattggccgatcatactcaatataggagtgttataggggcacttcagtatctcactcacacacgcccagacattgctttcgctgtaaataaactcagccaattccttaaatgccctacaacaactcattggagcgctgccaagagaatcctacggtatctaaagggcaccattcaccatggaattcatatgaaatacagtgaacacttgtcgatcacggggcattgtgatgctgattgggcatgatgtcccgatgataggaaatccatagcaggatattgtgtgtatttcggtgaatctcttgttgctttgtcatcaaaaaaacaaactgtggttgctcgctcaaatactgagtccaaatatcgagctttggctcaagttgcagctgaaatcatttggattgagtctttacttgaagaaatgcaattcaagctgccctctacaccaattatttggtgtgacaatatgagtgccaaagccttggcatcgaatcctgtatttcatgctcgcacaaaacacattgaacttggcgttcattttgtttgtgatcgtgtgcttcagaaaaaggtggaagtccgatacattccttctcaagaacaagttgctgattgtttcacaaagggtctcacacattccaaattcaaagctttcattgacaaacttggtgtgatcaactcacccctgcgtttgaggggtggtattaaggcagattaattagtgt

SEQ ID NO: 387183 - DNA, 839 bp, Cannabis indica
ttttttcaattatatcaattttgttacttttttattatttaatcatcattagtaataatgtagcatttaaaacaaaacctacaatagtttaattctaataattaattcttaactctttctcttcttttatctcaattttttattattattcaattttggtgtatagatttttaattttactatatgtctatgatatatcatttttatgggggctattatgagtagggaatggagtattttacctatcaatagagatagtaatttataacccctgatttaatccaatggctcaaatcaactcttgaaaactacaccaaaattaatatatttttttttatttataattaatctttaatattattaattgtaggttcaactaacaaactccaaacctaatgtttttatctttctattttatttctatttaaaatttagttttaattatattttttttatttcaaatttacaaaaaaaaatattttaattaaatttatttttaaaacaataattatacttataaaaacctataacatattcaacttataataattttataataatcactcttaaaataattaaaatgtcacgagttcaatactttagaagtaatattttcttttcttttctttacttatatttaatttaagatttcaattaatttaatagtttgaaaattctatcatattatattaattaattttatttttcaagattataatgttcaatgtatttaaaatttttagtatataaaattaattttttacaatcaattacatcatttataaaatcatgcatgaactagtaaataatatacattcatagtatggttattcttaaac

SEQ ID NO: 387184 - DNA, 874 bp, Cannabis indica
tttgtaaaataattctaatattaaataatatttaactatattgtaggaagctactcctcaggtagaggaagaggagcctaagccaaaaggaagtttgagactccccatttgctatttgaagaagatcataagcagtgaggtgatcattgcttaccattttttttaataataataataataataaaaccttacatatagtatatttatttttcttattaaatattaacacataaagtatacccacattaaaaaaatttgatcggaatattaaattgaaaaatatatataattgtttataaaactgtgtttgattatgtatgagaatatttagttagattattctatattgaactatattgtttagttaaacagaagaattcggtattgttgtaaaaagttatataaaattattaaaatattaatctgttgtattaagattgaaagaaatagttagaacttactttttttaaaataataataataataataataataataataatattagacaataatattaatactacagtaatttcttgctcataaaacatgagaaatgtggaagattaccaatcctataaaaattatgattataggaaataatatccctacagtattattatgattataggaaacattactctttcaattatgtgtatttatgatatagatattttaatcaataccatattatataagacaatataatatgtataattgatactagataataacaaacagtggcggatccagctcttgcctatactcatttttttttcttaatgatgtatacaaaagaattaaaattaaaattaattatgtaaaataaaataagtctttatccctcctaaataaatatatatagttatattta

SEQ ID NO: 387185 - DNA, 894 bp, Cannabis indica
taagatccactataactatacccaattactaaaaaaatattcctaaattattctatacagttttatcctaataattcctactcttacccaaactaccattttcatttaattttttcaaaaatctcaaaaagtctttctctctctaatctctcattcacactcgcacctaacatactcaatcaaccctttgccttcctctctctatctccgatgatgttgaaggtctagtctccttctctatctttcttcgttgttgatgatgttgcactccctccatttgtctctcaatccatttttctttcttcgggtggaagaaggtcgaagctccttcccatcctccaaatcctctctctctccttctcattctaggtcgaaggcaacttgtccttcgccatcgttgatatcaaaagaaacttgcaaaagccagaagccccatatggtttttttagccaaaatatacttgatagtttatcaataaattttgtttgtgtaacacaattttatcaataggttattgatagtttacgaatgatttttgtttgtgttttgtcaatttgacatttattgataggttattgatgatttctatttgtgcacaaaatagcaaaaaaccatcgataaactatcgaaaactgttagaatattagttgtagagaaaataggaaaacttgtattttagtagtttccgatttgtatttagtagtttctcatttagtcttctagctttgtatataaatatgtactattctatgaaatacatacacaattcgattcactattttctacatggtatcagagccatacttagaattgtgattcaaaattagagttcataaaaaaaattagggtttgagtttagggttctttttcaaaaaccctatttggagtgtgaat

SEQ ID NO: 387186 - DNA, 1175 bp, Cannabis indica
tgatgccacatgggctgtgacattgttctctaacatcccacacttaactatactattcaattcccgagtaatgtgtaccagcctgatttgtgagccgattttggaaccaataacaagaattgagctattaccatgagacacacttagatctgtcctgaaaatatatttccaatgcaatttgaaccaattcatttggattaacaatgaaagaattatgccaattttattgaagggcagtttatgttgttttgttccagttgcgagcactgacatggccaaatggtagctctcgaccatgcatgttctcggatccctcaaggtgtgattttacttgttttttgatgttgattcatattttgggggtcctgggactctaaaaccttattttgatgtctgaaaccctaatgggagaccactgccaccgtcagggcctgaaagtggcagtgatcggccacggcttataagaagtcatgggtggtgtttcttgcttatttcaatcatatgcatgctagaaaactactttggtaatattagttcttggccacttacttaagagagcattgccacaattttttctaaaaaagtggcagtggtcgcataagggggctatggagccttaggtaatttttctcacttctaattgatacatgaatgttggaaatataatttggccaaagaaactgccacttctatgtggtggccgaccactaccaccacttctgccaaaaatgtggcagtggtcggccaaatggttttcacactgcttggtagcttttctcacttggtattgacatgctattggtgaaaatatacttttggaaacaaaatctcatcccctttccttatggccaaccactgcaacaatttgttcctcaaagatggcagtggtcgactaagcttgtattttggtgagaaattgtttctttcacttctgttgcactccttggtattgaggtaacatatttgcacaagtttcctttggtgctttataggtggagaccactttcatctacttgtggtagtgtcctccaaaaactcggcgcaagggggaggctgcaggatttccgcacgcggatgggcagttcagacaggcgctcggtcaagtagttgtctgaacgtgtgctgtccgagcgcgtggccctgttgcacgaccctgattttttccgaaacttcaa

SEQ ID NO: 387187 - DNA, 977 bp, Cannabis indica
aaaaaaaaaatccataaaaattgtaattattattacaaatatgccttttcaatttgtcttttgtttatttttgttgtgaaaattaaaagcatgtaagtgcacacaatcgtaatttataaatttagtatgatcaagtatcgttctacaaaaactgattatcaatcaattaccaatcaatcaatcttttgtttatttcattaaataatttttcaaaattttagaaagaaaataacaacaaataacaataaaaatttaagaaaataataatgagaatttaattagaataattatattcatcaactatcctctcttttactttccaatgcagttgaccctaattttttttttttcatattcaattaacaagttgacttagtagttcagttaagatttataaactcaatctaaatgataacttcttctatttctatgggaaagttaaatcataaagaaaacaataaacatgacaactcatataattatacaaataatcttgatactttcattctaaattaattttccatccagaataatcatagcatattgaataataaaagagaaatttgaacttttctcttattcctaagaagctaccctaaaaatgtgcgtaatttttgacctatctcttgttgcaatgttctttataaggcttcaactaaggtcttatgttcaagatcgaaaaaagtgatcatgaatttaatagctgaaaactaaggaggattcgtacatggttgatacatagctcataatataatggtttaccaagatcgcttgagattgtatagaatgaaaaattgcaagtctagttgcatgatcaaaattaacctaaggaaggcctacgatactattaagtggaactttattaagaagatgctcattgcttatggattccctaagaaattcataactctttatcatggtatgtatttgaaaaaccgtgtttttgcaaatgtcagttgtatataagaaaatataaa

SEQ ID NO: 387188 - DNA, 545 bp, Cannabis indica
attattattttaatagaaatatgtaattccattaattcaaaacattcaaaagtacatcatgtaaactactcgaaatcgtaaaatcagaatagatacaactaacatttaaccacgaagttctaaccaaatggtgagcaacatgattaatggatcgtttgacaaaaaattaaaaagacattattcaaactaaaaagaatccatctgcactcacaaatgcagaacccaaaaataaaagccatatctaatgaactttggatggcttggatcatgaccagactgtccgaccccaccatcacatcatttcgctctgtttttttctaccaactcaacacctccttaatcgtgatagcttcatcaagaacaagatcaaccatcccatccagcttactgttcgagccataataagttgactagaagagttctgcgccatccaatcatagatatacttattctgatagctaaaggtagctgcatcaacattaattttaattatattacctgtcacgacccgagccctaggctgtggcagatgtgtaatatccata

SEQ ID NO: 387189 - DNA, 889 bp, Cannabis indica
ggggacagctcaagaagaatgaaaaagacagaatttttgttagtaggagctatatagcctcacattaatgttaatgggtccgtctctggtcgctaccagtaatcgctatacaaataattttgtggctatcataggtgattaagtcttcaattataattagaaaacagtttaaatataataatgaaatgtcaacttaattattgcatgtatcacccttccccacccaaactcacttgaaaaaaatgtaatgatcagtgaaaataattaattattaatactaatcaaaattaattatttccacccaactcactaataaactgatataatgtaagactaattattaataagactttttattatatataatgactttgtgtcatcttaattaataagactttttattatatattgtttgtgttcatacatacatggcattagttgactttcttttttgaaaactcatggcattgactattgaataaaagatatataagaataatggaagttggttcttcctctataacgtggcttaatatatatatttatatatactagtaaaaagttacgtgcgaggcacgtatactaattttatgttaggtattttttactttatttaaaaaatataattaacaattaaagaaaaaatattattacttattaggtgagattattattatgtatatctaaataatgtaatttataattttgacaattaaaagtaaatactggatgtaatatattatagtgtttaagaaaacttgataatttaagtgtaatatgttcttaagataatccaaaaataaactaaaaattcatgttcaaatactaaagaaaacacaacttaaatgtgtgtgaaataaaaaagaaaattaaaaatcaatctctaaat

SEQ ID NO: 387190 - DNA, 672 bp, Cannabis indica
agagtggccctatgcgaccccatgcggctcctgtgagagtgggctttgcggttggacttcatcttcaacattgaaccgtgtctgaatgtgggtcgcatgacctggtttgcgcccaacgcatctgaagcttttcaagccaaaataacaacgccaaatcatcggaaataggaagggtttagatcatttttgaaaatttaatctacttatggattcaattcaaagaaaaacacccaaaacaaccgttgatcaaattgatttaatccgaaaatttaaaaaaaaaaattcattaaatctcctaattttcgacttaatcagaaattaaaatatgtaaccacattgtaaaataatggagaatcattcatttataatcaatttcagtcaataataattataattaaaaaacccaaattaaatttcatcattgaaacactcaaaccctaaaagttcaatcataaaattatctcaatttactcaataattttagttacaaaaatatcaatagaaagagaatttcatgatgaataaaactcctaaacttttaagattaaacaacaaaaatttaacaaaaataataacaaaattaatatgtaattgaaaaaattaacatatacatattaattgttatataaattataagtcctaaatcatatacaataggcaatctgataccac

SEQ ID NO: 387191 - DNA, 861 bp, Cannabis indica
aaaaaaaaaaaaactaactaattttgagtttcaagttttcgggaatgattcaacacttagtcaaactcatactaaatcacaagcctttcaaaggaattatatttgataaaatgtgtaaatgtcactttcctgcatgatcatctttgtgggaaaatagagatttttaaggggtttttgttttgaggtttgggtttgagtggaatgtggactcaagtttaacattctcctctatttaaaattcaagtaaacaaaggagtagaaattaccctaaaaggtgcgtaggtcccacaaaataataaaattttgtcacttaaaaaacagtaatttgcagaataattgtgaagttaagtattattattgtcaaaaattaaacttaagtatttatttataactgagagttaatttaaatattatcaataggaccctgtgttttggaccttgtgttttgcaaaagttatcaataagaccctctgttttgttaaatgacaaaatagaccatgtattttctaacatggtacaaataagaccttaaattgattttttatcaaaataaaatttaattataatccgatttaaaagtgctatgacaaaactatttacattttttgtatcggttcgtattaagaatggtctttaagttggttatattaaaaaaaaaagttgttaaaaattaagttcaaggtgctattttcaccattttgaaaaatacaggatctattttgtcatttaacaaaatacaggatctaatgggtaacttttgtaaaacagggtataaaatggtatttgtcctttaaatatcgggtatgcttaggggtgttcgcggtgcgggtggtgcggtttttgaccattttttcaaactaa

SEQ ID NO: 387192 - DNA, 1148 bp, Cannabis indica
tagttacacgctccaatataatatatgtatagatataagttttaaattcttaattattataattaaaataacttcatgctttaagtttttattgattacattaatgagacattttatttttcatgaaaatgaatttaaaaaaaatgacacttaaccatttatttttattatcaattttatattactaaatccatttattatgaacactattctacttatgtttatttttaaataagttttatgatagtttttttaaatttatttgagaaatcaactttttttaaaaaaatatatatatatatatatatatatatatatgctatgggttcttaatgggaattcttccccggccgaataatccctaccctatcctactttaatttaaatgggtattggagcaggtatgggatgaattcaaaaaacgaatatgtagtgggagagtaatttccgcccccgtcccgttccgtttacatccctactaaatgattatataataataatatgtatctttctaaagattatttttattttttgctggagtgattagttttatttaatggccgtaataggtggtgaaacaactaggattataactctaattaaccaagctagcattcttcaaaaaattaaaataataattaaccaagctagctggcaagaagctaaagtagtacattttaaataaatatactttataataacgtataccataattgtctgaccctaatttcttgtagaaaccatatttttattattattattattattgcttaactagaaactttagttttaggctggctcattaaatgttcaaccaccaaactttaatggaatgcaaatattttcaagttgacttccaaaaatctcagatcattcgtttatttgattgtatttctcgttgtattgttcattttggtagatgtagataatagatatggtttcttaataattcattaagaatatccatgctttcaaataaaataaataatcctcatcaattttattaatattaattaataagtcattttgcctagtgtgcttttatcccttttgatattgtctatatattaattaaatgcatcccaagtggtagggtataattagttttcttttgcccctaactgtttatcttaatataaattcaaata

SEQ ID NO: 387193 - DNA, 1545 bp, Cannabis indica
ttaaatactttgattgagttgaatctagtaatagatgctagattgttttgaccttatttgaatggcagatttttatattttttctttagtatttcttgactgcatggctgattttaaaatgtccactaatcataataattttgttcgaaaagtactatgaaattatgactcactttcaaagttcctattctttttgtcatctcatatagtaaattttaccattaagtagtgtttatgttctataattatgttatatgggtttggggatcgcatgtctgacttactgattcattttatcttttaatcttgttaaattgggattattgaagccacaaaatacaagttaaagtcatgttcaaaatggtgtggcagaactaaactataagctcatggtggcataactaaagctaacttttggctagtttggttaaggctcaagagagttagttgttagtttagatataaaatttttgttacctctttcttagttttagattggtctttaaattgtgttgatcaattcattattgatattagaaaatttattagtctcattctcatatctcatatgtacagtatatgttctagctttcttatgcaatatcatttaaaaggccaataatacatagtcaacatcccgaggtattgtgtaagtctactattcttagttataatatgtgaatgtgatttttttctttcaatatcttaaattggaggagtgaagattaggttctaattagggctttgagaactaatcaatgaacagtttaacttgattgcttctacaataaccatttttttacccttggaatttagaagtaacatattgtaggtgaatctcacttataagagctatacttttttttttgagagtgatatatctcactcagcttgattgttattactgaatgcctactcaagtgtcatcttttttgaaatttcttacttataattgtatgtcagttagcattatgggtctgtatagtaagtaatgaatgaatcatggaattttcttccaagtagcaaaggatagtttacacttgatcttgtagaatagtgtgcaattgttttgttttttttttttcattaaaatacatttgagttttgattgagctaaaaaatatatcaactaattttttattttctctgtttcagcgacaagtcttctatagcataaggcattactttgctaaaaaattggctgaacagtgagtgagtgtaatactcttgttgtagcatggacaaagttgaaaatttgtattttgtagaattgtcaagattgcatattggatttgtattgtattactgtaatagttttttttttttttgtatttggactttggactgttttgttattttttttatttggactggtttgtatttacaatttggacggttatgttcttagaagttagaactatgaagtggtttattttgatttgatttatagttaaattttaaaatatgtttatctagttgatttaaacatttctttagctacaactggtttaatatgttttcctcattaagcaaattttttttttt

SEQ ID NO: 387194 - DNA, 660 bp, Cannabis indica
gcggggttcgtttgcctgggaggatagcaagacggaagtttctatatatatatatatatatatttgttttattttttatgagattggatgtgtagggttggattggccaatttcatttccttgccaaaaatttatctgttgattactgagccagagtgtaaaagactgctagaagagtcacaaactgactgggattgggttggggtgggtggagatttctttctttcttttgctaaatcttttttctttccttttttccggatttatatttataatttatgtgctacaaaatgtgtttggtattctgttcctcatacactattgcttctttcactgttgattattaacacttgtacaaggcaaacctaattgtcgtctacattgatgatatccacttcatgtaaagtttgatgtcttgttcatccagctcgcaatcttttcttttttagtttttctctgggcaataaatatttacagtatttgtttgcctagaacatgagagaaactattacatgcataaaattgattttagttattatgcatatttcgatgtttggaaaataaaaaactgttactcggaaacacggagtccaagagaaaaatcaagagtaatttatggtataatatttaaatataatttatgattgtagataaatattt

SEQ ID NO: 387195 - DNA, 509 bp, Cannabis indica
ttttttttttttttctttaaagagatagagagtgcgttaaagtacctataaagaccgcacataagagcatattatttttcaattcagttttgatattgtttggttggaggttattaaacaatatttacaaggaggtaccaaattaaactaactatattttgcaatttttttttttctgctgtatattactagtaaatatatcacatttcgcgtgcaattgtttttatattgaattcggttaagaagttaataattttacagtttgacaattagtaggggtgagcatgggttggaaatgggccgaccaacccggccaacccaacccgaaatgggccgaaacatggtcacatttagtgggccgaatctcacatgggttgaaaagagcccaacccgcaccatatgggttgataatcgggctaatagtttttcaacccaatcaacccaaactgggccgactagcccaacccaactaaaaataattttttaaaaaataatataggtatagtatt

SEQ ID NO: 387196 - DNA, 843 bp, Cannabis indica
catggctctaagtctttgagtgacaaacccatccgtattagggtttgcttaaataagatgttcaaggatgatcatcattgatcatcaccctttccaccatcatgttagttatttgtacctcaacaactaaggtatcattatgagggtacctgacatgatatgagtcaaagtctctgaatgtgattggatcatactcgtagcgttgatatttcggaggacattttacaacctccaatacttctgctcttggctcatgttgtaaagaccttgcgtatctttctaaggcctttctcgagttcccaactaggtgggggcctccaatcacgatcttgagcttgcctgctataggtgcaagctagagagttgcattgccctcaactagagatttaggtcgtacatatcgctaaggagcagcatgcttttgtctgtttagaaactctatctcatcttgtaatcgattacactcacttgtatcatgatcgtagttgttgtgatatcaatagaatttagtcatgtctcttttccctgactctttgaagggatgaggtttgcggtacgacaccattgactgggtggctgtatagatctcttctcttgggactaggagaatagagtaggttgtgaaatgaggttcatactcctgaaggggcttgcttccaattttggctttctttatgccaagggagctaccttgtttcctacgttgttagctgtctttcctacatttaaacctccttccgccccccattgccctgcatcccagtgtcagggttggagagtttggcaatttcttctttttattttttgagcccttggctcaagtgacagcttcttcaagcttga

SEQ ID NO: 387197 - DNA, 607 bp, Cannabis indica
tattattggaatatataaatataatgtggtgtcgtatatatttaaccattggcttctaatcctaatacaattacaaattcttttttattttattttcttttttcttttcaaatttagaaaatctttttgatcctaatttaactagaaatctaactaaaaccttcctttatatatatttagtagactcaaggcttcaattaattaattttcttgagttttttctagcaagaaattaattaaagaaagaaagtaacaatgatcaagtttaatgctctagtagacgtatgttatcaacttctaataactgaatatggatataatgataataataagagaaaaatatcatcatcaccatcatcttcatcaagtgatcaattaggtattgatcataataagagagaaatatcatcatcatcatcatcatcatcaagtgatcatcataagagtaacaagaaaccaaggaagattaaaataccaagtaatgcagttacaagatcgaatcctcgaggtgtggttgcagggccaaatccaccaccgccgctatctcttgagttaatcgccgcgattaatggtagtgttggtcgagaacaacaacgcctcttctact

SEQ ID NO: 387198 - DNA, 1035 bp, Cannabis indica
gtagtttcttgattgcaaaggagacaaccaaccagctgccattaggaacttgacggataagtggtacactgaggagatgacttgaaggtcgtaaagggtgggccttctgagcatcacgttgtatagagacttcacgtccaccaatatgaatgtggccatgatgttattctgcttcagatcagtgccgacagtgagttgtagtttaatattgccacatgaagcaatgtcagctccactgaaaccatacatgagctattcacatagttccaggtcttctaaagttaaacccaacctgagtagggcttgcttgactaggatgtttaatgatgctctgtcgttaatcattaccctggccaccatcatattacttaattagacctcaacaactagaggatcgttgtgagggtagctaacatgataagagtttgattctctaaaggtgatcgactcacatccgtagcattgtgactttggaggacgttttgctacctttaggacttcggctcttggttcatgttaaagtgatcttgcatacctttccaaggccttccttgaatttccagctaggtgagggcctgcaatcacaatctctaatctgcctacaattggtgcaagctggagaggtgcatttcccccaattggagcttcaagtcgtacataccactgaagagtagcatgtttctgaaattctatcttgtcccgcaattgattacacttgttagtattatgatcgtaattgttgtggtaaaatttgttcatgtacctcttccctaactctttgaaaggaagaggtttgtgatacgacactgttgactatgtgtaggactaaacattttgagcgggttcaacccgaacccggccaacccgcccggacccgacccagtcaacccgtaattttttttaaaaaaatatttgggcgggtcgggttcaagccagtgccctccgggcgggttcgcgggttgagtttttggggacaccgggtttcaggttgaacccaaacctgcccgccaacccgcatataaatacattatatat

SEQ ID NO: 387199 - DNA, 677 bp, Cannabis indica
cgagaagaagaactagacaccactagacttgaagaagaaggaatcaccatctttcgcctttcgttttgaaagtctctaaggtaatctcgagcccaattaacctgaaagcttggcaacatctcgatattgttgtggacttttttattttgtttatgccaaaatcttcacataatcaccatcgccaactcaattaaatcttttagaagtagatcaataaatctataaataaaacttataaaatcctcacaatcaatgagatgatcccctagattaaactaaaaaaattttctacaaggcaaaaagaaagagcacccctaaagagtatgatgagtagtttattctttttcacaggcaaagccgatcaaacgggtatgcaaggtaggcacgtgcctagggcccctatcaaactgaggtcccgaacaaataagtcatttcatttttcaatataaaaatttaaaaatactagtataatattatagtataggttagtgtggtggcaacgacaaccgtgttgcacgaagttttttaggctgttgctcaaaataaaatttaaaaataacatgacctgatagtgttataatttaattggtttttgttttcttgtatttgttcattgtttgtgctagattttggtattttttttttgaaacaaaaattgcaactttcattaaagcaaa

SEQ ID NO: 387200 - DNA, 663 bp, Cannabis indica
tacatagatatttagctgtttataatcaagcttctagcttggtccaatccaactccaactatttactctatttcgtttaaaagctaatttcttccatttctaataatgttttcaaatttgaacatggttcaatattgtctattttagcagactggtggatttggaaatatgtgttctttgtttgcttcacttgagttgaccaagtatgatcatttgtgatctcttatgaataaaaatcatgacttgccgttgcccatttgattgataatgaatctccaaacaattatacaaaatttgtgtagcataaggtaattttttttgtctaccacaaacccaatttgtataaattcccctaaacctttgtttagacttgttgaatattaagggtggctgcatctttgatagtttgtactgttcactgtaaatgttaattgtattgatatgctcttgtcaagtatgtggtgctttggtttctagtctatgcaggcacttgtttgtatgtgacatgtgtatccatttgtagtttatgtcagcttcagaagttgagtgtagatttagttgctgtaattagtttctgtgggattcatcccttttagttcagagttgaacattttaaagtttaaagatgcaaattgaagataaaaagaagaaagaaaaagaaaa

SEQ ID NO: 387201 - DNA, 1203 bp, Cannabis indica
ctcgttaaatttaagttacctgtatttcatttcttttgacagtttcaagtgaatcatccctgtatcctgtaatgccctcatcgacggacaagagaaagagatctaggccgtattggtgctgcttattcaacttggacaagacataagcgaggacagtggaatctacagaagatgtggtaggaatacaaaacacatattacataattagtgaaatgaggggaaaaaaacttataattgaaaataagtaattctaattacgctgacaaatggctctgtgatcttagcaactcacatgtaattatggcctatgactacatttatgaaagattttcttatagaattaaaaaaaacaattttgaaagtgagtaaaaaataaaagatttcttttagttgttaagactttttataaatgataaaattcctacctaaaagaaattataagaccttaataaagaagctacaaccaaaagctttgccaaaggggtctcatttgacataaaattgtaccggattttcaagtatacttagcagcttctgctcctacagatgaaaaaaatttcatcatctaatagtagttccagcaatatatgtgtacatacataatctatatcaactaccaaatgaagcatacacattagtttaacactaattttccaacttcctatagctatagtaattctcactccctccacagactttttcctctatttttcgtattcggtttctactacaacagaacaaacccatgatcattcaccaagaacctcctatcatgaaattaaaagaatcaaactcctatgcctctattttgcattcaaccaaaaatttcataaatttacttaactcatacgcagtactacacgatctgttttaattaaaaagaaaaaattagaaattcatataacctctgcaaaaacagatagtaggaaacaagaaagccctcaccttttccaccagaagcaccaatggcgatgcgttcaccgggcttaaacaactgattctcaacaattacttgatgaatctcctcctcaaatgcctcgtagaaacactccctgcaaatcttcacaaaacaccaaaattgaaaacaaacacaatccaagcgattccaaattcaattatgccaaagcttgtttcttcatcaaaaatataataaatcatggcatggtaacttaaatatgtttttgcaaagttaactacatagtc

SEQ ID NO: 387202 - DNA, 743 bp, Cannabis indica
atgttaaaaattactagtgtgtaatattttattacgtattaatatcgctattgatcgaattaagtatcaaataccatatactttaatgtaaactttagtaagtatctaataagatccaataaaaatactcattacataagtacataggttaattaatgtataaacctatatacaatacatacatatattaattatatattcgtctaatattgtttaattattagagtaggggtacgtgaaaggattaaaaaaagattaggtgacattatataattttatattatttataaaaaaaaagactaaaatttcacacgtaaataataaattaattttaagaagtttatttgggcggatcaattccttgtatatatttatattacatagatttgatattattatttgtggattaccgattgatcgatataacatagcacatgacaattaaagtgatgcgtgaatggttatactacacttgttctacctgttcttttattaattgttctttatatatattcattattttttgatatggatgtgtaaataatagtcaaataaaccttaattaatatagcattattgttaattatatatcactagaaataagctaactaataagctgcaatgacccatgaggggcccatggtactggattggtggtatgaatatgtatacgttactatatgtatgtacatatatatacattattattaaatgtagagatagagaggttgaaaagaaaaccc

SEQ ID NO: 387203 - DNA, 1909 bp, Cannabis indica
ttgatcttgatcgtatttaaatcgagtttagtctattgctcaattttattatcattttattggagagacaatgataataaactattcttatcttgaactttacgccaatggtcaagtgtaatccatgctgatacgagaacctgagttggagaagaagctctgctgtttcaaaccagtgtattccgtgccttccataaagcccaacaaaccatgatagcacgacaagaaacatcatcatcgtaattgttgaactaatggtcaagccaatgaccaatagttgctaattgatcaaacggaataaacaacttagctttatcccaacaaccggttgcaagagttcagttcaagaaaatgtgagagacagtttctgcacatagatggcaaagagggcacatgggagatatgtcgatgtgtttagttgtaagttgaaggcaagtgagcagggtgtttgtcacggctctccacctgaaattcttcaccttaggaggtattttaaggtgcataacttatgccagaaccttaaattgtttgtaccattctgctctagtttttggttctgaagcatgtcataagcacttctaattgaaaactcaccagatctttcctagtccaagaccaacagtcttcggccgcagaagaactcaaaggaataccaataatcagctcaacatctcgtttattaaacatatcattgactagaggagtatcccaagctttagaatgaatctctaagaggaaacttaccatttgattagcaagaccgatcttaggataagtgacatatgggttcgtgggatcaagaagccaagaatgtttcaaaatgctggttgattcccctgttccaattgttctcctagcatcgagtttgacaaggctttgagcactctaaatacttcgccaaacaaagctaggattgttgcctagctccgcattaagaaaatcagtttagggatggtacttggccttatatagatggcttgcaagagaggaatgagagcataacaaatgccaaccttgtttagccaacattgcaaggttaaaatcatggaggtgacgaaagcccagactccctgaattcttgtgtgtggacatgcgatcccaagacatccatataattccttgccctttagaactcgatgttttctactataaattatccataatcttctcaatttcatgacaagtctccaaagggataagaaagacactcatcgcataagttggaagagactgaacaacagttttaagaaggatttctttaccagcacgggagagaaacctaccattccaactgttggtacaattgataactttatccttgagaaacccaagcatagcagtgtttttcttaccaattatgtttggctaacccaaataaagagagttgtaacgcccgtatttttataataataaactcaaaaattaattttaataatttatatcttaataaccatatggatcgggatcccgagtatcaaaatacaagttaaaagtactttactattatgtacatattattattttttttcaaaactaactggctaaaatgcaactccaaaatactaagagatcgaaaccctccaggttgcactgccgcgatatgtacaatcatgccgagttctgcctcactgttcctccagctttgcttttcccttacctacataaggtagcaaactgatgagtcaacagactcagtaagatatgcaagaaagatataaaagtaatgcaatgccagctctatgattaagccgccctgagctcaacaaccaagctcaccaaatggttaagaacgttcttaagggaagcacaactactataccaaatgcactaaagtaccaaaacttgtacttgtgttggtagagtcttaactgtactcccaggaattactaagtgttgtaccacgaacacg

SEQ ID NO: 387204 - DNA, 830 bp, Cannabis indica
tagacttttgatacaaagaccaaagaataaaagacatctaaggcgaagtgtagtaggaggaggagatgccttcaaagggaagagaaatgaggagaaagtatggagttaatagcgcttaggctaatgaccctcttccggaggctaaattcctcttgaatgccattttgaagctttaggagctattcttacttaataaatggatgtaatactggatcaaaattttattttaagatctttcactaggcctaattcctacattttaaggtgtataagatccaatggttattgaaagatagataaggaggataatgaaaccttgacgctagggaaacacctaaagaataccatattacatttattgtgtccaagttaaaatttggtgcagtggatgtgggataccttgaccaaaataatggagaatgatcaagtgacctgaagagatttcaaaaggattttagagattaatatttctcttcgtcacataagaagataatgattggagcatgtgacggttgagataaaaggatatgacaaggaattatgcatgaggaatgtgtgattattttgttcaacctatgtgggtgttattgatcgctctttttattggacagtttatgcatattttaggtatgtagtacttgatggaagggttgacataatgaatctactcaagggaaaaacaaaagtaaaagtctatgcttaacctatgctcttagtgttggtgatatacatggggtgcatgacaaggagttgttgacaacatagttcttatctcacactcttgagatcatgtatttgttggaaaatatatttttaccaggatctagatt

SEQ ID NO: 387205 - DNA, 568 bp, Cannabis indica
aattaatgtatgttataataataataattgatacatgtatatattagtttttgtttttgaacagatgcatgtatattagttgatatctgttaaaatagatttcaaagaaaattatttttgtaatatattaaaattgaccatataatttctttcaagaaagaaaatggaccatgtaaataattatataaaggcccttctcttgagacgtgataatgtgcttatttgactacttttatgttttcaattttatttttaaaaatgaaaatgaatgcactttgttgggaaaaaaatgaaatgaatgataaacgtgtgcctcagggttgctcataaataattaggcctgaaacccggctgacccgactgaacccgtacctaaagaacccagatggttgaaattcacattacaaaaagtctagttcgggtgtcacccaatagtttttgggtccggcttcggctacatattttgatgcaatttcgaattcatgaatacatgtacctagggtttgtttggcataacttatacttttacttttagacactaaaagaagagaagtaaaagtttaagctt

SEQ ID NO: 387206 - DNA, 647 bp, Cannabis indica
agagtatgaaccaaagtacacacagtactccagcctggtggatacttaggagaatgtgtacaaggcaacctgcaatatggttcactacaagaagcccccaagaatgcctcaagggggaaatttaaaagtgattcgagtaagaggtgtgagtgtcatggagaagtaagacacttaaccaacacatgtggctacttaaaggatgatatcaaaatgatggcaagagtaggaaacttgggataatggttctggattcccaatatctatcctggacagggggtcgctcatggacagatgatcgttccaggatagcaaggtaccataaatcctctgcgaggagtaggtcaccctcaagctcctagattacaacttcgaacgctccctgctttgccaactttagttgtagtagttgtcctagctcagagattgggaaacacataccctcctaatctagttccaccaccaatggatggacatgtggccatgatctctggaggaccacaccttccaggaagcaccataaattcccaaaaaaggtaatcgagggaattagatggtggtgacctttgttatagctaacaacagtgagttgattaataagcgataagaaatgtaataaaatagagaaaaaatcaataaacaataaagaa

SEQ ID NO: 387207 - DNA, 561 bp, Cannabis indica
ctctggtagaaaattggactatgtggccttgtggtaaggaatttaaaaattgcaaagcttatcttaggaaaacttattatttgaaaacattatcttttgaggagcaaaaaaaaagtataaggacaaaatagtatatgttgggcaatgggagaaattaataaaatattggacaacagacgatgcaaaggtattttttcttttattatttaattgactatattatttttatcatatttcatgaatttaatatttattaagtgcaattttatatattgttttagaaaataagtactacaaacaaagctggtcgtggtcaaaagaaatataaccatgcaactagcacaaaaatttttgcacaaattagagcagcgtaggtaaaccacaaaattattttagcatatagattgaatatttcttcgtgagtatgcatgctttgattaatatttagctatgtagaaaatagtgaatcgaattgtgtatatatttcatagaatagtacatatttatatacaaagctaggagactaggaaataggaaactaccaacaaaataggaaactac

SEQ ID NO: 387208 - DNA, 1382 bp, Cannabis indica
aatggatgtttctaccatgattatgaactaatacttttttgtagggttttatagtctcttgaaactggattaatgcaattttcatttgatttttttctttcattattatgatttgtgcaatttatatttaatacttgtgaatgcttgatcaatatttacatgatttaaattttttattcaaaatctgaaatgagaattgaatatgctataatttaattatttggacataaatttcgatattagactagagtatctgtatggtctgtgtagcatttaaaattttcatgcttaatgtcttctatatatttaattttatcacataaatgtagaaaatttgtatatagaatgcgatttatatgtcttaacccgaatgtaattttttttaataaatctactagcataatagaaagaaaaaaatattaaaattatattatgaaatgttagaatggatagataatgaaattagaagtagttttcatccattgaattatttgtctattttcttagctcttttaggttgtgaatttttattatgtaacttcttgtttctcttttcttgaaatcaattaattgttaactaaatagaattttaaaattaatttttggtaattagtaatcaatctccgtacgaacgatcattatttattattgtattacttgatttaactatatatacttgcgtactgaatatatcgaaccatcattaattataaatcatttaaaataaatcaattgtaacaaatcactaactgtaaaaaaattgctatcaaatattttacaaaataaaaattttgagacaaaggggtcatcacaaaatttgtgtatgaagaacatattacaacttaggaacacctttcataaagtaaagcataaacaaatacactgaattattcataaccaaatattaaagtagagaaacatttatctttattaattaaaagatacaagtaaaattataatctaattgataaatatgaatgtggagtgagtagtaccctttagtgcttcaactaccaaacttttgaaacttcaaaactactagttgaacaaactcatcatctatggagttatgaaaaaaagaagaaaggaaacaaaattaggaacaacaaagaaaagaatcgataaatttacattagttataagaaacatatgaaaaactaaattaagttggcattttattacttactaattaaaaaaccttctcttcaacaaatttgtgttgacacaaatcgtcacataaagcgcaaatcaccaatggtgcccatgcaattgaaatagttaagtctccaagtagtgttgagtaataaattaccacacactccaacaaatccaattacaaatccaacccaaattcccatatgaagccatgacatgtcaatcca

SEQ ID NO: 387209 - DNA, 502 bp, Cannabis indica
ataatgttaatttaccgcaacagtaagaccgcgaaaaacgtcgagagagaccagtcgtggtggtttgtgattgggattggaaggaagaacaaaacaatgttgttggtgagattgtgatttagagactttgaggcccaattccagatcatcggctccttcctccttcccttgaatggcctcgtacatcacccccattctcactcttctgcatatgcacacaacccgatatatcacacatatcaatcaatgtcctcatacatatatataaaatatttatataatgtataaaaataaatatatgtgaaataaataaaaacctagattgcttccaactattcttcttcttcttcctcctcctcttctatggcggtgatggtaatgactgaggattctgaatcttgatgctttcctttgatctaaactatttctcgtcttcctggtttacaaaggctctcattctatttgtgtctggtattgggtataatgatgagagagtgtctac

SEQ ID NO: 387210 - DNA, 769 bp, Cannabis indica
tcaatatattaaaaaaaaaaattgcataaactaacacttgagtctttgtcaaaaaaattaatctaaaaaagacattgtctttacaccaaaattaataaactaaaataaaaaaaaaaacagtaaaagataaattttggtatactaattttagataaaaatgattttttccattgtatttggttctagtgtaaatttactcttcagatataatattttcgtgtaccgtttagtgaaataaatggcagaaaagtagtacaaaatataataatgcggttaggtggcgcaaggaaagagttgaaccgtgcgccaattttgttaggagagagctgccgagtgggtcagaagtggggccgctgcttcattgttgcacatgttcaaagaatgaggacgtggcttcctcattggccttaaaatgatttgaacttaacaaatatgatggactttagtttgaatgagtttgcctcattgaatgaattggaggcttggagcccacatccaatttgaagattcaacccagagttatacatacatatatgtatatatggtgagtttgggatagctaagaaaaggtagaagcacgtttttttaaaaactatcatgtttgataaaattaaaaaattagttcttttaataatttaacaaaaaaatttaactttttgcaaaagttggccaataccaattttgagaaattagcttgtaccaaaagctattttgttagtttaataaatatttcacttaacaaaattaccctcattctaattataaaatt

SEQ ID NO: 387211 - DNA, 757 bp, Cannabis indica
ataatattgtacttaaaaaggtggatatagcaatagatattaatgtttaagagaattactttttctttaaaaaaagaaagtcggacatagcaataacaacgggctttgtgtgtattgtcgagattgtttttttgggataattacatgatatttttttaaaaaattatttatatttttttacatttaaagatttttttttatatttttataattttttatataaataacatcaaaatagcatgaaaactacataaaaataattaaaaaaaaatcaaaataacaacaaaaataatatacaaataataaaaaatcaaaaataaattaataagagtacaacataaaaacacattaaaagaccgtactttctataaataaaatcatacaaatcataaaattatttaaaattctatacaaccgtattttataatttttttgttatttttatgtatttgtgaaataattccttttttcttttgcaatgaaaatggaccaacctgccaagattggtccaaaatttccagccgtaggtgtgtctcgagtcccattaaccaaacacaacagaccaatttcgaagggcctattaaagtgatgtaatatctgaaaattcaatacgatccaatatttaattgaattaattagtattttttatttactttgaataagtaaattagatttaattttacacttaatatatatgtaaaatgtatatataaaaattaatatttaaattttacttcgtttcgatcatgttcagtat

SEQ ID NO: 387212 - DNA, 791 bp, Cannabis indica
aaaaggttcatgctcaagttctcaacactaatttatataattaaactaataattatgagatctgtctctcctctcctctcctcttatttatgttttcttttaaataagttaaatgaaatattttatatggattaaatatgtagatgttggtcccattgaaagagaagacaaatttttaaaaaacatgtatgtatattatgtgtgtatatacatatataaagtttgttgattcaattgtatgtatatattcaaatatgcctaccatataatagttgggatcacgtggagagagatataaatacagcaagaccaaggctttatattcttcctatatactaattgttgagtctccatcttatacaataaaatacaagaataatatatatatttttggtgggagattcttgggttctgtcactgtatttatttaatcatcaaaaattcaaaattgttctagactttgtgtcaaaaaaaaaattattcttgaattgagttactagtgtgcaatatgacaagaaataagaaaacaatcactgtattaattttgacaaaaaagttgtcaattactactttaaggtgtaactactcaagacattgaaatttagaagtttttttaatcaatcatcattattattattattattaaaaaaaaaaaaaaaacaatgatgatacgagtttatattatagtaactaaaaaagaagagaggccaatcagaagaaaaaagggacgtacaatggatggggggcttcgaaaagttagtgggaaaagtatactgttggaactttgtatg

SEQ ID NO: 387213 - DNA, 1383 bp, Cannabis indica
acgacactcggtcaaatattcaaagatccttcgccagtcaaggaaacataaaaaaaccggttataattaaagaaaacaatatataaaaaaaaatataatgtaaaaaacactttacatggaaattgtaaaatcataaaaatatgtactaccaaagaaaaatacaaaatattgtatatatataaacatatgaaattggttccaaacattgttataaaaaaataaaactaaaatataaacataacataatgtattgttccaaaaaaaacacaaaataaaactacaaaaattatacctatgctaataacaagtcacttagttaacaagactcttagttcttcctattcgacttctttccctttgagatatcttcggtagaatatccttcattaatttttttctggccatagttatacaatgttactgtcatgacatccctataatttgctatcatgtcattcatgtttggagaaatctcatgaatcttttccagaataaataaatcagcatacttaatcataaacacgccacaatcactaaaaataaaacaaaaataattaaaatatgtaaccagttatttaagtagaaaaaaaaaacaaatcactaaaaattgaagaagtgacatgataaaaaataaccaattacttaccttgagctttgagtgggaagcttgtccacaaactcataagcaattggggtgtccttcgaaacagcataagggcctgagtccaagctaatatcgttcctaccatcataaaaatttaagaaatctaggaaataaggcaataactcgcaatacgcaagaagatctggtaaaatcttcttttgatttgtctttgtattcttcattgaattgtagacaaagattttcctcctcaaaatgttgaagtgtaggaaaatccaatgttgttgcagagtaacgtgatagggaccgacaacatcatccacaccaactcaatgttgaaaacaaaaggtatattggcccaaaatacagtcggtaaccatgttgtcataccttataacactgggatcacgcttagctttaataaaatcatcataaactcccttcagtgttgcatcgaaataggtgcatgtggtcgtcactctcttattcacattggcatcgaataaaatgctcttcctaagataatagaatgccacattcaaatactgcacacaataaataaaaacaataactagttaaaaattgacaagcaaaaaactaaacaacagaaaaaatgacaaaatgaaaaataactagtttcgtaccaaataaaataacttttgcccacaagtttgtaaaatgacaaaccaagatttgtcttcaatttacgccatgttgaaatctaaaggaggctcaatagcaccagatgatttttcattttt

SEQ ID NO: 387214 - DNA, 555 bp, Cannabis indica
aaaaaaaaaaacaaattttagagatttttccaaattacttttgtttatatttataaaagatgtataccaatcatcatatacattgtgagatttcagaaagaaaaaaatcatcatgttcattgtaaacattataattttgtcgccaaaagatgcaaatgttcatgtgtaatatttagacaatttatataatactcttattcttaataagatgtctgttgttgtattattacaaagaaactatggtcattttggtttgttataatggtaatggtaatagaattgggattacaattgcaatatttggttttttaaaactaaaagtgatgtaatagaattagaaatataagaaaattttcattatattgaaaaacttattgttgtgatattttgcacacacaagtgtacgtatcgttacaagtagtaaattcactgggagtgaggtcaatcccacagggatagtagttaagtacgttgaaattaaacttttatttctatttagttaaataaaaattagaaaagaattaaaaataagaaaactagtaagaagcaattatt

SEQ ID NO: 387215 - DNA, 2730 bp, Cannabis indica
ctgggccaccctcaaacacaggttggttttacttcttgaacaactcataaatcggttccatatagtctcccacattttactgcactaccataggtgccaaaggtacccgaataggtggagggcgagcctattactctctaaggtctcaaatctattccccttactgcataattgtatcttgcatagcagcaaatacttgtttccaattatgaggttgtggaggattctcttcctcaccacctaccccgagccccaactcgcagttcaattgattcgatcgtcgtggttgcatgacctaatgcacctgtgatccacaacttctaaccgtttatattctcaaccatatatcaatgctaataagcatgtctcacatataattacaccatatttttactatattacttttctagtatgcttcataagaagtaagctgtcaattaaataataagtaaacacttaacacttactataccacgagttgacatatcttcacaacaaatatacatatctgaccagtcttgaggacttttaaaactatggatactctgatacgcgccctaactcctagggacgccatgtgtgtgctttcggaacatgtttttgtaatagtagattaacaatttaataaaatctgtgataatagtaaaaagttcactaaaataaaatcatagcaatgaacaggattacatcgctaaaaatttattttggggatctcctgttacaaaagttttacaaaagggctatctacaaaagtaagttaaaatacacattaggtgtcgcacaaaacgtctcctgaaaactcggccatccaagtcagataagttgatatgtacatttgtcagagaagactattatctcgtgactaccctagttttcctttgcccttacctacaccacaaatcccttgtgagtcacaaagactcaacaaaaaaggtaaacatagacacatatcaattagataacaaattaagaataatataattaaacagtaatgcacaattacttgtctaataagacaagtcataactgttacttcagaaagtatccatttatattgttgtccaataagataaccatgatgccctaacctggcatccacacatctctagttgtctaataaaaaatccctaataccctatcctggcacccacataccattgtcattgtctaataacacaatcaacaagtatgaaacctaacaatgattttgattgacgtcatgactttgtcttgcttaacggtaatcaccgtatctttacctcaaatataatcgagtcataaacgataatagtcatatcttgacatgctatgtggtgcagatgtactttcttactctagttccaattcaggtatgtcggtccaccaaaatggagaaagatcaacgatcccagacctaatgtcacaacaacaaaaagaatcgattaatcaacttgacctaacccgttctaggtcttaaattcatatctagaagtttccttattgatagatagtatgacaataccctaaatattaataaaatacaaaagtggggtctcgatacaagtctcaatatggacgatctattctaaagacgatcgacctattttagaaataggacggtctgaaattcccttgtctgatcttaaaaagttgatatctcactcaatcttgagccaaatcttaccaaattttgcagagaacctataaaaattataaggaacatttgttatgaagaaaccttagccaaattcccaacataaatcaagttatcaagcataagccaaattcccaacataactcaaacttgcataacttttgttataaccaaacaaaacacttgaaactaattctaatcagtcttaaacaactctaggaagcctttcctaatctccctagactccatcaacaagtcctacccaaaacgtccacttaaaactatctaaaaccttagaaaactaaaaaattaaggttagggtttaccttagattacttgggaggatggaggagctatttcttctcgctatccttggctaaaataagcttcaaaagtggaggaaagcttgctggtttgttgttttggagggttcaaaaatagagagaaagaatgaagaagaaaggtgagttttgagttttcttttcacttttgaattttcttttgttttgtatttctatcttaaatctttccaagctgacggtcaccacaaatttggtgaatcacaaccattctccactcaacaataaggtgactaatcaaaggacaaaaagattaatatgcccttacttcgcctttaagtaacctcgtaaccctaggggtaaactattctaatactgttaccccactaaaccccgatatttaaaaatcaacttatcataataattctattgaaattacactctaaaattgttttgatctttttggcctccaatccagtccccaaggttggcaaacttaaaaatatttttatttcacgaataacgtacattatatacacatattctaataaaatctccgtaattaataaattacgcttatttatcaactctaggcaaaatttcctaattgacactgaattagattagtagaatcacaatcctactcattgtaccataattactccatatttatataagggtaaatagcggcataagtacccaaagttttgagtttgtaagtggcataaacccaatgattttttttagttggcataagtacccaatgtttgtaaaactgtaatttttctctattttcgt

SEQ ID NO: 387216 - DNA, 938 bp, Cannabis indica
gtcatttggtgcaagcataacttgatcccaaactattattttttctaatagaattcatttcttcatacatggcttctaactatagcctccagtcaaaactagccatttcatgtttaatgtcaacggatcgtcatcaccagtatcaccaaaaaccatgttgatttcaccatttaggccataattaaacagggtggtttccttgaaactctcccactacgacgaggtactatgactttttgaacaataaattttgtgatagtatcctcttcaattgtatcaatttgtagaagatgagggaacatcttttggagataaatctttaaagaatttcttctaacacattttgctacgaggttggaaatacttgatataatcattttcaagaaaagtagtattagtagaaacaaacactttcttatcttcatgactatagaatagtccacctctagtctctttggactttccaacaaacatgcaaactctaattcactgttctagctctccttctttctttcttaagacacgagcaaagcacccctaaattttgtaattatataaggcaggcatacgaccattgcagataacttagatggggaaatatttagaatgtcaatcgccatttataaggcatatccccataggacactaataaagttgaatagctaagaatagacctaactatttccatagagtgcaattttgatgttctgcaacaccattttgttgtggagtggatggaatagttagctgggaaacaactccaagttcaattgaacgatctttgaactgcatatccaaatattctccacctctattacttcgcaagatctttaatgtattttccaattagttttgagccatagcatggaatttttaaacttctcaaatgtttcatattttatatgcattagataaatatgagcatatctagagtaatc

SEQ ID NO: 387217 - DNA, 1477 bp, Cannabis indica
gtactttagagattaaatttagtaaataaatttcatcaatatgatagtttttttaatttatttatatgtaattaattaaatttaaatttaaaatgcaacgtaagtgaaggtttgatcatatttataaaattaaaccaagtatatatatttagataaaatatgtaggatgccaaaataatttattaatttagataaaacatggaattactaaataattttttttaccaaactataaattgtacacatacattttaagtactatatggatcgagtcaatcaatatgtataaaccttaataatttcaaaagtaaaattaagtttattaaatttaaattttgtgtaagtaactttgtaacctttatttaggtatattatgcccccattggtttgattttggtaaccacccgacccaaccaaacccaaatagaaataatggtcgtaatcaaggccatatagttagctacaggtggggtccagccgatgttacatctatatattatggataacaatacatccttcctaataataatacacaattaacttgcaattatccaccctatataatttagagatgttcagtttgattcaaagttttaattttttaaaaaattaaattagtcttatggttttttaagaatttaaaatcaatttggtctaattaaatgcttaaactaaaccaaatcaaaccagtccactcaaaaagatttagtttaaaattataatttgtatttcctagttattctaaattcttttaataataattgctgaggtaattttatttataaataacaataaaaaattattatcataacaatattaagtcaatatcaatattatatatttaccgttgttcctaaatattaatattttgttcaaaaaaatatatattaaataattatatgtagttgttggatttgaaccactaccaaaatttctaaaaccatgaccaaactagaaaattttaaacggtccgaattgatcaaataattcacactatcaactacggattatatgaacactcataccctactgtaaattaagtaccaaaagtgtctaacactatttaaatcttgcttgtaaataattaatgatattttataataattattaaattaaattacgtaggaccgatatttacttacacaacattttaagttaccaccgattagtatctctctatcaaactaaaaaaaattattatttaaatataaatgttactaattatttatagtctaatacttttatagccatacacttttttagtgacataggtttagtaatattattttagtaagtcacttgctttatattaatttttcatatttttttttacttttaattacaaataattgtgttgtaatgtcatatatatttctaatgttacattttttaaaaaattattttgtgtgtaaaatatttaggtacaaaacatattaacgatagcataataataataataattaaagttttgttagtt

SEQ ID NO: 387218 - DNA, 707 bp, Cannabis indica
atataattaataataattcataaagaaattaataggagtctgactaaaaatgtgtacatacatgtatatattgatagcattcacgaagactagtagtactcaaagttgctacgaaatttcaattctattatctcgaaatataatattttacctttttttttctctcactactatatataatttttttcagatatttttaaatagttgtttaaagtattcttattggtttctataaccgtcacctatacgaccgttgcaaaacaaacagaataggcgacgattaaaaaccgtcgctaatgtggactatccgacggtttaaaatcgtcatttataatatagctgacagttttaaaccgtcgagtataatccccttactttttttttcgttttaatgaaaaacgtcgcctatttttttaggcactactataaaccgtcggaaatactaattttttccgatagtttctaacagttgtttaatttttttagcgacggtccctaaaaaaatcgtttttaggaccgtcacaaattctttcttttgtagtagtgtcttttttataatttttggtcactttctactaaaaaatacttcaatactaaacaactccaaaagttgactctatatgttccaacattattatttagtacaccattcatttcattaatatttttttttttaaatattactattagagagagagagagagaga

SEQ ID NO: 387219 - DNA, 693 bp, Cannabis indica
ataactagggacaaacccattgtgtagaagagggggtagaaaggattgagtgatccctttgataaaataagtcatctcttttctcattatttttagaactctatactctgtattctataagataatcatccagaaataagatggactcgtggactatgtagatttaactacaaaatcacgtaaaatatcttgtgtcatttattctatattttataatttctttaaggctttatgcaaagtcagtagtttaattcatgaaaaagatcttatttattattaacaaaattatgagttaatacttcaacttataatcaaaacaaatagtaatacaccgatgctaattgttttttttatttttttactttggttatgaacagaagcaaaaaaatgtttaagaaatctgaaccactacaccaccacaaccaccacactactacaaattgtgcgattcacatatacacagatttaaaccaccattcaaaccaaaaatatacaaatttaaaccactgcaccactaccattgcagcaccaacattggaatgccaccatcgcatcaccacccccatcgcaccaccaaaaccttgaaaaaaggcaacatcaaatgaaaaaaaaaagagatagaaagagggaaagagagagggggagaaattgagagagagagagagagatacaaaagagggagagagagagaga

SEQ ID NO: 387220 - DNA, 744 bp, Cannabis indica
tttttttttttttgaacaagggatatatattcttgtgtgttcttaaattacacatatcaatttaatttttaattacactattgatacgatattcagacaattttcactttttttaaaaaaaaaaacattcatttaaattttaatagtttgattgttttttttgttttttgagaaaaaatagtttgattaatgattttttttttatgtttaaatttattaatttaatttctcaaaaaatactgaaaatgtactaattattaattttatgaaagttgaataagagcactgaccccttggatgattaagagccattattttttgtagcaaaaactttaatttattttaacaattgcatgccattccatgtgaaagcatgcataaataaacctagtcatattaattaattaattaattcaaattaagcaaccactccaccattataacaataatagtgattttatacttgcatgttcttcattgttttatttattatatatatatatgggaaatcaaatcagtaaggtaataattccaattctatgaagagagaaataaaaattaattaattcttggagtttataactatatgtcattgactcttgtatttattaaatgataatttagagtttatatttttcaaatgagaaatattttaggaaactaatagtcaggccaagccctgggcataggtgggctaggcctgtgcctagggcccacccagcccaggggctcaaattttttttt

SEQ ID NO: 387221 - DNA, 2964 bp, Cannabis indica
aagaaaaaaaactgttgactcaaaaatttatactagacttctaagccacacttagattggtgagaataaaaaagtggttaaataattataagagagacacaataaatttataatagttcatttacctcttctttaaaagttttaaatttaaaaaactcatattagctttaggattatgagattgaactcaccgataaataagtgacttgacaatcaaattttcacactttctcttctcacccccacatgcctatagcttttagagagggctttgagatttcatcttcatcaagccttcaagcattcttcacttcaaggtatgaaaatattttttttccttgaagttgacgccgattttttatttatttatttttgttttttttcttctcctcctttgttggtcttactccaagaatttttagacttcccaaaaacttttaaaataatttcgctaaacttccaaaattccaaaacactttcctagtgccttgaaaattcctccaaagtggctttgacttctccaacccaatttgacttttctcgagttgtaagcaacttgagttgttgagcttgggatggctaggataaagagaagtagaaggttacctgaggagtatgactcccatgtggctcagttcattagagctaagctaactgtgcctaagtctaagaacttagacaaggtgcgtggtggaaaggcaatggcaactgagcttttcaaagctgccattgagagtgatgatccaagagatcgtgcctttaggctaaggcctctcgtgtctactactctcactgagcatcaagctcaaataattcaagatgattactgtcttcctgaaactactgtccggaagccacaatacggtgctcccaagggatcccagaacacttgctgtagtgcctggttgagatttcacatgaatgcaggtgcttatttacccttgcattcatggttcatatctatagttaatttcttcggtgtctacccttacaagataaatctaaatggctataggattattgccaccttcttcatattttactgcctttggaactggccatttttaactcctcatgagataaactttctttgtgacttgaaaaagagtccaacccgcaaagaagaaggtttttaccacttccttcaattcggcccatttatagaaaatattaccaagagtaactgcggcctttacaatcaagagtatttttatatcagtgttcttccatcgagacacataaccttccaaatagctggccctgtcaaaagctcgaagtagtggatgtgagataatgaatcttccttcttggtatatttatgccagaaagggttcttgaactttgaaggaatgggaagagctttgatttgttcggagagtggtgagcgtccctctctgtcaagctcaaattcagacaacttaggagcgtgatcccccttcactaaaacagccaaggtgtcgaactctgcctggttgatcccatgagtggtggtttgcgtcctaatcaaagcttctattactcgagtagggttttctctagaagttgttgcatccaccgttctcttcttggttaagaggtcatgcaggtctcttagtcttctaggttgatcttgtactccggtcgacctgggtcttgtagttgtctcctgaccacggggtcgtgaaggcaacattggtgaaacttttggaatgaactcaagatcatctcaggacgacccgctgtgagagtgttcattcaaagtgttgtagtggctacttcccttaaagtattcttcaactggatcacaagtgtgtagagaattgaattggttactcatgttcatttcttttccatgtactcgagggaagtactcatactgttggccatcgaggccacaagcaaagtaacgacacaactcactcatttaatctcagaagtgctttagagtatgtagcgattcatcggtccttattcgccggatctcgtagcctctgatttcgaagtagtgtctcctactaccttcttcagcctaagtagcaggtcctttttgccttacagggtctcgaggattagtttcatgagaacaatgagaaggacttggtggaggagtcatgtcggttctctcgttgttacgaggtcgctcaacactaggtggaaggcccattggttggcgcccatgagcttgagtcctctcagtctcttcctcgaaggtactttcctttcgagaggtctccacagttggtgtttacttagtgcttgctcggttaccagctgtggtagtggcataccgatcattaagggttttgccttgagcactagttccaacgtgactagttggttgatggggagtctctctcaccaactcggaaagacccttgcagggagtagttctgcgattagagcgataagcttctctaatccgttgagataggttagccctctgctgctcctgcttaatatgttggttttcaatgttcttccaattttctacgaactagtgttgaaacttttcatgttgattattaagagagtcttgcagctgttgttgtaagtcaaccacagtttggctgagctgggcgacccgaggatcagcctcctgagggtcatcaatctccacgcaaggctccctaggtgggacctggtagttggtgctactcctaggagaagttggtggtggccttggagggagagttaaggagtcagttctgagggctgcttctggcccctggggcacatgggtagtcctagttccagctccatcatctggcatgcccctagttgtttggccaactgttgtagtctgtctgtcaacacttgtagaatatgttgtaaccatcttgttagtaattttcttgagctgtggctcttaatgaaagtaccacaatgttgattcaaaaatctagattagacttctaagctacacccgctcgctagattagcaaggatgaaaaagtagttaagtataattataagagagacacaaca

SEQ ID NO: 387222 - DNA, 1701 bp, Cannabis indica
cctcgcccgagcagttggaggcaaataatgataccttgtctagggaggtcaatgagcttaaagacaagagggagaatctccacactcttctctcaaagttggagagggacgtctagactaagcagactagagaggaagagcttgagaaggaggtggaaagcctggaaacggccgccattaaggtcttctatgaattttggaaggctaaccccacataaagttttgattaccttggtgattgcaaatggatgtatcttgattactttgcgggtcaaacatcctaagaaaacctcgaggcaaccacttctactgttccaaccgactagagcaacaaaactcgtgctactcagagtgttgaacctccggcccccacaaaccaaattgatcagtacaaagagcccaggacccctgccatctaaacatttttcttctcttttttatatttatcagttcggcctacaggccttttttagggacaaaaatgaccggccaaacggtttttaaacttgggttatatttttcattttaagacaattgacggaccgggaagcttttaacctcgggtataccgtgctttattatctttttcaatgattattgtcccttgttttggtaattatctgtgcaactgtgtttgattttagcttgttatttacttttaccaatgctttgtatgggtatagttgcccccaagtgaccgagcacactattgactcttggtcacttgtatttcacaattataatttttgtttgttcggttctttggattcgagaagacttttctacgcatttagtggtaaatttataacttgctaatagaattgacacaatcataatttataacttacataaaagccattatacgatctagtccgatctttagctaaatttaaacaaagaaaattgcacttaaaaggaaattgtactttcaaaggtggtcatccgacctgagtacttagtcatttcatctgaaccctttggcgggatccgcccagaaggtcatttacttaagagtaaatgttctttggttttgtacttaaagtggtcatccgacctggtacgtttactgatagtactttcttaaacgttccccattccaataccttggcactagaacgagttccatattttcgtcataccgcccaagtttgtatgatcctcattttagaacttcgaccacctaatatggtccttctcagtttggtccaagcacaccattcgtgctgtcttttgtattcagaaatagtctcttgaggaccatatcacccacaaaaaatatatgtgcctttaattgcttgttgaagtatcgagccactttttattgatgggctaccaactttaggtttgatgaagcttgcttttcttcaattttgtcaagtgattctgctaggagggcatgattagcctcttgatcataggtcaatcttctgtgggacggaggttctagttttacgggaaacatagcttcatagccataggccatagcaaatggaatttttccagttgctattttttcagttgtgcggtgtgactatagtacttctggtagttcctctgaccagttctcggtagcttcttcaagtccttttttcaaagtatctttaagtgtcttactaagtgctttgacttgaccatttgctagagggtgtgccactacggagaaactttttacaattccatggttcatgcaaaaatcagtga

SEQ ID NO: 387223 - DNA, 1416 bp, Cannabis indica
taaggacatttactgacatagtccaatgatttggggccatttgttataatttcccataaatacataaggaagccaaatataaatttgggctttttcttgaaaaatttatgtagactaaaaatttggaaaatttacaaaaatatatcaacacagaattttttttcttttttactctttaaatttttatttacgaaaaatacctctttaaatttaccctaattttttccaacagacgtggcaccttcacgtggccgaaactagcagacacgtggcaaaaaccattacaataagaaaggtacattctgcgcagcttcaaagtcaagagcaaagatagagatgcacaagtattgacaagaccccggtaggataactagcatgttggagagcttacagcctgtagaaagccagacaacttatagcctatagaagaccggacaacttacaacctccaaaaggtcgggtagcttacaccctatagaatgtagggcaccttaaagcctgttgaaggccaaacatcttacaacatgtagaaggtcgggcaacttacatccggcaaaaggttggacaacttacagcctgtagaaggttcgccgcttaaagcctgcagaaggcctggtagctatagcctgtagaaggtcgggcaacttacagcccgtagaaggacagttaacttacatcctgcattaagatgcctaaatgggatgtggttctttgtataggccttctagaagatgtccaacaactcctacaaacttgggacaacttaactgttcaagatttaaagaattttgtagcaccctaactaatttaaattaataaacaatttccataattaaaccctaaatatctgctaatttctaaattaaagctaagcggtcttcataattatccccccttaaaaggatttcgtcctcgaaatctaacctgaacaactttggatattgagatctcatatcagattctaactcccatgtggcttcctccaccttgctgtttcaccagagtagcttgaccaaagctatggtcttgttccgaagaaccttatcctttctgtcaaggatctgaactggctgttcttcatatgacaagtcttgttgaagctcttgacctacataactcagtacatgagtaggggctgaaatgtacttccttaacatagaggcatggaatacgttgtgaactactgaaagagttggaggcaaagctaatcgatatgccacttgtccaaccttctggagaatcttgaaggtcttataaatataggacataacttgcctcttttcccaaaatgcttgatccccttcattggagacactcgtaagaacagaatcaacacatgatcccctactttaaactctacatttctatacttcgaatctacataactcttttacctgctctgagaggcaagcattc

SEQ ID NO: 387224 - DNA, 1893 bp, Cannabis indica
caaaacaacataatctctattacttattagttattaataaaagaaatgacaaagtaacaaattataaatgtaattagtagaaatagagctatttttataatgtaatttagaagggaaaaaattaatataacgtttttaaatatataaaaaaaacatgtgtttggtaccatagatagatcagtgtggagaatttctgagtgagtgtcgagtgtctctgaaatactattaatataatatatatttcatatatatatatatacacattaatgtgtaatgtcttttagcttaaagcatatcaaagatacacttaattataattattttttgatagtaactgttttgtccaatattgatctttctatcgtcattgcaatatatgtacacatatatatatataaagaaaatggaaattaaaactaattattggacgttaattaactaaccaattaatttaattatttattaattaattcctaatatagtaattattagttaattaatcacagggagcatggtaccgtaagaagtggcggttaaaaagagctagctatatataattaaattaattagttcaaatattgctttcgaaactaaattaattatggctataaagccaccctatataacactagctactttctttgaaccttaaaccctaattatttatttatttatttattataaatattatccaaattaaagcaaaaatcatttgcatggatcgacccgcaacatccacgtataaaaagccaaataaattattattaatttatatataaatatacatatatatatttatactaatttgttgcttttgatccatatcatcaacactatacatgtacacatatgtatttgtatcatatataaatatcgatacaaaacaattatgtacaatatcgtgtggtcttaaaatatttttgccctaatataataaaaaatttcacatgtgctctaatattaattttctttataaagaataataatatgtatatatataattgaagttaaggaattttacttctaaattttcacatatattaaattgtgtgttgaaatttttcaggttgttagaaaattttcgaactattgagattgttgaataaaatacttccgtaaaattttactaataatatctgatgtaaatggaggtttcgaaaccacaatttagtatttattaaattttagaggcacaatataatctataatacatatcaaagttcagaagtagaatttgttataaagataattgcaagcaatggtggagccaactacttaagttaagggcactgatttattttttatatatattttttttgaaaatgagatattaaataaaaaaaaatattaattttgtgggataaaatattataggaataaaagtaaaatatgtaaggatataaatgaaaaaaaataaaatacatttataaacaaaaaaaatgtgtgaaaataaaaagtataaattttataaggataaaatactaaaacttcaatttatagaagcaaattaaaaaatatttaaagctttaaatagaactttgttcctgagtacaacattaataaaattgaataaaaatctttaaatttagtaattagactgtagtcttaagtatataatcgaatgtttaaggttcaactagcacagggcctcaaaataaaattttcccatttaaaattagatagtttttttactaattttaaatcatagtagttcttagggatggcaattatggcaggggcaggagaatagatacccgccccgaactcgccctgatatgatatatgtatatacatttaaattttaaaatcataactactacaattaaaacatactttaagctttttattgattatacttttttttactatgcacactattccacttaaatttat

SEQ ID NO: 387225 - DNA, 2114 bp, Cannabis indica
atatctattttcattgtcatttacctagtttaagctgtaaaaagtaaaagaatttagtaaaaaaaatagaatatttatgaaatacaaattatagtttccaactaaatgaatttcttaagtagatttatttgatttgttttgaacatttaatttgtctaaattagttttgaattttcaaaaaccactatcattagtttaattaaaaaaaaaaataaaaaaatccaaagcaaaccaatccatcaacacttaatcttgaaaacccgtcttaagaaaaaactccttaattataaacgataaattgaaatgctattaatatgtttatcttttcttgattttgtatagatataaaattgattgttttaaactgttaaaaaaaattgattgttttaactaattaatattattacctttattatgtattctaaaattagaaaggtgattgaatttcaaggaagaaaattaatggatatttttattttattattaaaaataaaataattaatttggaatattggttcattaattcaaatatgcatgtgtaagttactataaagttagtttaattagggataataagaaaaagactacggactacggaggtttgtttaattagggttttttttttggttaataaaggttttaattagggtttagtttggtagtatattaatatatatatatatctttttaaataatagactattaattaattcaagagagatttattaaaataaaaaatgaggaaaataatcttttccttaggaaaagaaaaagataggatatcaacaactatataaatcattaaaaactatataaataaatcaattaaaaaaaaagataatgaaagttgatatttccataaaaaaaaactaatatatattacgcgaatgtaatacagtcagtaaatatgatctaacaaacaaaaaaaaccaacagtcatcattcaaattttctcgcctattttctttccaaaatcgaaattcagatcacaatggacatggctggagtaaagcggggtttgagatcgatgtcgaaatcaatgttgatgatgatatttaatctcgtattagctttcgtgtttgtttcggcagaaagaggaacgacaatggaggttatttcaaggtctaataataacaataataacattggaactgaaaactctgaatccaactttttatttagaaccgtgaatttattatggcagtcaaacaaatcatcatcatctggatatcaccatatgtggcccgacatggaatttgggtggcgaattgttatgggctctgtaattggattttgcggtgccgctttcggaagcgtaggcggagttggcggtggtgggattttcgttcctatgcttagccttataattggctttgatgccaaatctgcaacagctatatcaaaatgcatgatcatgggttcatctgtctcaacagtttactataaccttaagttaaggcatccaacaattgatatgcctattattgattatgatttggcattgctcatacaacccatgctcatgttaggaattagtattggtgttgctttcaatgtgatctttgctgattggatggtcactgttttgcttatcattctcttcacaggaacatctacaaaggcatttttcaagggtgttgaaacatggaaaaaggaaaccataaagaagagagaagctgctaattataacaatggtggtgatgatgcagagtacacagctctagctattggaccaaataatgatgataaagtagaagaggtcagagttgttgagaatgtgtattggaaggaatttggacttttagtttttgtttgggtatcattccttggattacaaattggcaagaaatatacatctacttgttcgatgggatattgggtcatcaacttaatgcagatcccaatttctgttggggtatcaatgtatgaggcagttggtttatacaaaggacggagaattattgcatcaaagggtgatgagggaacaaattggcgtgttcatcaactggttctctattgtgcttgtggagtacttgcaggagtagttggtggtttgcttgggcttggtggagggtttattatgggtcctatgtttttggagatgggaattcccc

SEQ ID NO: 387226 - DNA, 1094 bp, Cannabis indica
ccctcaaactaagtgtggatgcaaaaaccacactgagtttgtgtcttagaataggaaatcttgagcttgaaatggccttggtgagacagtcagctaactaatcttgagcagggacatgttgaacctgaagctgaccctgaagcactttgtctcagacatagtatagatctatctcaatatgttttgttcttgcatgtaagatgggattggcagccaccataaccgtgctgaggttgtcacaccaaatggtagggacagatttagagagaatgcctaactctgacaaaagagattgaagccaagtaacttctgttaccacagcagctagactccgaaactcatcctcagttgaagaccttgagatagtttgttgcttctttgacttccaggcaacaatattggatccaagaagaacacaatagccactagtagaccttcgatcatcaggatcggaggcccaatcagcatcacaaaaggcttgaatgtcaaaatgagagcacttggttaagtgaatgccatagttaagagagcctgccaagtatcgagggattcttttaacagcaatccaatgagattcaagaggtgattgcatgaacttagatactttgctgactgagtaggcaatatcaggtcgagttattgtggcatattgtagaaaacctacatacagacctgtacagagaagcatcaaggacattatcactgccaaattgagagagtttgaggccatttgtcatcggggtagagcttgatttggcagcctgcatttttgttctgcataagaggtcttgtagatacttcttttgaaagagatgaatgcccaaatcagtgtgagtgacttggatgcccaaaaagtagttaagttcccccaaatcgtttaaggcaaactcagcattcagatctgaaattatttttgtgacttgaacatcactgttgccaagtattaggatgtcatctacatagaccaagatgtaggtgatatgagttgtacaagatcgaatgaaaagtgaagtatctgtttttgatgactagaaaccaaactgagtgagtactgttgacagcttggcaaaccaagctcttggagcttgcttgag

SEQ ID NO: 387227 - DNA, 1307 bp, Cannabis indica
tctttttttcaaactttaaaaataacttctgattacgtggttacttggatgaagcataaaaaaaaatactgttatgatatattcttcaatgtaaacatatgggaaacatatatatttttttcactattcccaaaaaaaaatatttggttactactattgggcccatcttccctgtccttaggtccatgtatgacatcaaactagcattgggcccctactgggctcttcgggccatcatccatatctttagatccaagtttcagtcggactagcattgggctccatcagactagaggaaaaaaaatcacaaaaaaaaaaaaaatacattatctaccgatagaactatttcaacacacaaaacaacaacaaaaaatagcaacaaccctatataaagaatcaaaataatattctaaattaaatataacaattaacaacaaaaaaaataataaggaaatcacttatccactgtccccgtcgtgcccgtgctacgacaaataaaaaaaaaaaatcctaccaccaatgcaccttaaatgtgagcttggagtagctaagagtaactaatatctttattttttgcaaaaatttaaagtgatttgatggggggaatgatagattattgggtttgtgaagttagagaagagagaaaaagaaagaaaagattaggaatagatttaagtgtaggaagtgtaatttgggaagaggaacaaagtatacctattctaatattatggcttaactttggttaagttttcatttttcacctaatttattcgtttactcaaattttcctatcatatttgcctatttttctaataacaggcttttatttcaattgcacatattatttaataatttactataatattaattaattactaatttttcatgtctaatacattatcacaattacaacaactactgctgctgatggtgcatcatgattaatactttcatggaattgttagatgattgtctatttgatttgttttgtattattgtacaaccttttttatttggactatggatggattgttctattatatatatttggagaatttttaaaaatactttttttatgttttatttacaattttacgcctaaaatttttaattacaaaaatacactttgtttagaaataactaaaaaaataacatgaaataaacctcacaacaactataaatcaactgtaaaacaactaaaaaatagtttataattttcaccaaagaggtatttttgtaaataaaaaagttcaaagagtaaaaataaaaaaaaaaattccatgttaatgtatatttgtaattttttt

SEQ ID NO: 387228 - DNA, 615 bp, Cannabis indica
tttgaaccttttttgcaggcacatggaattcagtttattcatccatgtccacatacacatgagcaaaacggtagggccgaacggaagcatcgtcacataactgaaacaagattaacattacttgcacaagctggactagatttatctttttggtggcatgcctttcaatgcggggtctacaccataaacaaattgcctttcgtgttattatagatttatttttatttagggtataatatttcattttgtagcatttaagtttaaatgtttgatatatgttgcaaataattattgagaaatttacataacttactatttttaataaattttttagactttaacatttaaatatttttatatatatatttgtacagtcttttataagaataataagaaagctatattaaaataatataaaaactacatctaaataacatcaaaataatatataaattaaaaaaaaacacacaatattaagagtataatataaaaataacatgaaaatatcaaaaaatcgtattttttgtaaataaaatcgtaaaaatcgtaaaaatatttaaaattccatacaactgtatttttgtatttttttttttattatttttgtgtatattt

SEQ ID NO: 387229 - DNA, 737 bp, Cannabis indica
tataatcaataactatcattcaaaaatgataatagcaaccctgtgtacatatatatttttttactatgcattccctactatgcgtattattttagcaatatatgtttttatatataaataaaaaaaaaaaaaaatagtagttatatataggtttaagtggggaccatataatttctaattatagggttgatcaattacaaattattgtgttaaaaattgtgtataatttaagggtgtgtttagtaaatttttttctttttaaaaatttttgtaaaccacaaatatgaaaagacaatcttttatttttatttatttaaatgagaatattaaaaataaagtgaaagaaaatgtggtgaaagaatataaaatgagagaaagtgaggtggaagaaaataatgagtgaaaaataaagtatagagtaatttgtggtataaatatcatactttaaattgttacgtgtcaattcttaattagttcaggtcattaaatttttaatttttatttaatatatcaataaaaaaataacacgtgaataatgacttgacatttaaccgttagtacctacgaaaattctaaaaatataacttaatttttattatcgtaaaaattaaaggaattatttcacaaaaacagaaaaaaaattacaaaaatacagtttcacagaattttaaatatttttacgatttttttatttaattttacttacagaaaatacggtacttttatgttgtactctt

SEQ ID NO: 387230 - DNA, 1438 bp, Cannabis indica
atttacaaataatcctaaataattactctgtacataatcattgttattcgtgtttctagatgaatgtcacgtgtaattcagcttagttgcttaaagcccaatcacaggcccaaccaagataatggattagatccattatcaaagtcaagccttctaaatactgaacacatgattcgttcaaataagatacacctccgacacaacgtatctccggatggaatcgaacatatcttctgaatgagtgattaatgaacatccaaatatctagttccgtattgcattcattaattgacaaatctcacaatattaggaatttatttttagaatcatgtctagaatttgtatcttcagaataagaaaataaagtaattgacaatcaaacatttacgtatctttattatttacaaaagtaggacacaatttaacaactatcaacatgatgtggcctccacctcaaaataagatcaaagtctcacttgggcctcatcaaatcaactcaaatgtcagtatattatatgtatttactctatcaagataaggtgtacatataagaaccatagcactataaatataagaaaactcattcatgcaaagggttagaatctcattccttgagtgctcaggtaaattctatggttcaaacacttgtgtataagtcattagcttttttagtcttaacataataatattgactcgtggactagaggtcattaattcttgaaccacgtaaaaaatttggtcatattttatcagtttttaaaaatcttggtaaacaattatgaaataaaaataaattaaaaatttcttctgaatacgaaaccaaataataggtataccgtaacattcttagagcactcacaacaacttctttaaaatagagaaattttaaaaaaatattaaagaaccatactaaaaacacgctacaacagatgctttaaactcattcttcattttaaagtttttttaaaatacattattcatgctctatatttatagaataatatttattgctctaaacatattttactaattgttttagattttaataattatttttgtatggggatatgtgaatatattaatattatatatttaaaatgaataaaatacaataaaattttaaaaagtagaattttagtgatgtattttaaagaagttgatgtgtgttgtaatgtaaaagtatattgtaaaataaagaaaggagaattttggtagtatatttttaaaaatagaataaagaaccaacaatgctctttgagagtttacactacacaattttctaataataaccattgaaaaaaaaatgtatacttggtataaaaaaggagaaagaaaaaattatcataaacttaggatcgtttggtaatactattattttctacatttttaattacaaaattaaagtaaaatttttgttttcaaaatttttgtttttaaa

SEQ ID NO: 387231 - DNA, 2244 bp, Cannabis indica
accattctctctctcttaagtttttttttcctcttatgtttcaatttttaagaagggatattggcggctaaaccacctgaactttacggtttgtaacagttaatcacaaaaactgaaattttggcagcataactatctaaacccgagttccgttttgctctgtacaccaccatccaaaaagcacagtcggtggactgtccacgtgtacacacgacaaatttttagtggtccacgtaatattagttttaaaaaataattataaatatttttaaaaaatttaaatcacaaatagtaaaagcttcctactccattctccctcgcaagacaagcttttatagaataaaagtataaaatctcaaggggagttggacactcccactttcaaatgtggtaaaacgacttcaaacaggcaaggatcctgtaagaatttggggcaagctggaaaggtgcaattctgagatagttgtaaaattctttaaaataatcccttagggggagtacggctcctgccctaatatgttccacgctctaagctcttatttatgaggactcgctggtgctgcaaccctcatctctaaggacacgttctggggggaaacaactaaactcccccaggagcgactgaacggatgcaacatcccttcttgtttctaattcaacaagatcttaaaacatcccctacatagggagcaatcgaccttatcctagattcaattagttcaacttcgaacgtaacagaaggattctgaggcatcttggatttgtgagctttatgagccattagttcaaattctaagtcacctgatgaaaaagcaacagtgactggtggtaaaaaatattggccttgctaagggaatatcaactaaattagacgattcaagccatggattaaaaaatatagcttaaaattaaggacagtttgattacgaggactctaggagtgaaaattctaggttaaattgggacatgatcataaagaataatgcccaacttcttggaaaacagagcacaaataaaatcgaggacctgtgaatcacataactttaaaatctctacccctagattactcaaacattcatataaaactcactaaaataacaaacaatgcaaaataaagcacatataaagaaatcaagatgaaaaatataaaagatgtcaatgaaaagggaaatcacttactagtttgatgggatgacctaggtctcgaagagatttttgacaaaaagtcctagtttgagagaactgaacctttctgattctaggattgaagagtataatcatatgaaattcgaaagaagtaggtaaaagacaaatatggcatgcaatttcagataggaaggtggcaaagatttttttgagttctaaggatttcgtgggtgaagatgacaaaagagaaggaattttaaaatttatacccaaaaggtagtaaccgtttgaccacaataaagatagatcgaatgagtgggaactaatggaaagagaaaggtcagaacattaaatgttaaaatgatttgcctccaatttttgaattgtaaaaataaaagcatgcaatttttaaatgagaaaagtacgatcgtacccttaaggcaattaaaaaatcctttatattttaaaaagtattttttaggggaaaattattatacccatatttcaagcagcaatatgatgttaacatgtgtagtatagttggaatatgaaccaacccgaattacacaataataaatacattcagacaactcacctcaggaagtacaaatggtaaaaatatttgaattcaccttccaaaaagcaatggcgagacatgaataataactacaaattgaggagaccggcgagacaaacaaagaaagtccatcttgggatacataaaattgttggaattttatgtcctaaataaaatctatttcaatataatctgatttattattaatagaagattagaagtcatttatgtttacatgtaggtttcatgtttatagtttaatatacaatttctgttaaatcgagaatatatagttattcacaattacagtgatgtcaacacagtggaaagtaattgtgattatatgctttaaaagatatactgtcccatgattcattagtgcattggatttacactgatgtgatagtcagcgataaagcttacttacaccttagataagtgttatgttctttctaggtcattggcaaagtatgctagtatcggatgtatggaatatatattggactgagaccgatattgat

SEQ ID NO: 387232 - DNA, 1478 bp, Cannabis indica
tggttagatgtgtgttaggagttttgttggtcttagttagttcaatgtagctagtttatccatttcttttattttctagttacaacttgttattgtattgaacatgtatcaatctctttttatcaatacaatcttttcatactctttcaataatctgttttctcttttcttcgcttctcttcttctttcttgttttcgtgttcatcaatggcaagaaactctaacaatctccacactagaaatactctatatatataaaccattgttgagaatacttgagatctttgcaagatagacccttttcctgaacttataaagtctgttgcatttgatccacttcaaaaggaaaaataaaaaaaaaaaaacaaaatatgaaactacaactaaataataagataagattgagaggtcagtttgagttaagttcaataataaaccacaaataataataacaataataaaataattgtgtcgaaatgaaacttttaaattttttgtaagggtcaaaatgaaacttttaaattattaatgaattgtaaaaatacaaaaataaatcatatatttttacttcttctcaaatatatatatgtaattgcataataaactaattattttccaatgtcaacctacaccaaagacatatttactagtactatagctaacacaagaaatcatcccaagttccaaatttcaatttctaactgaaatatccaacaaacacaatcatatcaaaataagcttatggtgtgataattatatataaaattaaggtgcaaacacatcaagttggggaataataataaatgggtggttagttggttaccacaagtaaccattttaagataaaagttggtagtagaatccaagtttattttatgatatgcttagcattagccactaaattgtgtgacagtaacaccaattttaattttacgaaaaatagaaaagtggagattattttgccacgtgagttgacagtggcaaaacgtgttgaatatttggggaccattaaagaattttgttttctgaaaaatccaattaatttcttgttgggcccaatctagtgtggaccactgaagctccagtccttttaaagcgcgtgaacactgtgtttctttttgatttatttatatttagatgctaaatggaatggaacaacaaatttcttgggcaattttttccaaaaataaatagtaaattaccaaaatgtccaaattaagtatgccgatactcgatagcatgggcagttgtgagaatacaaatatgggtatggtttggtattttgttgaagaagccaaagaggtggtgacacattacctttcgcgttgggtccacaatatttataaacggagagttatatttgcaccaatgcactctataaaataataagggtaaataccattttggaccatctgttttacaaaagttattaattggaccctatattttgttaaatgacaaaatagatcctgtatttt

SEQ ID NO: 387233 - DNA, 795 bp, Cannabis indica
ttcctgtaacggggaaaataccctagggagaagatcgccataaatagaaaggcaagttacaatgaaggaaaaggtgctcgatagattcttcatcaacaccactaattgggcacttactgtccattatatgaaatcgtttaagtaaagccgcccaaatcgaaagggcatttgagaggatgctccaccatatattttaaatacgataaaaaaaataaataaatttggtgcaaggtaacgtgcagcaaagaagaaaaaaaaagacttaatgtaactaacgtgacaacttaagacaataaaaaaattaaaaaagttaattgtactgattaacagtataaaagaataaattgttaattttagtatggagtgtaaattgcctttatataatataggtgtaatatttgtgtgtaagcttccacatgtttgtgaaaaatataactaaaattagaatatcaattaataataaaattgggatagaaagttagacttgttttttttaaaaaatagaaggttagacgattatttattataaaagtgtataaattatagtagctcctagtggactaagatttaaagtaagagagacgttatttttttttttatgaaacaggtggtaatagaatttttttttaaaaaaatactcttggtagaatttaaactattaacatttatgttgtatacaatctaacttaattgttacatcaaaaataatattatttctataaatatatcttttattataaatatatatcgtaactaattaaaatgaatttattacatgaaaaatacaaattgaca

SEQ ID NO: 387234 - DNA, 469 bp, Cannabis indica
aattcaacctaacccagaaatctgtgaatctagtaagcctaaaaattttccttgaccctaaaattatcgagaaacacaaaacaaaaattacctaaaataaccaaacacatcaaataaatgaagcaataaattacgaagacaagactacaaaatcaaaaaagaaaaaatggtggaaacaagagaatgagtcacttactgttttgatgaagatttctgggtagtgaaaaactttacgattggggtttcaacgactgaaacgatgaattctgatattctttgagattggagaggtaatcaaatgaaatacgtaagaaataagttaaagacagtgagggcatgcaagtttaaaggaaagtgatcgcaagttgtaggggaaatttggaggtctgaaattcaaaagtggtgaaatagactgatatttttaatatttataccctattgagcaacaccgtgttggaaattattttac

SEQ ID NO: 387235 - DNA, 1419 bp, Cannabis indica
tgctttacaaaaataaataaataaataagtaaattatttagtttaatttttttttaaaaaaaaaagagagtaactatgcctaataaaaataaatttgataaaaaaatataggttgtaagggcaactctaatgtaaaaattttaatttagtgttaaattaataccaaaaaaatactatttcaacactattttttttctaattctaactataacattaaaaattacactaaaaaatatattctttactattatattatttgattaataaattatattattatttgttttttaaaaatgattatttaattattaaaaagtacaaataaaaatgcagtggtctagtgcccactattattagtaggatactgtagactccactaaaataaggatacttttagagttgggttgaaggtttttaatgaaaaaactacatcatatttgagtttttaaagtgccattgaagatggcctaacaactttagtgtttaagtgtatcttttgcgtaaattttttaataatttgaaatttaattgtttaccaaacatttttattgcacaatttttttttttttcagtaatcaacttttagagcattctcaactggagttttataatagataaaatgtaaattttttaaagaataatgttaaatattagctccatcaaatgagaggtaaactcatttttattttagctcacaagattttgagctatttctctctccacatttagttagataaatatagtttttaattttttttaatattattttaacttttctaatcacatctttcacacacgttattcatatagataatattttatttataaatattattatttaaatgaaatagagaagaaaaataaaaattttgttgtataatgtaatggaaaaatttgatgtaaaataaaaaaaataaatttttaataatgtattttaaatgatagagtaaagaagctgttgttgtgaatagtcttagaatccaaacgatagtatatttgaatttaatgttatatgtattaattattaggattattaatacataagaaattaatcatctgtattgatttatattgtaattacagtagaacctctatttaagaatattctatttaagaataacttctaatttgttataaaaaaaatgaagtcacaatttgggccagttataaataagaataacctctatattgtaattggttatacattttttaagtcccgtattaataaaatatacctctatataagaataattacatcttaaaaaaatatatacatatattttataaatttatttatgtagaattaataattttatttcaaattatagtacatgtataaatattatatgtactcgaaaataattttaatacaatatagtattaagaattgtttatcggtatttttgttacattgatatt

SEQ ID NO: 387236 - DNA, 577 bp, Cannabis indica
tgacatacactctcccaagctatgagtccaggccccgttgttgtatgatgacccctccaaaggtaggctcgacatatttgctcaatgtcctttatgatcttcttaggtagaatcataatttgactccaatacgaatgtatagccatcaaaactgagtttaccaacaccgctctacctgctaaggacagattccttgaacaccaaattttaattattgctgtcattttttcagccaacacagcacattctttaccagaaattcgtttggcacatatagggatacctaagtattgaaatggtacctctttttttgaaaagcctgatctgtctataactctttgcacctcgttttcttccatgccacaacagtagaaagccgacttatctgggtgcaagagaatagtttcaaaccttgaagcataagatgaatactttggaagtctccatggcagaatagaattacatcatcggcaaacattaagtgattcatcttaagctctttgcatcgatcatgatactgaaattctggtttgcttccaattctactcattatccttgacaagtactccattcctag

SEQ ID NO: 387237 - DNA, 1002 bp, Cannabis indica
atcagctcgctcaaagaactcctccatgttctccgttgaggtcctcctaatatcttttcagaagttactcactcaaccgtaggatgcctctaattatggtcgtgtatcggccttcttttatcagtcgtgtgaccttggtggccttagctatgaaccgttgaatgtagtccttcaagggttcaccttgtctttgctttatttcgacaagatcctccaatcaggcaggtattttccttaaagcagagaactgaatatagaattctctggagagctcttcccaagaattaaatcttcatgggggcagcttgaaatactatagttgggctatttgaactagagtcatcagaaagatttggcatcgcacatctccagacatttgtaggagatccatttagatctcaaagtacttcaggtgtactagagggtcttctcttcccgtgtatatcttccaagccggcatcttgaatttgggcaagggcaaggcattgatgtatgccgagaatatggtgatccccttgcactatctggcttaagttctgagggtttcggactagctagacccttgagcatgtcacatatttggtccaattgttcttgcacagaaggatctattactgcaagggcctggttgattggcattctttgattaagttgtagcctcagattggacaaagcctagtcgaccataccttgggagagggtatactcaaggccagtcggccctgagtctggtgctcctacatggtcgggcagccccaagctgggtagggtctgaccgcccatttttctctgcctgactagtggattttgtgcgtcgacatggagtagatcacactgattgctggagtttggtgcatccaactgtctgaagtgattaacttcacttttcaaatggttgttttgggtgtttccacccactcccagtcctcgtcggttgaaaattgatcttcggttgtgtaacgcccttacttacgtaaaataagatgccataaataaactggc

SEQ ID NO: 387238 - DNA, 1609 bp, Cannabis indica
tatgtttttgtgaaataatccttataaaatatatagacacagtttaattaattaagactaagttgcatctagaatattgctttataacatattataactactaatactattacgataacgatactaaagctgatctggtgacgagattgtgttgatgagctttaaagaaacaaaaaaaaaaaaagtgaattttatgcaatcgagcacatttttggctaatgagggacaatttggaacaattttactgtaatgaaaagcaactgtaattgtgctgtgagaaaaaataattgtagcagacttgtgaaaaaaaattcagctgagtgtttggtaaattataaattttaaaatcccgtgagttgttaagatactattataataatgataatgttataatctatagtttattataattattgttatacccaaaatttagctggtacttgagaagatgacacatgtcaaccttgaagaatacgaaacaacaaatataatgacaattatattaaagaatattaaatggaataactcattaaatgcggagttaatagagcatatctataactcgttgactttatagtcttaagcgagataaatatgtacaaactattgattcacgtattgacaagaaactatttcgcgttagagaacataattgtaaggatggcatcgataatacatagcaaggcatcaatctcgctatgtgtaaaaaggtgttgacaagacgagtaggctgttagaacacttagcgtataatatacattatactaactaagtgttacagcttaaaggacatggataacgaatagcgagacatccatcttgccatgggaaggcatactcctagtaccttcactaatcagctccagacatctttcaatgggctccactactccgtcacatcagctctctcataaggaagctgacattcaaatgatgttgactactgaagctcaccttgtcaccaagaactgcgattgtcagatggagtgttatgtcttcacatgcagaaacgacaggatttacattattaatctcggaaagatatgggaaaagctccagctcgctgccagggttattgttgctattgagtgttcaagcacctagcgaggcgccccagcgagatacattttgtagcatgtattaatccacgtcagcgttgactcattaaaagcagtttaaatcacagctgtaagatattcaaataataactgcatttatttacgtggagcgtaatgaaggcccataattttagggaaatattattgtgagattcgtatctgaatgtaattaactgccaccccatgtcattataaataggggcagaatgtacaaaaaagggacgaaaaatcctagggagaaaagaaccctagtttgtattagaaaaatctgaataagattaactcgtggactatgcagagttaactgcaaaaccgcgtaaaaacttggtgttatttttgctttattattctttcttagatttctactaaattctgggctaatcctatcacgaaaataggcttattatcgttaaaaaaatctacgttaacagtttggtgctttcattgagagcctacgtgaaaaaagctcagaaaaaatccctcctaaccaa

SEQ ID NO: 387239 - DNA, 2801 bp, Cannabis indica
tgtttaacatcctaaatatgagcagtcatggttggtcgtgtcccttcacctaaagtagagcaacagcaaaaatgagtcaggagcagtaaaatataaaaagttacatttacaaattaatagagtataactttaaagttggaagctttatatacaaagaccctcttcctcctccactaattatactatactaaaaagaatacagattaaattaaaatattctgacaaatcataccccacttatcccaaacccaatcttataaatgagtttaaaaggactttataataaaaatggcatgtagtatctaatactagaaaaaacatgaaaagagaaatgatccacaactcattatgtaatgatgctaaattaagtaaataatcttagaaaagacaaaaaccaacaagttctaaatgaagacagtatagtttgaatcaatgacattaaacatacaaaaataataaaaggtcgggcataaatataactttgtcatgaagctcagcttgagcaaaataaaattagataatcatcaacaccaccaacaacaatttaattgaacacaatgcaaaactttaattttcaaaatcttcgaattaatccaccacaattgaacacctaaactaaattaataattaaacataatttaaatcaaaataattaaactaaataaactaatttcatacaataacactaatcctcctagaggaaagacataagaatgcttaatgagtattttagccactaattgataagattatttgccaaaataaccaatagatcaataaattaaccttatttaaataccactaagtaactagttacttctagttatcaattacttgaactttcaaaagcaacataaaatatttagtcactatcttacttgtaatactatccaaattaacaaaagaaaatatataactaccacttggtattgtaacttgtttaaaaaattaagactttgaatggtttgtcttcattcattattcttcttttcataacttgagttaattaatgcaagttcattaactaaataatgatactggttactgataaaattttatgaaaaaaatacaacataatatctattatactacttgatattaactatagttaaaataactacaaacgatgcataatataatggaaattaatttaaattctcaaatataaaatgcaatcttcatcaaaacaccaaaaacattgacattacttgtgtcactgtctaatgaactatagcctcatatcttgatttaaggccatgaattccatcatatgtttctaaagaattttttatcatagtaaaacaacccttgcatacagttacaaaacatcaaaagagctctagttttaaagagattcaaagatttgacaataaacaacaacaagaccaatcaataataccaatagtactaaacaacttaacccaagatttcttcttaccacattcatatttcattacctaaatcttagtggtttcaacgcaagaagtaccacacaagcaaagctcatctcctaaaactcaacaaagtgatacatggatagaaaccaaaaaataaaaagccattgcatcttctttgttattttatatatgtttagatttttaattatttaaagccatcttttttagtttaacaccaaaacagagcaaaaatttactaacattatctaatggcagataaaagattgattcttaatatagggctacaaattatgatactctctactaacctaattactctattctgaacccattcctcctaatttttaaattttgtaataattcccatgactcaatatttattgatatatatatatatatataatgtattattttatttcatcatattcttctgtacatatttatagtgtgagggtgattatatatataaaaccactgtaaaatagaaatactatgtcacaaacacaaaaaataaattttgtcacagattaaactaaataataatctaaattataaaacccaaagtcaaattattgagaacaacaaaaaacatttatattcctagatattgagttattttttgctagtaaacccaaagtgaaaatctacctgggagagtgagagagtgactaagagagagaatcgaaactaagcggtgccccgctcaaacgagagaggagaactgagccggaggagagtcgttggtgtcgttcacactcgagagaagagtgccaaacgagaacctttcacgcacaaagggattcaagaggagagacgagggggaaggagggaacacgcagttcaccaccgagagagaaagcggagggaatcaaaaatggaggagagaacagatgggaaccctaatttttgaattaaataaaaaagagaatgaagagttggtgtgggttcaatttggggttattaacaagaggaatatttatttatccaaaaaaaagaatattttgcatcggtgagaagccctcacataagtagtttgcttcggtgcatacatgaggcataggtggtttgcatcaaaagttaaccgtggcaatatgtgtataattttttttttaaaaaaaatccatctttagcgtcagtttttgttttagtgtcggagagataactgacgcaaattaatcattatttgtgtcggttaccaactgaagcaaaaaattgagcattgacctttgcgttggtcaacaactttgaccagatgcgttgaccgacgcagaaagctatttttgtagtagcgtgttatgcactagacctgacatatgctatgcagtaagaattgtgagcaggtatcagacaaacccaggagaggaacattggagtgcagttaag

SEQ ID NO: 387240 - DNA, 573 bp, Cannabis indica
aaaaaaaaaaaaaactaatcaatgaacatttatttaaatttaaataaataaacaatgatgatgaaccgagtaataattgagtatttttttttttaatttacaacctttatatatattagaaaataattacgaaaaaatgctctatcttcttttatctccataggggcaattttataattttgtaagatcacctcaaattcataaattaattaaaaaaattatccacggtaattttttgtttatctttcttttaattatatttaatcaaatgataatatctattttattatttaataaaacttaagatgtattaaataattaaaattggtttcaaattcaaacttgaatttaaattcaaaaaccaaaaacagttttatttcaattaaacataattaaaataaaggtaatttaaagataaaatttatttaataaaaaaataaatataaaacttatagtgcatatagagtatatttatatattaaaagtgtctatctaacggcaattcttggtttaacgattcttggtttaacgattttttttttatttagccttacacgattaacttaacagact

SEQ ID NO: 387241 - DNA, 1238 bp, Cannabis indica
atgtaattggaacctctcaattaacttaaattacacagttatagcgtaattacatagtcagaaaaacatattaaattatataattatctctaattacacctaaatccaaacaccaggactttctaaacgcgctcttagaaaataaaataaacaaattatgaaaaactctctgattctgatcatctccaatgtaagatgtaattattgtcctaaaatttaacacaaaaaatgaaaaaaaaatattatatttagccaatattaataattgtactctaatgtacaataatattttaaaagagaaataggtctagaaagtaaaatattattaacaacaatcaataaattaaatatttaaaaaattattaatgaaaatattgtaaataatatatatgtaataaaaatatgttattaataattaatgacaaaagtgtaattaaaaaaataatattgtgccaaatttttagcatatgcctaatttaacacaatttatagtacattattggcaaattcctttatggaaaagggctaaaaaataacaatacactcttgtgttattttgtaagccttggtgttatttggtttgatctaaatgtgtgaaataaaatggcataaaatagtaaaacaactttaaagttgaacttattataatgtatttatttactaaatacatgagtattgggatagtaattagagatgttcatttctttacaccgcacaaattacttgtactgtattacgccgcataaaaaatgtgctttgaaattttttgcggtgcaattgtgatttgcttttttgacaaaccgtgcggtacggtacggtttgcaattttaaatttaataattgagattcaaattgcaccacactatatattataaaattacctatttttacaatatgatttttatttttttatataaagataaatatatttagtatatgtgtatattacattatttttttaaagacaatttaaaataataacttgataattattatatatattatgatattaaaactttaataagatttttttttatattgttaaacttttattagattgatttttaaattttaagggtaaatacccatgtgttttgcaaaaattaccaatttgaccttctgttttgttaaatgacaaaatagactttgcattttttaaaattgtacatataggatcctgaactgattttttatcaaaataaaatttaataatagtttgatctagagatgttaagata

SEQ ID NO: 387242 - DNA, 1576 bp, Cannabis indica
cctagcccgcctatgcccagagctgggcctgcccagacccccttcctaactcaaaaactttgtctttgaccatttctagatattataatagaaattacaagctgatacaaactatttctatgtattaaataatacgattcatattatttggtcgtaataattaatacaatgcaaaactttattcaaacataatgttccttcttatttaatacaatacaacatgtatacaatgtaacaaacaagctctaagtcaacttttcattcgactttttaaaagtcaaccttcttggtttgacctataccttaattggttgatagcctttgtaaaagaactttgcaatgttgtaaatttgtgtcatgccataaaaaatatgggtcatgtcgtgtcatgctttacttaggttgggccattttcttatacgaatttaaattcgtattctactttttcactttttattttaacaattaatgagataattactaaaattttgtattttttatagtttcaataatataaaatttgattagaactattaaaatttaaatatttactattaaatacttaaattattattattactattatcaaatataagatttttaacaaatcgtactttcaaaatagattattcgcatttacgtgctatgtctttcaagcttgtcgtgtcatgttgtatttaagtctatatttttgtattgtgtcatgtcaatttgtatcatcatgtcgtgtcgtgcccagacctatatttttttcgtgcctgatcatactcccactttctaaatttgtactagtttcgtatcatatcaaaaagtccagctcgtatttatagcaacttcaccaaccaatttcttgttacaacttgaggagttgaaagttatgggccacctcacactttccattgtttagtattgggcctagacctttgtccccatagcttgggcttccaagcccacttcaaaacccatgacaaaatcattattaagtgatttggccatgttttcaataagctcagctgagactgattgtgtctaggtataattaattgacataataacatcatcatcaacaacaatatagaaaaaacagaaaaagtgaaacaaaggctaatactaaaagattccctctttattcctttacaatcttttagacaattcttatataattgattatatatatagggaaaaggaccccttttgcccttggagtccccatgcatgtctctctctctgaaaagaccagttcattcatcaaagtttgaaacttttttcaaatccaataatggctgccatgcaatgcaagcatcatcttcattaatcatctttttcaacacaaaaaaataataataactaaaccaaaacatcattatctatttaatgatgaggaaagtgaaatcccaatcaaactttttttggtagaaagtctttatcaatttatcacaggcatatactcatttgttatcctatgtcttctcaaagctttagtacagtagaacctctattcaagaatagacttgggaccaagtaaattatattctaattgagaggttataactaaatagagttataccagaaaaaa

SEQ ID NO: 387243 - DNA, 1080 bp, Cannabis indica
aaaatggctaattatttagataataaaaatttgtgttcattattcaataaggttcggttcatcctctcagcaatgccatttttctctggggtcttcattacggttctatgcccagtaattccaaattgtagacacatcttgtcaaattcaaagttaataaactccaacccattattcggcctaaggttcttaaatttaagatctatttggttttccacctgaggtttctaatttctaaactatttcagacactcatccttagttactaacaagaaggtgcaacaatacttactataatcattaactattaaaagaaaatattgcttaacggagtgagtaggcaccatgtatggcccccaaagattagcaggcacatatatcgttttagttgtgtgttttactggagtgaacttcagcttatgtttttttcctaaaacacaagcttcacaaaatggtaaggcacaagaacttaaattttcaattataccttgtttgtgcagttctttgaggtcttgttcactaatatgtccaagtctgtgatgccataactttatgtccaattctagccctttcaccatacttgcctcttcagctaggacaatttctccttggagaacatataaaccattgatcttttcacatttcatcactaccaaagaacttttggtgatccttaagcttctgtgaatggatttgtatctgtatccttcatcttcaagcgcacccagggatatgagatttcatctaagctctaggatgtgccttacatttgtcagcaccttgatttcagcatcataccgtttgatggcaaccttcgttgttccaatgaccatgcatgaatgaccattacccattagaactttacctccatcagctgatttatagtcataaaataactctcaaatcaagcacatgtgataagtgcatctggagtcaagaattcactccctattcatagaagactccgagatggagaataactctcaattcgtggagcaatcatcattatcttttgtaattgtagcagagtccttcatgtggtgatgatgtcggttgtccttcctatctccattgtgagat

SEQ ID NO: 387244 - DNA, 731 bp, Cannabis indica
ttcttcttccttagaactagtcatcatgatcgcatctgcaagtccttgatgcataaagagtgctttcatcttaatcctccataacccaaagtcattaagacatgtaaacttgcttacttcatatctggtagtagccattcttgatgagttcttaaaacttcaaaaattgattcttgaatcttggatctaactgtgaagctctgataccatatggtaaattaacacctatcaagaattaaaataaaacaataactagagaagtgaagaattagagtggttgaatcaaataatgacataaagaagaaataaatgtgaaataaacgtaaagaaatagagacaagatataaggttcatcaccccttttgtggtgactaatccctgggaggaggatgatacaagagttgagctcatcaacaagtgtgtcttgcacctcaacaatggtgtcttgcaccttacaaatcaactcactcgagagagatgtgatcaaacacacacatcctctttaacaaccctcctcactaattataaatgtaacaatcatttaaattcctctctagatagtaacctaaaaaagtaatacacaaataataatagagtttttggtagctaaatcctcccaactatcgtttcacttgcacttaatcctcaaagctcaaattttggcggtaaaaccttctaaattactgaactgttagtaaaattaaggtgtcatctgttgggttttgtgccct

SEQ ID NO: 387245 - DNA, 1152 bp, Cannabis indica
ctaagtagacaaaattattttgtctttgtacattttttgcttccatatttaaattataatacttgttaaaataatattaaatttggtcaaatatggaataaaataaaattaagcaccacacgatgtatcatgatgacaatatgcatatttttttgaaagtacacgatgacaatattcttagatataatatatagttcaaaacaaattaaaaagaattagtcaaccctagaaaaatattgaatttctacgtggagcaatgaaagatttgattgttaatttggagaacttatctacatatgtggatgaagcaacatgttgggtttcatccgtgttcaaatcgatgacataaaaatgtagtcaaacttccaatattatgtctctcaaaaacgattacgacttctatttttaactaatcttttcattttccctaatctccaactaaaggtcaccttttaaaattgattttgtttaccaaataaaatcacatctggaaagaatttgatcctttgttaggagtactttaggaatatgatttatttgtccgcctaaagtatgcccaaatttggtaaacaaaattaattgatttttatttgtaatagagatttatttgtgaagttattgtaaattttttagttttcatgcgtactttgttataggaatatgcagtgcatgtatgtactgctgaaaaccgatgaaattggggtgtttaagaattttcaattttaaattttttaaagtaaaccaaatcaattaaatgatcaaactaaactaaaccaattcactcaaaaatgaattggtttagttcaaaaaaataatttgtatttcgtagttattctaaatttttgtacaattattgttcattttttggtattttttggaataattacatagaaaatataaattgacattttatttacaaaaatacctccataaggtaaagtcaacatttatacattttatgtaatttttattaccaaaataccacttacactatcatcagacgatggttgcagagtggttgctgcgtggttgcgcggtggttgcatcaaacgaaggtttcaatcagacgatggttgcatggtggttgctaagtggttggtcgaaggttgcatcaaacgaaagtttcattcagacgaaagtttctgggtggtt

SEQ ID NO: 387246 - DNA, 738 bp, Cannabis indica
tgaaccttttcctcattccacttctggtgttcctcctttggtttcctttctaaatgtcaacaatcccccaacaccaccaactgtcattcctcttaatagtcaaactgttcctgtctcagctgcacacgatcctgtgtttattgaacaatctcaaccttcacatgtctctattgaacctgtgtcagtcaggaaaaatgaggttgttgcccctatgtctaatattccttctagtctgcacaataccactgcaacactcactgatgttcctgttactctatctcccaatgtcaatccatccttgacatctaccaacactgctgtcaatattatgcccactattactaacagtttatctgcagatgcttcactttcctcaacatccacacatcctatgacaactcaactcaaagcagggattagaaaaccaaaggccctgttagccatttatgagcccaaatttgttaaatctgctctacaggagcccactggtttaatgcaatgtcaacagagatggtagctttaaagaaaaataagacttgggtgcttgttccattgcctaaaaatcaaacttgtataggctgcaagtgggctatgaggataaaacacaatgttgatgggtcattcaacaagtgtaaagcaagattagtggcaaagggatttcatcaataggttggatttgatttttcagaaacttttaccccttttgtgaagccaataacaatttgaattgttcttact

SEQ ID NO: 387247 - DNA, 1343 bp, Cannabis indica
tttttaattatataaatattacattgggaagttgcacacatacgtggctcccaagttctgtcttttcctttcttttaattatttttaataatcatatatatatataaatataaggagactgctggacacgcggctccacaatttttttcaatttcctataaaaatattaattactttcattaatatttaatatatttttaaaggattaatttttaattattttaaataaataaaatatataaatatatcatacaacttaatgttttacacaaaccctagccgcccaataatctctttctctcacctccttctctatgttaggtggtggtgcggcggagagtaaaactcagtggtgttcgtgctcggcaggcgacgaggcagcacaatggtcgatctgcggcgcttttccggcgaggcaacgtcgtttgactgagtttgaaagacttgactccattctctctctttggtttttcaaagggtttcctttttcctgttcttcgcagaggtgaggagatttgtttacaaatctgttatttgttgtttttgttcttgttttaagctaaaagtttcatatgttatagatttttctgttatttcattttaggttaagaaaaataggattgtgaattagatatattgctcatcaatagtttttgaaattgctttgttttccttgcagatgggagctttccaagtatgaaaagtttcccaaggactaatgcaaagagatggaactgctgcaaaaatgcaatataatttttttttctttgatttgaaattttgaatgtatctgatgattttatgtttgagaagaaattgtcttagaatagttaatatgttatgtatacaatttttttttaaagaaaaaataaattgaattttgttaatcttatcttactgcaatttgtaacaagataaatgtattttaagtttgtttaatacgtatttgagaatagtaaatttaaatatattattaaattacattcttattaaaatatgggtaataattatataaataattatttttaaataaaaaaataattataattattaccttttaaaaatccgagaatattgatttattgacgactaaatcgtcattgataagtcactcttttcaaaaaagataaaagtaatagcatattatcaataacgacaatgtcgttattgatatttatttcaataacgactttaaatgtcgtcattaatacttatttttaccaacgaattattactcacgactttttactgacgacatgtcgttattaatgggcattaatgacgaaaaagacatcttttaccaacgaaatttgtcctcattgaaactgatttttcttgtagtg

SEQ ID NO: 387248 - DNA, 828 bp, Cannabis indica
ggtgagtcaagattgtgcctagttttggatagattgctggttttcatttcgttcacgtttcgcgacgttttgtgagttattatggctgatcaatatggggcagtactagtatggaagaggatgatatggatggtttaatgtacgatgactatgatgagcctgaactttctgagatagatgatcggtggtgcttagtgggaaggtttcttacaaagagatctatagactttcaagcaatgcaacataaaatggagacattgtgacaacctgtgaggggaatgtacgtgaaagaattggggccaaaccatttcatttttcagctttaccacgaagtggacatagatcgaataatggatggaagtccatggacttttgattgaatacctttggtgtttgaacgggtaaaaccaggtaccaatccacgacttatctctctcaataggctagatttctaggtacaaatacatgatataacttctgggtttaagtcggaaaaggtggttagagacgttggcaactatatgggaacgtttgttaaaacagatccaaacaacttctctggtgtgttgagggattttttgagagttcgatcttcaataagagtcgatcaacctttgcaaaggaaactgaagttagaaaagaagagtggcctatcttgcttagttcatttcaagtatgaaaatcttctaacattttgttttatttgcgaaatactcggacattctgaaaggttctgcgaaagattatttgacacacctttacacttgattgataagccttataataaggagttgaaggctgcaccaagaagatgttgttggaaattat

SEQ ID NO: 387249 - DNA, 717 bp, Cannabis indica
atatatataccaaatatgtagacagtaattaaaatatcacatcttacagcatatatatatatcacataactaaaaatctaagatatatacaagccaaacggaaggtacaccaaatatattaggctgggcttttcaaaatgcaatgaaagaagataaaaggaaacttaataatcaactttacattgcatatagcaaaacttggcatacacgatactaaatcataaaattattattccagtcgagatcaataaattcgagaatacacatactctcgtatgtatatatatgaaaaataataccgaaattcaacaatatatataaaagattcaaaaccttaattttaaaatccccaaatttcataaacaaaatcatcagatcttcaattaattcaacaaaggtggctctgataccacttgttagggtttataaaacacttaagaaatatataaatcacagatccaaacatattcctaaaagtgctttaatatagaaaaccctaaatcataaatctataaagcctttgctaaattaaagaagaagaagatgataaaagatgagcggaagcactaacctgaagccattgttggagattgcagagaaggttttgatcttccaagaatacactattttcttaggtattttctctgatggggaaggagagaatacagaaaccctagtgtttcttggggaccactacctatttatagactcatctta

SEQ ID NO: 387250 - DNA, 1666 bp, Cannabis indica
atagaaacggatgatgatatcttatcagagagttagtatatttaataattttttatatatagatatatactggggggttttgtgtgtcgattttttatgtgaactatattatcatacgtacatactagactctgtcacctatatctatatattttatctttttttgtagtacttacaactacctagctagctagctataggctgctgacaatgctatgtacacatctctactcaataatatatgcattattattgttttattttattttattttttggagaaaagtgtgcatgcattagaataaaatccgttagatctcacggttattacaaaagataatatcgggcatagaggatagaggcatggagccgaacctctgacagaaaaatgcccacttggccacattatgggccataaaattacactgtctactaacaaattgaaacatacaaccaataaaaaaagaggagatgcttttacaaaaagagatatagttatcaatctcccaacggaactccttcccattaataacaaatatatgcattattattgatcattaataacaagtcttattcctatctctacatcatattattcaaaaccatgcatatttatatgtatgtacataagtttctaacagagatatattaataagaatatgaaatttaaattaaagaacaatatttctatatatgaaaaatatattgtgcagtatagaattagttttccgagtcaggtgacattagttgcagactctttgatcgagaaaaattatttgaggctagctataaaaattaaaattgcgtatattagaaattttaggttcgaatctcaaattatgtattataatatataaatacttaaataaaaagaaaaaaaaacgcttttgaatttgaactagaaaatgcttggagtttcactcaagttatgttggattatttatggaacgattattaattattgaaagattgattataccaaattaaaatccaaaataatattttaaatattagtagaagtataaaatgaaatgtacatatataaagaatatatttcctttttaagaaaaataaaatcaaatcaaacacaatatttatatatatatgtatagttcataatttttatgcatgtatgtacccattaattaatcaccaatattcagtacatttcattctaagaattaagtattaatacttccaatgaaagctgaatatatatataagtattggttttatatatagcatagggtttgtaaaaaaagtacattttttccttgcaataataatcaataatgtggtactttgtaatcatttatggccggccggccttgctacttttagcatttattttgtgttgaaattttaataaaataaaataaaaaaaaccaaataagtgagcctaatgcatgcaatcccagaatccattatataatatatatgggtaaatggtggcaaaacccttcaataattttattttatttgtaattaacttttaaactcaaatttgagcggtaaaacttccaaaattacgataccgttagtactttataacttccatctaaatttgactgttaactgtcatggtagattgtacacatagacatagtatacacgtggcacaattttattggtcaacgtaaataattatattaaaaaaaaataaaaaa

SEQ ID NO: 387251 - DNA, 1032 bp, Cannabis indica
ccaccggtgccaactttacctcagctaataattttctaaaggactatcaagctctttgaattgttgaagtatcaatctcactctcggatgattgtagtgacaatctcactcttctcgggttgtttataaaaattggtgtaaacttcacctacaaccgagttatttttctaccagtgccaacttcatttctcaatacaatagatatgtcattatgaaatacaaagtaaactctctctaataagatgaaatacaatacaaacacactagagaagataagaacaagtttaggctcaagtgtgtggggttagtgtgtatatgaaaaaaatcataaaactttaacttagaacacttagaatgatattatatgatgaataaatgctcaaccaaccttaatttttgtgagaaaaatcaatttatatagagtttaaatgaaatatagtcgtttatagccattaggatatttttcgggccttttctgccacaaattgaaagttcgattgtgaatcgaaattttggatcaatcacaattagaagtctggttcctaaatggaacttcagttcaggggcaatgagcattttgatatttttcgacttaaaacgtgcataactcctttctcgtttattcgatttcaaaaattctagttgtgttctcttaggtgacgtttgataacacttttatttttaaactttttaatcacacaaataaacgtaaaaattttgtttttaaaattttgtttttgaaaaacaaaaatatgttctataactacatttgttttttaattttaaaaacaaaaaacaaaagtgtgttctgtaaattttatttttctttttcatttgttgatttatttaattcaagtcgaggtcaggtctgaggtcgggattaagggcaagtccaagtttgggatcgtgttcgggttcagtttctaaaatttaagttggggtcggagtctaaaatattgattaaacaaattatttaaaaaaaatttaaaagtgatttttttttaaaaaaaaaattagattcttaattaaaaa

SEQ ID NO: 387252 - DNA, 3231 bp, Cannabis indica
cctaaattctctgaatttcaagtgttattatttgctaataataatagtcagtataagggaataagagttgacttagctacacacgaaaataatattgattggtagagctgttggattaattatatatttatttctatttgtttatattttcagtcaataaataataagctattggattagttacaataatggactgaacggtaccattaattataggaaaatggtgtgtttgaattaattttatttttgaaagaaataaaaaatatgtattttaagttctatactttttattgttttgtattattgaaacctatcatatatatttatacaaacctagctagctatatatttctataagtaatctatacatatgtttatatatatagtttttttttccttcttatatatataatttgaatgagcataacatgttaatattgtagttaattatacatatgtatatacttgtacatttccattgagtatgaatatttcaattttttacttttttttgtgtaaataatatgtatgaatgattattaaattagttttcgaggaaacatttttatttgaaaatttaatcactactagaaagtttatgatatgtatttatacaattaaatttagttattattttatgatatacttactgttttggcatgttattattattattaaaaaattgttttgaattcttctgaaattacagggggaatacgtacagaacaattgctttcgaaaaacaaatatagttattaatttcatagttttttttttttaaaaaaaaacaaatataattattaatttcatataattatctagtatacggttctgttggtttaagtagctagattatatataatagtactttaaaatttgctctcgaaatatttgaatacatccactacaataataataataataataataataataataataataataataataataatatagtagaagcgaaccttagctttacaaccaaaatggtgggtcaatcctgaccaaaagaaagatcaattagttctctaattcattaattattggtcctcatttttagttagttattataattaattattacatatagttataacttaaaactataactcatttccttgtaagttatgttttataaatagctagagatagaaactaatgaagattagaaacattattgtggttataattgattagtgagagaattaattacaatatgtgaagaaagcttaaattgtttagctattgataattaatgtagagtctttgagggtaaagcatgacctatcgtaagtgtcggacctacgttttaaaaatgttagtacaatacacagcacgagacaacttattttttattgcatgacacgatataagattcatattttgaaaaatataatataatataagtcgagttagcattacacgcacgaatttactgcaagacttgtgactttattttattgtattattgattcttctatagtagatttcttgagacgataaagcaatactaaatgtagcattaagaattcaatgtgaattagtataattgcttcatgttccttatttgttttatagattattgtaatattgtgtctatttttttttattgatttaatcacataagtaaagtaacatttatttaattacaaaaaccctaattatgttgtaatatttgtatatttgtctctattttgtagtttcttacttatttatattttgttgtattaattacatgattttgagtggtgtttagatttgttgaaccccgttcttcttatttgttgctacctcatcttaactcgcacagtataatataatattatttaagtcctgacggttttatttttgagcacattcccaaaataccttatacttatggaataggtagaacacttatgttcaaagaaactcttgtctactgatcttccgatctgggacttagattgataccctaacaagatttgtagatctattaattaaggggaggtattgttggttcctttatgtttggtttcgtttttctttctttttgaagagcttcaaacacacttccctcgaaggtgtaccaatgatgtactatcaacaaagcatatattaaagataaacactaattaaaagagttatgcaatggataaaaatatgtttaaaggtggttgtaaataaaattggagattgttaaaataaatccccacatacactgtacagatcagcacttaacaaagattacaaagcagaaaatattctaggtggccttcggcctctaacaacctacagacagaccacaaagttagttgcaaagtttgttaaaactgttgcaactaactctcagatctctctactaatctacaagctatatatacatgcaaatcaactaaaatagagaagaacagatcagaaaattgggagggagagacttacagtggttaagtcttggagccttaggtttagggctcggagatccaaaccaacagaaggacatacacaaagaaagaagaagaacaaaaagaagtacaatattcagagagagagagagagagaaataaacactgtaaaacaacaaggattaccaatcgtacctgtgtgatttggaatccaactttgtaacgctttgatcttgaagatccaatagtagaaagagcttttctgaggcgagcttgaagaggatgtacccataaattattgggaaacctctataaaatcctggtgcactctttcttatttttcttttttgcttttattactgtgtttatgtgtttgtgtgtgttcgtggggtttaatctgatctgggattgttgtgtttttctgagttgaatgcagcctttgagtttcttgagaagaaactcgaagctctgctagggttttcaatctgaaaatgtgcgtgtgtgtgtgaaatgaaatgattctagagtattctggggttattagggttaagcaaaatggcttgtactctaagattgatgactgtcgtttgctctataacacaaagggagtcaaccggggtttgactcagggtgaaaggtatgttttgaccttgagaaatattgattcctttacttttgtgtgtagggtaaaagggtaataaattcctacagagatcattaaatatgttataatataacgaatttaagataaatagttttgactataaaataaaataggtgtttgtaccgtgactataataaattgtttgaattttatttttggtatgataatttttttttt

SEQ ID NO: 387253 - DNA, 1962 bp, Cannabis indica
atttactaaaaacgttttagtgttcgtctcgtttccctttctgtctacaaagttagtggtaatttcgtccactgcttctactgttccagttgctaagtcttctttgtctcgttagtgtttaggtagtaggggataagtcggtcggtaaccccggggacaatatggcattccacgtgaacccattattaaggaattagttcctagtcgacgggcccctgaagtaatggcagctgaagattcttctcaaccacctcaaccgcctgatattattatggatggttctaataatgaggtaacagaggagttggtgatttctcctacaaacatcaatgcaaacaagtcaagagaagacattgaagtcctacgcaacaatttcttggagtctatgacccttgatctagaaccagactttgaacttacagcagatgttgttaatactggtgtgctagtgagctttttgggaggtaatggagtgtccaggtctcgattgagagagatactcaaccagatatggaaactaaaggggcattggaaatttaaaactatgaaaccaggtgtttggggcattttctttgataaacctgaggattgtttggcaattcttagaaatagaccctggaccatcaatgggaagctactaatcatcagagaaaggcctgagaacggggattggtataacttgaatatggggatgtctatcttctgggtaatggcatcgggtttgcccacaccataccttaatgcggttaatacccgtacgattgcatccaaagcagggcgttttgttgtgagtgaccttgcaaatcagcataccatcacaagaaggggatttttaaagtttcaagtggagatagatacctcccaccaactaatttctggattctttttggacattaagaggggtaggaaggagtggatacaatttaaatacttcaagttaccaaagctgtgcttcaattgtgggtatcttggacatgataagaaaacttgctttcgttcaacagtgttcgcttatcctcctcaaggtgatgcagtccctactgatggaccttggatgaaggttgagtcagcgatcttcagctattttaatacttgaaaccagcttgagttcttcagagaagaagcaggacagattgtttcgccggcgaaatctccaacggtggttgatgtgtactccaaagcaatgggaaagcgacctgtcgttgagagtagtggaaaacagagcctgcaataaacaacaagcaagaaacctactaggaaagtcatcaggatcaatacaaatggcccaagtactgttttgggaaagaatttgaaagtggttgagagggctagtgtaaacccttcgggtaaaggtaaagaactcatgtacgatcgggatcaaggctctgcgtatcctggaaaggaaaggaagacaagatcagtctcccctagggcaatgcgaagacataatcaaggtaacaataatcctttgtctgatgttgaaattttaaacaaattttcttctaggcccccaccaaacccagatgataatggtatccttacaactatcatggccaacattgggcctacttatgatcaaatggtggacaaggcccatgttgagttatgtcaatctagacaaccccataagcatcctgagcccacccattttccttggcccatttatgctgaagaaattagtctggctgaagaattgatgggcccagcaccagttgataaatttgggccaataccaactctctttcatgaccctgttgatatctcaaatttagtccatcattgtcctcaacatcgaaaaagaaaggctagccttacttgggttccatatgttcaacatacagaagagaatactatagaattttcaactaatgcccctgaccttcctaagttctccccagcaccatgttggaattattttaccaggatctatttactatcatgtatgttggattaacaacctaa

SEQ ID NO: 387254 - DNA, 744 bp, Cannabis indica
tcacacttccacttcttctcaccgtgttttcgactaaagtgcttcttgattccggtgaggtcacccaaggctcgaccagggtcatggtggacacaactcttttcagggcatatatacaccttcttcttcagctgatctttgttagtcctttgcctaagcttccatggaaggttgtgacctcttctgtgaagctgcaagttctggtctctctggaaccctttgttgcatatttcacatacgaatctgtttgtagccataagtgtttttggagataaagcaacaacctccgcatctggatctgtaattaatgtatatatacttagtacaatttacacatatgtataattagtaaaaattattaacataaatatataaataatttgcctggtgttcctgggagatttctcttctttttggtagcagcagcagtagtagggtttggttttgggtttggttcttgattaccatgatgaagaatatgagcagtagtagtgccaaaccagccattcatattggaagaaaacctttcagtactacgagccataatatgcatctaataataaagagttttatatgatacgtagtactagctacaagagtataaacaaaacaaagctctataaagctctcgacatatagagttataataagtctttagtatatatgtgtgtagtatgtgtgtttataagtatatatactacacacatatatatctacaaaaccaaacgactctaaggcaaaacg

SEQ ID NO: 387255 - DNA, 1546 bp, Cannabis indica
tttttttattcttttttattttaccttaaacttatatttttttaccattcaataacttcttcatattttttttctaatttattaaaatattttatttatcaaataagaaaaaacaaataataacaacaaaacaataaatatacaaatatatatttaatgagggaaataaataataaataattagaatatttgagctcactttcatactttagcaaaatgtagctaagaaaatgaagtgagctattatacataatttagcccacctactagagtaccgaaaattgaacatttaggtggcgtttgattggaaggaataaaattataggaatatgaatgagaatgggaataacaataggaatagaattgaataaaatttaaaatccataaaaaaattattaaattttttctcatcatacattggaatggtctttctttttatttcaaaatagaatagtcattccacaaaaatggtggaaaggccatcctattggaatgacatttcaatactttaatattcaaccaaacaaagaaataaaataaagattgagtcctttccactccattacatttcattacctctaaccaaacaccatcttagctttagagctattataactcattagttgggactgctctagtgtatcgagaatctttaatagtgtatcaagtgcgcttgtaatgtgaatttgaaacgtcattttacaaacaattataagaataaaaacagataggtaaaacatcaataaataaaaaaaactaaaagacaatactgctacttagaatcctccaaatagtcatatcgctattgatataatataatatgaagtttcatataatttaatgataatttttaagaaatattgataactaaattattggtgtccataacaatgctcaaaaaaaaaataaaattaagattcgtgttgtaggaggaggtagaatacaagtcaagctcggtccaagcattaggaagcttgagctattgcacaaggctccttatattatcaaaaacaacaattacacaggggtaggccaatctgccttcatagcagcagatgcacaagtaggaatatttccaagccaaacagtttgatcaacattatttaatgccaaagctactaaaacatgagcaattttgttacaatctttcttaacatgaataacagaactatagtcagttagaagagaggaggatttaaattcatctaggagagcactccaattagtagcagccttcaaaactccattgagatattccactactcgagggcagtcagattggaggataaaaggtgaacttttgagcttctctgccaactgtaaacccagaaagacgaccatttatttagcaggttcaactttgaattggcctgttgatctcgcttttagccaacgacaacgagtctattttataagcgataagtgatttatagcaagaaatatatgataaagcaatgtaaagacacatgaattttacagaggttcagccccgagaagttcgctgatagcctaatcctcgttatttgtgttgacttaagatctagga

SEQ ID NO: 387256 - DNA, 643 bp, Cannabis indica
tatttactaataacctaacaaccactaagagacttactaaaaaaggagaaaactaattttcaactaattgatcattagtcaaaaatatgtgaattagatatattcttaatagttgtgatttaaattttgatcactttttgtaatgtaacatatttacatcacaatttgacacattattagagtagacttttaacaaaataaattatattttgcatttatatctccattggagatgcttttacacttctttaagtattttgaaaaaaggatctataacataaaaataggattaaatgtttgattttctttttcctgaaaaatagtattccgatcgaaataaatattccttcaatcctatatatacttgtagaataaatttctttcaaaatcaaaattttcaaaacaaagccaattggattatcatttgtgtagacaaaaaaattgcaatctcatgaacacaatgaactcctcaaaaacaccatttaagtataacaacatttctaatcatacaaattaaatattgaattaaatctcataaatattctaatattccaaacaacaactgaatctttcataaagaaacatctataaattatgttctatagaaatcgataacatgattggaaaaaaaaaaagaaaaaaa

SEQ ID NO: 387257 - DNA, 894 bp, Cannabis indica
taaagaatgctttggaactacactatgctcgagatgcctttcttcaagaaaaaaagaaaactatgtgtctccctcaggtaaaaaatggttaatactaatttgactgtcaggtttgctttgaagaagcttaaattaatctatgtttcttttgataagctttctgagaagaatacgaaacaagttttgctcaactacattgtccaaagcaacggttcatttgtatttttaaaacacaagcgattattaacattttctgcctatgtataaatatgtaaaacatggagaaactcatgtggtataactaccctttagatcaaactaaataactgttattctacttttataaatagcagtaaaaatattgagaaaaggacgaaaaattttgtatatcaaattcttgcaaatatttatacacagacttattttagtcattccattccaagtattatttattacataattatttttgaagtattaattatcaagtctaattctgagttaataattaatatagtaattttagttttttgaattttttgtggtatataatcttattgctatgttatattgattttttgtattatatatatattcattctaattataataatttccttaaaaagaaattgacctgaaataaaaatatttttataatatttattatctaatttattatatttggctatttaacaaaagagacatttaactaactaatttatctatttgtgaccatttttcacattagccatgttatgctttattaagtttcagtccattcgaaacaaatatagtcttccagctcaaacctaatatgaatttttttttagataattacacaaaacattattttttgtaaaaatattacaaataattttttttgcatttttacagttt

SEQ ID NO: 387258 - DNA, 2005 bp, Cannabis indica
atttttctttccggacactttagtaaacatcataaaaaaatattgtttccgattattttctatttaaccgatacatttctcccattattattccgcttccaattacagtttagcaaacgcgccattaattcaagttgataattaattactaactaggttaggtttcacttttttttgactttttaaacttttaaaatggcaacctaatggtgacatgcatacatggacctctatttaagatttatttaaaaaaattaaaaactaaactaataaagattcattcctagattctttttcattccgtttttattccttactcaatcatcattccatattcattccttcgtacattaaatgcagatctcaaaaatatcaatgtaattaatactttgtaggccatttaattataattttttgaattgataaataaaatataatacttttatattttttaactattttttaaaaaaaaaatcggaatttttttaaaaccttaattatataaaaagttataaaattctaaattttttattaataatatacttctttttatattttaagacttggttgtgagcctaaaaatttcacattttcttaccattttgtatccaaacttaaagactcacccaaaatattatacaagaattatatgtagattattattcaaattcgttgaaactttatcaaataatctcgtccatttaaacaaatgtttattctttgccttctttcttattttatttttttatcttacttttgtagatggaaacaaaaaacaaatggaggattcaaatgaagaataagataaatgatttaaaatacgaattagcatctttgagttatctcaaagaaaaaattaacgcattgaaagcaattatgttagagaatgaacttcaccctatggtcataaaaaaaatgtaaaacaaaaatgcatcattaaattataaaatttcatcatcaacattcgctcgtaaggttgtgttgtttgaagatttcaaagttactaagcacctaagattgaaagatagacaagtgttagagtacatatttttggactcaaatcaaagattagaattaattttttttatttattcttatatcttttttaaaaaaaatgacatcttatctttttatttttgtaatttttttatatgtggatattatagtagtatttggaaacaattatctacaatttttagactttcgataccttggaccagaggcttgggttgaatcatctgtaaaaataaatacttctttaaatgtgataactcaatcaatagtatagaatgaacaatattatgctttttttctaagttgttactatgatttctctattcttgatggaggaagaaaggagaaagagtggtggttgctccaccatttggtatcttccatgtcgattattgattagtatttatttgactttatattattctaatacattcgtaattcttattgtgcataatggtgtcctcaacatatttctaatttttaaatagaaagaatttttaccgttgcgtgacttaccattatatgaagtttggaaggaaatagattactacaacatattcatggaaaatcttaatttttgtaaagaagtaaggttttattgttgagctttttttttaatatactactttatatattgtatttattgtactctaaacgttcttgtagatatacggattttatcgtcaagccactattttcttgctcgagttattatatctctaaagaaggttgaagtgtaggactcacttgttgatgaaaaatctccaatttgatagtctaataagattaaaaaaaaatagtaagtattgtattcattgtatggaaatgagatatttataattttattgcttaatttttttattgtaaataattttacagctgggtaacctagaattgacaatggcgagtcaaactaaaaaagacaatcaacttttagcttcgctagtttttccatctatcgtgctcagaacgttccaagacaaccaaattt

SEQ ID NO: 387259 - DNA, 2039 bp, Cannabis indica
aaaaaaaaaaaaatcttaattaaggattcaaactggtatttatgattcctttgatgaatagtaatgattgatgcctttaaaatttaaaataaaaaaagacatattttatgatctatttttaatatataatgagattgggatcttaaagtttattaatttgtaaaaattacaaatcgaattctaaaaaaaatcataaaaagcacgtatttgatcatctaattattattattgaacgtaaaatttaaattacttgttatgaaaaagtgtcacgtataattaaaatataatcaagctattttttcaataagattgagaatggagtggaaaattagtgatgaatgttctttcattcatgtttcgcctttgtttacttttgtttggtttgtgtaagaacgtaagagcaaatacagagcatagagaagaagaagcagagcaaggcaaaagcacatgactctgtaagagtgatttatttacagtattgggttgttacaaattgtacaaaagagaagaactaacaacttttttaactaatagcagtagcactaactaattaactaatctgttaactgagtacaactaattctcatggttaacatccccctcggacaaaaatgagtgatagccattgaaatttggacttgaggtatgagaatcttgcactagacaaagacttagtaagtgcatttggcacttgatcaagtgcaggaacatattgaacagaaagtggtttctccattatctggtctcgaacaaaatgaagatcgatctcaatatgcttggattgagcatgaaaaattggattatctgcaagggttgtagcactttgattgtccatccaaattattggtggttgaacaagtggaacttgaagttctgttaggagagaagtaatccatttgacctctgatgcattggctaaagccttgaattcactttttgtgctagatcaagccaccagtatttctcctatcatcaacacaacttgcccaatcaacattcaagtagcattctaaagtgattccaacaacaggtttaagaagtaatcctttagaaattgtgcctttcagataccacagaagcttcttccaggcttctcaatgtattattgtaggagctttgaaaaattgactaagcttattgacaatgaaagcaaaatttggtcttattagacttagatactgtaaagcgcccaaaaggcttctgtacagtgtaatgtcttcaaaaggatctcttcagtaaggtgtagtttggttgtggaactactaagattagaacagggtttagcgccttccatttttagtttgactagaagatcaatgatgtacttggattgagacaagtacattcctgttgagttccttatgatttcaactcctaaaaaataatgaacatcacacaagtcttttaaagaaaaaaattgattgaggtcttgtatcagtcgagatatgagtttctaatttggaccagtgactagtgtatcatcaacatatacaaggagaacaatttgagttggacctgatccatgaataaacagagaagtattaactctcgatgcttgaaagccccattaaagtaaattgtgttttagcttcgaattccatgctctaggatccttttttaacccatagattgcctcgtgtaacgaacacacatgatttggatttgtatcatcttcaaaccctgtaggttgttgcacgtacgcagtctcatttaaagtaccattgaggaaggaattactgacatcaaactgtttaattgtccagctatttgaaatagatagcgaaagaaaagttctcactttgacatgttgagaaactggtgagaatgtttcatcatagtcaatacctggagtttgcaaataacccttagcaacaagcctttatttgcacctttccaatgtaccatctgtatttagtttgaccctgtaaacccatttgttgctgataacatgcatatttcgcaatctaggtatcaaagtctagattttagccttcttaagagccttgttttctgtatctatagtgttggaaatattttac

SEQ ID NO: 387260 - DNA, 1775 bp, Cannabis indica
ctcaaacattacacctaatatcacgacagtttttgtaataaaaggtttctaaaatgaatctcaatacatgttaaaaaaaatgaatctcactatccataaaaaaaaaaacaactatttaaaaaaaaaaaaaaaaaaaaaaaaaaaacaagtaatcaagtaaattatttaatgttttatacttagctagatggatggatgcacataactttctaaaaaaatcattaatatataattaaaagaaaataaaaattatattatataatagatagtatatgtgtatatatatatttatttaaatatttacaaaattgaaaataaagacctaaacaaaaaatgaaaaaagatcatatataatatgtatctccttttagccttgatcagaaacaaattaagagaaggaaaaacaccaaagagaagaagaagaagaagaagaaaatgtattcatgtagaagaatattagagtaatcaagagaaagtgattaagagctaattatcaaactttaaaacaagtactaactatatcgatcaaaacccacaagttgaataatctaacacccaaataatcatatcaatataatattaaaaatttaaaagaagtaaaggaagaaatattaacctgcaagaaattgagatccaaactagactcagttgggtttgcaataatttatataataaaatatatacaacaatatacacatggatatttatatatatagtattattgggtctctagatcgatcgatctctttctcattcacacactttatatagccatatatatattaataattaatgcaattaaatatgtagggtacattttcaaaaaaaaaaggaacgtggggtaccagccctcaactaattttctgtaaatcatattttatagggttataagggaaatgctaaaaggcatcttactttctttaagtgtcatattattattagtataatatttaagtaatatttaagtaagggtagacattcaattcaatttaatattttttttctcattcgattcaatccaattactaattgaattagatccgttttttgattggatattcaattacacatctaaattttaatattaacataaaaatatgaagaaaaaaaatatgtaaaaattaaatattacgttttatttaagtttaatacttcataagtataccatcattataatgtaatgcaactaaaaatttcaaataattaaaataacaacgtttctaagtaataaaatagaacaaaacatcatgaaaataaatacactaaacaaccaactgttacaaatttacaaaaataaaatccaataaaaatataattaatatatatgatatttttattatataaataaatataaataattttttaacatatataaatgtaattggattggattggtttttaattggatcttgagattgacatccaatgaccgattaaatcgaattagaatccaacttttagcatccaatccaattcaattataattggatatccaattttttgtaattagatttgattggattagttcggttcaattggattagattggatgttgctcacccctacaattaagtatttagtctcatataatttaatgtaagaacttttagagaatatcgtaaccaataataaggtgccacctctagaagatgatggagtggtgccaaacagcaatgctcatagggtaaatactattttggatcatgtgttttacaaaagttattgattggaccatctgttttattaaattataaattagaccttgtattttctaa

SEQ ID NO: 387261 - DNA, 347 bp, Cannabis indica
aaaaattataattgaaaatttataaacaaatctttttaaaagaattagtaatagaattgtagttttaatgtagatgatttttttttatatatatataaaaaatgtcaacttttaaaattttacataaggcccctaaaatacttaaaccggccctgagtgttgacggtgtggtgtacaatgcattagcagcttcaaagaattcgactgtgaaaaagcaaaaaaacacacacacacacaagtttttagctttacaaataagtgttgtgttcaacccatataactataagtgctttatttgtttgtgttaaggattaaaaaagatgtaaataaatgttggaaattatttt

SEQ ID NO: 387262 - DNA, 1127 bp, Cannabis indica
  modified_base (1093)..(1093): a, c, t, g, unknown or other
tgaaagtgaaatgaagggtgatgtgtctgaaaatgtttaagaggatctctatcattcatttcatgttggttgataaaaatggtaccaagcaagccttaagttgctttgacatataaaagaaggattaaagatctttgttcattaaagaataaagatgctcttatttgtgagattcaagtaaattatgactacgcttttaaaaccttactctttaatgcttctaaatcttaaaatttcttgatatgggcattcattctaacttttcctctttagattatagatttcctccattaaaaaagcttcaatctttttcttgttctcaattttttctcttcaaatctacttagggaaaactccacatgggtattgcacttttctcagttttataataagtatataatgggttttatgcactcaaggtttattgcttgaaaaaaaaaaaagtcaacaatcactctctctcaaataatattttctcgtcattgagtttttgattgaaacatgtgttttcatgcctcttttgtattatattatggattttggaggttgaagttaattttttaattaaaataaagtaaacaaaaaaatttgtcttcgagtttttttattgaaacatgtgttttcatgccttatattttgtattattatggatttttggaggttgaagttaattttaattaagaaaataaaattatgtttttatttttgaaatttaaaaataaaagtgatttttttttatgttttcaagattaaaaacaaaaataattataaaacacttcaaaaacaaaatttaatattattttttattaaaaattagaaaaataaagtattaacgagtacacaagcacctaaatgaacatcattaaaattaaaaagcaccatctcttttatattttttagaatgtaaatgaggcattacacaagatcattttctattgtcgtttgttctgtttgttaattgtaatgtactttctaatttctttcatcaagatctgcagttgaatccctctaataaagtcattttcgtgatctccatgagttttggagtttcccaatgaaatttagctctttgtttctatttatactgaaactntggagtttgaatcatctttaacaagtctcttatc

SEQ ID NO: 387263 - DNA, 534 bp, Cannabis indica
tctctctctctctctcattcatacagatcatatatatctatctatatatttatatacattaaaaacaaacagtatcatctataggcacacttattgttgttactattattcctatgaataattaaaaaggtaaatatatactactattcctagtggtatatattatcatcatcatcatcatcatcactacttcttttgctacttgtcacaaataaatagcatggtcaactttgtattattaaaatccactatttaaaagtagctactgttatttctcatgtgaagaagaagaaaaaaaaacaacaacaagaagaagtaattatacataataattggaaaaagaaaattttatggtccattaattcatgcacctctttggatttttcacaagatatttttaattttgttttataacaatatacaatgtagtttttttttttaaacaaaaataatttgtaaatttttgaaaaattaaaaaaaaaattaatgcactaaaagtaaaacttaaataatttattgcatgcgtacactttt

SEQ ID NO: 387264 - DNA, 1634 bp, Cannabis indica
gataaaccgcccaaactgaccgatgtacagccctacaaaagacagtggggttgatatgtacattcgctacgagacctttgactcatgattgatccactttttcttttcccttgcatgcactacaaagcaccagtaaatcacaaagactacaaacaaaaaaaaaaaaaacaaaaaaaaaaataataaatccataaatcaaataagtctgtaatcaatgacagttacaaaattaaacatatattcatgtaaaatattacaacttaacacaataagaattatcaattatttgtctaataagacaaactatctctgatactttataaagtacccatcaaccctcttttccaacgagtaaggtattgttactatcgttgcctaataaggcaaccgataagtaagaaacctaacagtggtttctgaatagagttataaatctttcatactaacactcattatcgtatcccaattagacatgtaaagtggtacaactgacttttcttaccttaaatctaagtttaaatgtgtgtgctggccgacctgagtggaataacattcgacaatctcgggggccctatatcataacaatggtaaattagtaaataaattaatcaatctcgttctaagagttaaactaaaaactagacaaccccatatcgataattggcatgaaaatatagcctaactattgacaaaacacaaaaacctaattgttggaaacaccccaaaacggtctactgttttctaaaaacgaaccaccatttttcctacaaaaatagcctacttcgtgtttctcacttcaaacttaaccagaactcttccaaaccgaataaaactttccaaatcagtttataaaaatacaaacaacatatccaaacattcaaagtacatatatacctcaagattgtaaaattaccattgctgagtgagttcttgaactcaacccacccaattaaagtataacagccttaaaatcataaaattaaaacttaaacaaccttaaattaaacctaagagcaagctctgaacctaccaaaacctataaatccaaattcacccaaatttcccaaaaaaactcaactcaaaactatagaaaccataagaacaaagggtaaaacttacctcaggataggacaacttctaaggtgaaggaattgacaagaaaatgatgaaaatgatattgagtttgtgttggttctgttgggtttcgttgagccaaaaatgaaaagagagagaaagagatttttgtgtgataattctatttgatcttatctcactaagataactaagataataacattaaattattgaggaaattaaaatcttatttccttcagccttgggtttacaagaaaaatcgaataaaataaaagaataaaactaagtgaagttattattttatccttaattcaacacttatgtaactttataacttaggagtattttggtcaaagctatctagcccaaataacccgataactcaagcatactaaaacattttggtacaatccaaaactcattctattgttgtcgtgacatctttggccaataaacccagtttccacagtcatcgaacccgaaaatattttatttcaaaaatagtatatacaatacccatatattttaataaaatctct

SEQ ID NO: 387265 - DNA, 1709 bp, Cannabis indica
agagatatatgatctggttatatattatgaaactgaagaaacattacatatatatatataaaggcgcaatatcttagatcgaggcatttattaataaatttcttgctctttgggtttatacagtactgattgtgatatggacaaggctgggggacttagactttgattacataaaaattgaattttgaaattcttgaaagagaaattaattaagactccgtcttcaaaaccttctgattacttttactttgggggggttaattatatattattagttaataatctttatcatcatataatataatatttttacgtataccccactttttgtgtgggtatatatatgttataatagtaacaggttctttgaataatgccaaatttcaaacgcgtaactagaagctcagttacgtatatgcaattatgcatccttgacgggctcgggcttcgatcctctttgaccaattcttttgaacatatatatattgtgtatgttttggtcaggaaatttcagttaccatattttccacaaccaagaaatacgactccgtaataagtatatagtatatacatgtacttgatgagaataagtaaaacagtattctaaaacttgacccaactctaattaataatatggactaccaaataatggctattaataattctacttacattacatgcatgcatgggtcggtgattttcttcgtcatcaaagtatttacgctcgaacttacgtttaggtgaagatgtttttgtttaattgtcaaaaatagtcaataattaacatgctgaatttctatataatactatcatgtacggtacgggtacgctcctagctattaatgatttgtcggccacatataccgcgcatttatatataaaatatatatattctcctgtacttactacttagtatataagcatatacgtacgtatataactttgaccacgagcattagatacaaaaattgcataattatgtgaagaatttaataacaaattagttgccttgtttttaatttaataacttgatatttgcaagtggactaaaaaaagttaaaaagagtaaaagtaatttgtggtataaaatttaagtttaaattttagttataataaaatttaatttttaacgataataatacataaattatatttttaaaacattcgtaattatctgactgttaattgtcaaatcaatatatattcacatgtcattttttattagtacatataaataattttttaaattaaaaattaaaaattaaatgacatgaaccaattggagactatcatctctatattaatttgacacttaaagtcaagtacttaaaaaaattacagaaatataatttaagtataattattatcattaaaattaaagttaaatatttacttaaataacgtaacttctaactattaaagagagatccctaggtcgtctctaatctctaaacgagaacaagaacaagaaaaatattccttaaaattaagattttctttctttcacaacaatttttttttaataaaaataaactttcatacataaaattgactagacctcgtggttattacaaaagagttcttatgatctcaatatccaagcaaccatactagttaatgttattacaactaatatcattgcagactttcactatgtatcacatttttgttattttttttttgacgcggtgatccaaatcacacatgat

SEQ ID NO: 387266 - DNA, 1186 bp, Cannabis indica
aatttatatattttaatttttttggagcatatgttttgtgaaaatgtgtaaataaggactagatccttttggtcaaaataattcaatgaggttaatttattttaattaagaagaacttaacagtttctcaataaaataaaaaatcattcaagaaacttaagatctaaacatgtaagaaaatacctttgagaaaaaagcatgtaagaaaatatatattgttttgattttgtgatagttagctttataattttgtttcattcttatgaaaaaaattatttaatcatatattttaatattcataacttatttgtttacagcattattatattttagcatattttaaaaatgaatattgctattcatttttcaagagaagtctcgaagttgaattagtgaggtgaaatcttacaagtggtaattataattaaattaaaatatatagaacttgatattgaattgcattagtaatgatataaaaacatcactactacaaaaagatccatttgcgtcaatcagcacatcagtttacccgaaaaaccgactcaattggttacctttaaaattttgcgtatgtttttaattgatgggattttataaccaacacaacaattttctctctctctctctatatatatatatatatatatctatctctctctctacaatgaaccagttttaaggggtagaccgatgcaaatctatcttgttactttcagcatccataagaatttcttaatctatttttttttcatagtcatacatatccttttaaagaatgcattgtacgtataaaaaagtatttattcattatcatcatgtttaagataataccttgatatggagacgtggacggttaataatcttatggtggtaggagaacgggcttgggatttagaggtggtttcagatatattcaatgatcgagataaagagatcatcattcgaactaacattgatcaggagactcctattgatacttggtattggcataaggatctttatggattctatactgtgagggaggcatatcggttgctgcaccattcagagatcactaatactagtgagtctgagattaagatatggaaaattgcatggaagcttcaggtccctcccaaagtgcaccactcatgtggcgtgcgttatcctggttgtttggctactaaggttcaacttaccaccaaac

SEQ ID NO: 387267 - DNA, 2175 bp, Cannabis indica
agagtgtaatttcctcatgaaaagtttgcctttcttcttgttcctaaaaattttcatgcttaaaattttattaataatctaaaaactttcatttcaaattcaaaattcaatagactataaacttttgaatttcaatcacaatctagttaaaataattaatatgtaatctacatcaagtaatagaaacaccccaaactttttatatatccacttcatgcaaatagaactattataagaacttcttacatatatatttttattcttctgttcataaactcatcaaatctcaaattcttgtcacactaatttaaaccatacaagtatttttttttaattattattttttttttttgaaaataagcgtattcattctatttaataagtcgagttagacctcgcggtcattacatggaaggtcctccagaactgacgagaccggaatagaaccatacaacttgtaaataaaagcctagttaaccacattatggaccgcaaaattacaagttgtactaacatacatgaaattacaacaaataaaagaggggatgacttagaacaaaaggagacatagttttcaagcgtccaatgtgactccgtcccattaagagcattgataactattctcgagtcactctccaccaaaacatacttatatcctaactcttgagccaacgaaacagccaaacaacaggtcgttgcttctccatataacacatctgagaagtccaaccgagccgtatgaatccgaaccactctacccagatggctccttactaccaccgctatgcacatgctttctaagcccaccataacatcacaatttatttttatccaatcctgaggtggtggcctctaggtccccctcaaagttggtgtagggcaaggcaagaaaacatcatgaagctctgcataagaagtacaaatctggtcaatacatttcaaaatatccggaggaaagttattatgtataaaatcatttcgcatcctccagttggtttcaacaacaatcgaagcatacagaaagacttcttctactcggatacccctattagtgagattccatataaatttgacccaatcccaaactcaaatcttagtattacagataggatagatgccccatggtaaaatcgttcgccataaatgcaatgccacatcacaggacaggaatagatgttccatggattcctccccttatccacacaaaggacaacacgtgtcctcaatgtggaatcttcttccaatcatggatctaatagggagtgcgttagagaggatgcaccaccagaggatcttatgtctttccaaaattttgctattccataacttattccagagcgccggagcaacctcacgatgagaagctctttccaaagcttgagacaggttcacacccatctatcttctccttgacatgaggatttaccacctttaacgattgcagacgccgtttccttgtcaaaaagggcatttagctttaggacatcccaatctccactagcaagaaagatgtcagccacgcagttatcattggttaaaacactgccatttggtttcgggacaaaacttttataatgaggaatccagggatccctccaaatactagtcgcccttccatttgccaccgtactttacaagcccctttccttagaattactttggctttcacaatatttttccagaaccagaaatccaagtctttgtagctacagctgagaaaatccttcccttttagatacttgacttccaaacgctttggcaacacacgctttgtttccactctcaatgtattatatatgtattaattaattaaatttgaaattcattcaagatattgttattttattgataaaatttgaggtctaagttactaaatatatatatatatatatgacattatatttagtatcatataagcattaataaaatataaggtactcaattaatccacacccttaattatgcatcttgtttttacaattttaagattagttttggtcttttctcttacaacttattatacaagcacatacttgcattagcatattatatatttcaaatcttgatttaaaaagagagacttgcattaacatatgatatagtttcaaatcttgatttagaaaagaaatagcttggttggagaaattcaaattatacattttggttattttaaac

SEQ ID NO: 387268 - DNA, 570 bp, Cannabis indica
gtaagtgtatggaattgtcttcttttgactacagaatcatattggtctcatatcatattacccaagttgttgacctatttcgtacaaaaccctatcacaccttttctttttttacctctacttgtccattaggtacaacttaaagctgtaaaattggccactttaactgtaaaattccatgttagttcacatattttagatttgcaatattcaattttgtttatataaaaatcaaaataggattttattatttgtatgtaagtggttttatatgacttagtataataacaactaattattaattaagtgttttcttgtatgataactctcataaaactaacttggtgagtgtatattttgtcacatttgagacaaaggaagtattcagaaagcttttgcttttgagattaatctcaattggtgtataacatcaagtgtgcttattcatttggttagttttttgagctttgagttaaggaaaaacttgatttgtattaaaattgggaaaaagttaaatagtaaaagaggtttatatagtggtcatagatataatttagtaatttaacattt

SEQ ID NO: 387269 - DNA, 762 bp, Cannabis indica
tttttaacacctagcttcagttagctaatttgtacataattaattattatgtttatgtattactattactattagtattacttggtgatgaaatagagagcagacattatgattcagtggaattaatcaaacatgtgtctccatacattgttgttgacttgattgttacttgatcacttacctaagaataagtcaataattaaatcaaggaggccaaaacatctaaacattataaaaatatggcctacattaaacttaaaaagggcccagttattcaaattatcatggaatgggctcggctcagcccaaatcagcttgaaaatttgacattgggcttttcagcttttatcaacttggaccatttaatcatttatgggccatataaatgaaaatatcatttttcttttgcgataattagattaagtactatttttttttacatttttatttttacttttacgatgcaaataacatcacaacaacaaaaaaataatatatacataacaaaaaacaacaaaagaaatataaaaaaccgtattttctataaataaaattataaaaatttgtatgtatttttataattattttattgtttttgtgtagcggtttcttcataatgcaatattatcctattatattattacaaatgttttttaatacaaaattgcaatagaagaaaagccatatttttgtttaataaaaataaaacttttatgttttggctgtaaatttgattattatggtgatagttagttagtacta

SEQ ID NO: 387270 - DNA, 957 bp, Cannabis indica
agatttgtgagtagaatgaggagttggctgattataattcaacaagtggtcaagctcagcctgagttcttgcaatttggagtttaagggatggttgtgaagctttccagctcttaatgtggaaagggaagtggattgttgttaagaaaatgttgtaaaggggaaagagaggaagaggaaggaaggcaccaagagtcacggaccaaagttgaaaaagatgggtcattgataagaaaattctcaagatgaaagcgggagtgcttttgatgcgtagaagaagtgtcttctaattggagtttcagggctctatggtcaaatccataaaaccccaagtgagtgagagaggcatgagggaaaagccttttccaagaagaggaaattgtggaccagtcaaggcgctcaaggattgagccatgacgccaagtgaacttttttccagaatgaggaagaggggtcatgttacgaatatgcagaaaattatgaaaatggtgcatggcatgggagggaggggaggaggtggaattacgatcattaagggataaataatcgttaaagtcaccaattactaaccaaggtaaaaggggagtagtgtcatataagcgattaagaagggtccaagtaaaaacttttgaatcaatataaggagaaccataataaccagtaaaatgccagtttatatcattagaattatttatataacagtccacatgattgagagagtaagagacaacagtaacatcaatacagttgttccaaaaaagcaaaagaccccccctaaaccttgcctaggaacctctaaaacattatcaaaatgaagcttgtacttcaaagaaagtccacgaccggcaggcaacttcgtctccataacaaaaagcagagttggctgatgctgcttgaccaacagggagaggtgacggaacgctcgagaactccccaaacctcgagcgttccagctgca

SEQ ID NO: 387271 - DNA, 801 bp, Cannabis indica
caaaacaagcttggagacttattactcaaattgactttcatcttgccaagctattgaaatatcgatactttccccttagctctttcccttgaggctaatcttagacactccccttccttaacatgacaagggatacatggggtaaagaattgctctcatcaggtttgtgatggaaaattggcgaaggttgccgagttaaatgtggtgttgactttggatttcaagacactgcacttttcaaccagtcttctattcgggttctttggatggagttgtttcaaaccttataactgatgatagacaatggcatgtggcgctcctcaaccaatagttctcttcgctagatgttgatcgtattttgacaatacctctaggtttctttaggtacaatgatacacttgtctgacatcaccactcatctggtatctactcggttcaaatgggttatcattatgcagcgtctcttgaagatattgacaacaactcaagctcatcttcggcaaatcagtgtggaagttcttttggtcactccagctaccacaaaaaatcaaaatttttgtctggcgtacttacaatgatgcactccctgttgctactattttggtcagaagaaaaatcattacaaatgctacttgttctatttgcaactaggggtgagcaacagtcgatttggtcgggttcttacacacaaaacatcaagaatttaattttcaattttcatggttataatttgaaaacttaccgactatcatataaatgtaataaaaatcgattattttaatccacgatttggtcagttta

SEQ ID NO: 387272 - DNA, 6044 bp, Cannabis indica
tgatttcaactcatagaaccttattcaaggattaagaaaaacttcaagggaggaaaaaggaaaaacaaaaattggactaaacttgtgttaagtacaacgtcccatacttaggaggagtttaaccactgaaagaataccacaattggggtagcatccaactcaaagagggttttcttcaatcaattagaaaatctcttctcgatacagtgtctagctttgtaatatctcagaaaataatagtatttaataagacatattttattcaatatgtaattattttggtaatgaagtaagattatgatcttacttaggttaattaatgtggatatagtaaatgattaaataaagcgtcatttattaattacaaagattttattggattatgtgggtatcgtggatatcatttttgaaataaaatgttttcgggcctgggaattgtgggagctcagtggaatggtcaaaaatgtaacgacaataaagtatggattgaattggaaattatatcaggctagtttggagtgttaggttgtttgcttggcagattaattagaattaccaaaatacccctagtgtaacaccctaatgctaaggcacgctatagcaatttttcaagtacagtgctatctttgctaatcaaagaactttctcgaaaagtgtgttaaattaaagtttttatactaaatattaaactttataaactttacaaaatcattaaatagtaccatgatcccgtttctaaactttttgcaaaatacacaaaatacataacccaagtcgcacaacgactacaaaataacaaccccaaatgtgcagagaccgaacactccaggttacgtcgccataacatgtacaacctcatcccagttcagactcactcctgttcagctttcgcctttcctttaccgacacatgaaagtagaactgtgagttgacagactcagtaagaaaagaatataacatgtcatataataccgacttgtatctaggtgcccatacacctatttacaaggcttaaccaatgagtaggaacgttccatactaagatacaaccactgtaccacatccactatgtacctcattgtacgagtgttggtagggtttttttcgtacccagagtaccacttagtgatataccacacacaccctgtactttcccgtacatgttttggtatcaccgtaatgtactctttaacaatatacactataccaatgcactatgtaccataaccgtacaagtgttggtaatataacaaacatataagcatgcatatacacttaacatatacatacatttgcatattcatgttacacattatacacagttcttgccttctttcaagattcaagtgagttggccgacctgaacggaaagtctcgtgctagatggatgccctaatgacataacacaaccgggtaaatcacatgctaaaaccctaattcgaaaaacccaaacctacaactcaaggttctgttattatcactagggactacattaacctaggaaacaggaaaacacccaactaaggcattgaagtaggtaggaattgagaaaatgagttgttcagggaatctgtcaaaagcggttaatcagttttagaggatgtagaaaatcaattaactggtttgcaccaagtttccccaaacaacctccaacttgctcaaaacttatccaaatgccaccaaacctttcagagtacttaaacagggcatacacaagatattccaaccaaactgaattaaaatatgccactaaagacctaagtttgggtttcaaagctcaaacttgtgcaattcatcaccatacatcaaaactaacatccagagcttaaaatcaacataaataaagctcacacttcaaactaaacacaaatcaaaccctaacagtccctaaaactcaaaattacaaattcaaaccaacactaaagcttgaaaagctaagaacaattgacttaggaattacctcaacttgaattccacttgaattccttgcagaaaataccaaagatcagcagcaaacccccttacttttggctggttcgaagagagagagaagggaaagagatgttgttcttgaatttttgctttttcttttgatttttctctaaatgaaaaagaatttactaaattaatccttgactgaaatattagttgttaggtgtcaagttcctaggcagccaccaaatcgctcatttggctaattactaaaatgccctttctcatataacttaggcatttttcaaggcatggggtaaaatggtcaaagtccataccccgctcaacccccagtactctatttcctccaatatacatcccactaagaaataaggttctaatctcacccatataatcaaactagccatccatcgcatttttcgttgtcgaccgagcaaaaaattataaaaaatcacataattcacatataatacaaataaaactcctagtgtttaataaaatctcctaaattgataagtcataactctactgtccatttctaaccatggaacccacaaataatttaaattcacagataataataaaaatgccaataattagtactaattgcctttactaatccatttatgaaatgcactcattacacctagatttaacatagtttaagttttgtcaagaagggtaaaatggtcatttttcttgcgttagtttattttgccttttagtgtttaataagtctagaattttttatttaatattagtatatggttgaataatgttggttattatctttaatattttaaattaagaaatataataaaaaaacggatgttttactcctctccttgtcgagcaacctaagagctaacaaaaacaaggaattcttcatcaattctctgtggtttctagcagatttttttccattcatattttatctggaagcattaaggtaagtccgtgtgaaataagaattttcaagttttaaagctaattttagggttagggtttaaaatttcagggttgtttggagtagattaggttttgagtttgtttttaagtttaatttagggttgtttagatcctagttggtgtgttgtgtggttgattgggtttggagttaacaattttgattttagaatcaagttttgattctagccttatgaagttgtgaatttgatgaattttgattaattgatgtttgggataagttgtatttgtaatattatactgttctggagatgttggacgggtttggaaaatatttggttcgaatttggggatgaaaacccaaggttttctggtctgccagaactagttgaccagtttgttcttgtgcaccagaaacggtcgaccggttgccctgcagggggaattcccaagttttcttcgagttctattttggcttggggtgttacctagtatctgattaggttatctggtaggggtaaccgcaagcttactgggctcggggttggttgtgagggcgagaatcgtccaccaccaccaaactgggaagaattatatgccgcgatgcaggagaccattcgacaacaaggtgatcaaatccaagaactgagggaacagcgagctcagcctgctccaatccccaatcctaatcctctggcacctctggttgtgcaataggaagttgggaattgtctggagctagtgtattagcagttcaagaagcagactctgccaatgcttgagggtggtgctgatccactcaaggcggaacagtggatgagtacgataacatccatttttcatttcatgcgggtcaaggataatgatcgagtcagatgtgccatctatatgctgcgtgaggatgccgacatctagtcggagattgtgtctcagggtcatgacctcaataacatgacctgggatgcttttcagacattgttttacaagaagtattatagtaagtctatccgagcaacaaaagcagaataatttatacaattaactcacggccgtatgatggtgacagagtatgccactaagtttgatcgattggcaaaatttgcttcggatgaagtggcttctaaagctgctagaaaggctaagtttattcggtgtttggatgaccatattgcacgggatgtgattgttgctgctaaacaacttgggattacttaaacatatgcaaagatagttgagtcggcccttgctactgaaggtacagaagctccgatacgaaagaagaatagtgcaagacgagatttatgggaacaaacatctagtactagtaggggtaattaatcttgtgaccgtaagaagagctccaatgattcattggctgcaggaccaaacaatagattccaaagtaaccaaggttttcgccgtggtgtaaacaaaaacatgtggacttttccagaatgtccaaggtgtaagaggcgccaccagggcgagtgtgaggctagggcctgctttcagcgtggggcagtgggtcacttgaagaggaattgcccatagccggtgtgaccagaacaaaagaaagatgatgcacctattcctgctcgggttttaccctaatccaggccgaggctgatgttagcccttcactgtaacaagtcagctttctgttgttggtactttcttgattgttttgattgattttgatgcgatacatttttatatttcaagtagagtaattgaaaacttgagtagacctaatgatatgctttcaagaggtttcgataccttattgcctactagagatctggttatctccagcagatgggtttggtctcttctagtatttgtggaaggaaggcagctgtcaattgatttgatagagttaaatctggaagattttgatgtcattttgggtatggattggctggaaaaatacaacacaaccattgattgtaaaagaaagatggtaacttttcaacctaagggtgaggacccctttgtatttctgggtagagtgcatggatcccgaattcccctaatctcagcgcttaaatcaagagatcttttatgtgtggggtgctcccagtttcttagcaagtgtaatggatactaccaaggaaccaccagagggaccagagcatgttccagtggtttgagaatttctgcatgtttttctagagaagctactaggtttaccaccgaagcgggaaattgatttaataccaggggcagagcctgtatcaagagctccttataggatggcacttgcagagctaaaagagttgaaagttcagttacaggggatgttggatttaaaatttactagaccttatacctcaccttggggtgcgccgattttgttcgtggaaaagaaggacggaactttacgaatgtgtatagattaccgagagttaaacaaattgacaatgaagaacaactatcctttgccaaggataaatgatttgtttgaccagttgcagggaaagactgtcttcactaagattgatcttcaatctggctatcacgagttgaggattggggaagaggatattcctaagacaacatttcattctcggtatggatactatgaatttctagtaatgtccttcagattatcaaatgcctcggtagcattcatggatttgatgaactgagtgttcaaagactttctggatgattttgttattgtctttattggcaatattgtaatttattctgacacagaagagacccacaaaagacatcttcggatggtgttgtaatgcctcagggagcataagttgtatgccaagttcaagaaatgcaaattctggttgcctcaggtgagtttcttggggcatgtggtgaatgaagatggcatttcggtggatccggtgacgattgaggcagtgagggactggcctcaacctaagtcagaaactgaggttagaagtttcctaggattagtaaggtattagttgaggggtttgctaagatttctacgcccttaacagaatctcgaaagaactgcaagtttgtttggactgataagtgtattaatagtttctaggaactgaagcaaagattaattaccgctcctgtgctaactttaccggtcagcgatgaaaactttgttggaaattattttaacctggatctctatctctccttctttagtgttgaaactcctt

SEQ ID NO: 387273 - DNA, 770 bp, Cannabis indica
ggccacaggaaaaaaaaattttgagctcttatgttaaaaaaaatgtggtatttttgaaaatcagtaaaaaaatatataattttaaaaagggaaaaaaaaatttttgggtatgaaatgacaatattgtccttgggagtgtgtatgcatgttttttggccctaggggtaaaatggtcatttgacctttatttttctaagtttgataaaattgaattttggaggaaaataaatgaattttctggttttccttccctctcacccgacccctctctctctcaaaaccctctcttgattttcaacctaaatttgtgagaaatagcttgagtttaaggttgattgtgggggaaaattgtgttggaagcttggtgctaacttgtgcaaggagttgaggtagatttatagttttttaactttggatccttgctgaattttatgattgtaaaagcatgaattagttgatatgttcttgttaatgcatgtgtgaaagaattgtgatggttttatgtgatttaagtgttaatttcttgatcttgttgtgagttttagttcttgagccctaggtggaatgattagggtattttcgtacttaatttcaggttttaaatttgatgtttgttgctagaaattatttgagaagcttgcctttgaagttcttagttatgagcttgggttttgttgatctctagctttttgagcaatctgaagttggggttaatattgaaattttgatgcatgattctgtgttttaaatccctagtgattgctagtaac

SEQ ID NO: 387274 - DNA, 1359 bp, Cannabis indica
tttcaattaaaatgtggtgtgacgaacgtttgggcttctatggaggacggaagacgaaggatgggcttccacggtgaacatttgggcttcaatagagaatcggacggggttgagggcggcgactcctttggacggatgagatggatttagagagagaaatagagggaggaggagggcggtagttcttttgggtgggttgatgagagagatgtagagagaggaataagtttttaggttttttatgcttttgaaacaaaataattagaaagggtttttttgggtataatgtggaattattaaaataaactagtataattttattgggggatatattttttatacaagcttgacacatctagattattatcactcagatcacagagcacttttggtcaaaataaattatgagatggaccagcaagaaggttccaaaaagcgaaaaagattcagatttgagaatcttttggttggtgacgaagaatgtaagagtctattaaagaattgttagaaatctgaggaaaatacaccactgatatcaactataaagaatatacaacaatgtgtttcaaacctggatacttggcatcagaataagtatggatctttatttagagaaattaaaaatgtacatacaaaagtagttcaagtgcacaatttgcaaagtaaaggttgttccagggaaggatctttgcaattggaaagtaaacttaacaatctattattaaaggaagaaggtcttctggaagcaaagggcaagggtccaatggttacaggctggtgatcagaacactaaatgttttcacaaaaaggaaaatgcacgaaagaagaataatacaatacgaggtatttattattacaatttaaatagagtgaagtatatataatatggctaagaaatttaatataaatgtaattggacgtagtataaatgcattttaattagcgtaaatagtagattgaatagtttaactagtgatttttcatgagtggtttaggaatagattgaggcaatgtgttttcaaattcaggtcttaatgtgactgtttatgtataatatttaggctaatatgtattttaatataggttgtattttaaaaggtattatgctttaacctaaatagataacaatggatgaatataactcacataaatgatttttatttacatatatgaaattgatataagttggaatatgagatggtagctcataattactttaaaaatcaattatgaggctaatcttgtattatattttaggtttattaaatgaagacaatataagatgtacaagtaacgatgctagaggtgatatgacaaaaaaataccatactgaactctttacgtctatgatgcccacaa

SEQ ID NO: 387275 - DNA, 688 bp, Cannabis indica
ttttctctctttactcaattacttaggcataatggtttagatattttgctttgtcacaagaggtcaagacaccatgctactaaagtcgactctgagatttggtggatcttaggaaaataaaaattattggaccttttattcaaaaaaatatgtaatatttttaaaaattacatattttgaaagagaaaatattttttttttgtccttaggctgagtgggctctaagcgcgggcctagtccgccttaactcaggcctaaacccataacttttgtacatttgtctatgaacatatttatatgagtgtatttgttccctaaagaactattggtctctcaaatggtagttgggttaggatattttgccccctccctttttttttatttctaaaaactcctcgtgaactatattaagttagaaattataaataaaattaaaaatatttttcatgctatatattataatttaatcatcaattgtaacgtacagaaaaatacacttaatatttaaatttaatttaattgaatgaagaggaggtctatgactacaacctaggttgtgcacccaataaaaatagggaaatttacaaaaatactgaaattttggttaacttttacaaaaatactgtcacacggaaattttttcaaaaatactgtgttttataaaacaccagtaaaacacaaagcaata

SEQ ID NO: 387276 - DNA, 742 bp, Cannabis indica
atatatatataaaaatataaatacataggttgcttactcgaagtagctgaagataaggtgagaacataagaaaatattatgatagttatcatcatcaaggccttgtgcttcatcatcatcattctgtgatctcagtttagaaagaaagagctatatatatatattgttgagggagatagagagaagcaaaagaagtaaaatctaaagtcaagtgatgtttggtttggttgggtatgcatagaaaatacacatataaatgtatgcaatgtaagggtgtaaagtcaattgtaaagagagtttatcttcatagttgaatttgacgttgaatgtgagtgggtgggtttgttccgattccactttgaatatattacattctttcttcccacgtgtcacttttacatcctcctcttttgtgcaaatatctcactaatatttattgtataattgcagtgtgactgagtaccattcattatcacgtgcaattttaatggcgccaaccattttaggataactctcttttgtttgttatataattttttttagcaatgctagtaactagaagtgcctagcatcttctcgacatgtcacgttgcgattgactagcaatacttcttaaaagttattacattaaattatgtggaacccgatacttagttagactaatagcgatactgacacataagaggatactagacaccactggtgccctttaacatttctcttttttttttttttagagaaa

SEQ ID NO: 387277 - DNA, 1358 bp, Cannabis indica
gagaggccaggggctagctgggagaaaacatgatcatgtaactatttaattttcgtaatgattaaatgatttattacaaatatgacaagtatttgttttgtgaatgtggtccaattccagtatataagaaaaaaaaaattgtgaaacaagacaataaaaatgatagatatgataggtagtacgtatatatatatgatcagtagatctgtgattaagaaatgaatagaaataaactctatttctgacaaaaactcatgaaaagagaatggccaaggctaaggtttacttacatcaaagcaaaggacaaaaaaatgggtacgtataggggcccggacatgcatggcacgagtagaacctcaaatttaaggtccatgttttcaatatagtttagggcatgcatggttaaaaaaaaaaaaattatatatgtatataatatatagctagcaatagggttaacagatgtccacgtaatatctgggtattaatgatgaaaatgagatcctcctctcctataccaaccatgcaccccactccatttaataatatctataattacatgtcacttctcagtactctctttctcctccttcaaattaattaaagatgtaacaagtcatcctttatccagaatcagctttctcggctaattttctagctaatctcaattctcaaatgggacctcagaagacttaattgtgtatccttcataactctccaactccaaaagaaatggaccaacttaaatattattatatcaaaattaataatagctaaaattttccattaatccttcaacctcagagcacatttcataactactatatataaatgtgtatattatgtgtaagccggcatcatgtgctatcatcaagttcaaacttttttttatattatataatatactacatacccaaattatctaagtgatcattattagtcgcacaatttcaggacaagtggtatatataaagaaaaagagaacgattttaaggaaaagttgaatgtcataaataaacaattatgatcttccatagtgaagaaaaggtactgtcctgaaagaacaagagtacaacattaattaactatgacaaaaagtaatcttattttaagtttcagagttttaactcaagagcagcgtttatccggccaaaatattaaacctaatagctcaaagtagaattttacataatcaatagcaaagtttcacaataaattttttacttttagttacaataaaacttgtaactaaaaataaaaaaattgtgattaattataaatcataattcttatattgtgactaaaatgtccgtgattaaaagtattagtcaaaaaaattacaatttgttgtgactaaatgt

SEQ ID NO: 387278 - DNA, 1266 bp, Cannabis indica
attatattatttcatataattttcgttatttaaagaaactaaatgatggtttaatttaaaaaaaaaaaaaaaaaactaaataatgacttttttaacaaattaaataatatcttaaacattacaaaaatttattttaagtaacaatatactatcttattgtttcttttacattatttttgtttctagcactatttcagttactttcaaaaacctattcaagaatttaataaggtacagtaaaaaataagtatttaccatatatctcttattagtaaagttattaaatataataatttttataatataattaattttataatatttaaaatactatttagttactttataagttttttttttaagaaatatattaaaatagatattaagcaaacttattctaaatatattatttggtaacttttaaatataaaatataaaaattatagagtaatttataatgttggtttttatattgaattttaatatactatgtgcttttcttatataaaaaataagattctagtagcttttattaatccacaaaatttgttgctatattaaattttgtttcagtttgattgttagctaagtagaaaatatattttagaaatttatctacattggctcatagcagtaacttttaaatattaaataaaaaaataattaacaaaattagttggtatattttattttgtttaaatttaaatttttgtatttttttttggttaattaaaaaaaaaaaaacaaaatggttacctttgatttagattattttttttaggtaacggtaaggtaaagaaatatatatttttcacacatcaaaataataatattgaagagtagtaatacaattctgatggccaaacaattaccagtatagttgaaaagtatttttaaaattatttttctaataaaaaaatatctaaaactattaaaagaaaaaaaatttataaaaatataaatatttgataaatgtcccatcaggaaaagaattattataaggaaaataaaatgtagcaagtatatgagttagataaaaacaaggaataatagatagatattcaaagaaaaaaaaatagtttattatcgtaataatacaagagaaagaggagaaaaacaaaataatatatgtagattgtaaagcaaaataggctgatacgtatacaattatccaaacaaaattaaaaaacttaacggtatatgctataattaaataagcagtgttaattgtgatatttatttcaaaattaagtcactaagtgtaaa

SEQ ID NO: 387279 - DNA, 1137 bp, Cannabis indica
ggccatgtgacagttatgaaataggatttagaaccctgctgcccagcagagaactagttatctccaaaagattgattatgtttatgccaattagaattacggatagataattgagtgttgatcttgtagaattggctatagtatagctcaatattatgctatgaatagtctttttttatctaaatacgccactagtattgattgtaagcgcaatatggtaatttttcaacctgagggtgaagaactgttcatatttgtgggatcaatttggggtttttaaattcctataatctcagtgttaaaggatagagacctattgtaggagggatgcataaggtttctagaagtattgttagataccacccgatccgagtaaattcaacctaaggatatcaaagtggtacaagatttatagatgtgttcccagacaaacttccaaggttgtcgtcgcaacgagaaatagattttgtcattgacataacacttggagcggacccagtttctaaggtatcccatagaatggctcccactaaactcaaagaattaaagtttcaagtttaggggatgctttatttatattagacccagggtgtcacccttgggagcttcagtgttgttcgttaagaagaaagatggatcgctttgcttgtgttttgactaccgagagctgaaaaagttaatgatttagagcaagtaccctctacctaggatcgatgatttgttcaatgagctttagggaaagtgttaaatgccaaaatattacatatttcatagtataaaaatacaaagttaattaaattttaaataatattttcatgaaattaaagttatatatttttatattgaaaatattttatttaagattagttttatctttgtttataaatactaattaatatttatggcataattgagaaaaagaaataaaagataaaaaaaaatgtattatttttattaaaagaattacaaattaattagattttaaaataaatattttcatctcatatattttgtttgagaatattttgtttggatttaattttgtttgtgtttgattgagaaaatagcatttctaaaaagaaagaaagaaataaaaaaaaaggatgataaaattgtggcccaaacaagagaaaagtg

SEQ ID NO: 387280 - DNA, 947 bp, Cannabis indica
gctttggtttccaatcgtatgggacatgtcttattctcgagtggggcgtcttgcgcgggatttttaattggaacctcacgttgccaaagccaaagctctgctctatgggctttcttgatgcatgcagatggggtatacggtgattactgcattctctgattgtcagcgggtagttcttgctgtcaatagcaaggtcccttatctcaacgagtttggtattgttctcaatgatattaatcatgttaggaattctttcagtagcatatccctgtcgcattgtaattggtcaaaaaaccatgttgctcattctttagcaaaacgagcattaagtttagatgaggttcaggtgcggtggccgggcttgcccgctgatttagctgtttaaattgcctatcttctgtatctcgatcttttggtttgatgccttttaatggaatttctcagtttccttttcaaaaaaataaatttcataactcatgtggatgacatattgatcatttgaaacaatgtcaagaagacatcagatataaatgaatgactaagcactcaatttgaactatatgatttgggtgaagttagctatgttatcggtatccaaattgttagagactgaaaaacagatcacttgttttctcgtaagcaatttacgttgaaaaagtgctagagctcttctctattaaaaactccaaatgggctcattttctttctagacatggagtgcgcctatctaaggagcaagttcctactattccagaagagatagaagaaatatattttttttattttcctctcatccaaataagatttaacatattttcttacaaaaattactctaatggtggacaatttcaaaagctgctcactatgatctcacataccactttttaattaaattttataatatatattctcaaaaaattagttggtgatagagtaacttttttttt

SEQ ID NO: 387281 - DNA, 1686 bp, Cannabis indica
agatatctctattcaatattaataaattaagcaatatgattctctttaaatgaaactcattgaattagtaaaatctctcaatcttaaacttttcctatggcatgcaattctatgtccaattttagattacttgtctcaagtgtaaagcctaaaatttttatactaattaataatgatcaagcattaacaagatgataattaacacataattacataaacaaaaaaataagaacaaatatagaaataatctaaaaactttaattcataatcgaaaatagttccatcaacactctagaaaaagtgtttagttcatattcacaaacataataactacaataattatgtttataattaaataactaaacaaaagaataaagaagaagaagaaaatgactttaatgatgatagtagatgatgattgcttcaaatattttccctcttgctcttcaatgtatttctaatctcaagattgcttgtttgtatctctcctatcgtctaaaaagtagaattacttcattctttatataggccccaaaaagatagaaataatccatttagaattaggattcaaattcaaaaatacacgtacgacggtatagcgctaaagatacggcgctatagcgccatacatgacttctcgatatcacccatgtgctaaaattatcttttctcttcgttttatctcttttttttactacttcgaccttgctcagtaaattatacataaatttcacgttcagactctaaatgggataatttaacatattttaaaaagttgtgaacattctctatcattttagatttcataagatttttgagaaaatgatgaaaatattgtcaaaaattagctcaaagatctcagtccatcacaaaattgtcttttaagcacaaacctacacactcagagaaaatacttcaaattatacaaaactgtaagaaaacaatattaattcatctaataaatgtgcactcatcacatccccaaactcaaactattgcttgtcctcaagcgatgaaaaagaaaaaaactaacaagtcaattattggatgacaaaataagaagcttagaccaaaggtaatttatctcaaattaccaatatgtctttcaattattcaacatgcacttcaaacaaaggactagaattttaacttatttaaacttaacttccaatattgtattttttattaaaaatatgtatatgtcaattctactaactctatatacatgtaatctatgtgcataaagattttccttaccacaaaacattcaagataagcataggattatataaccaattcatctccactaatgtaaactaaagtcatgtagatcaaaaggactataggcatgtaacgttagacttaggtaaatggtggataataatgtcatttaggctagtgtttcacaccataaatctacaaatctaatcagaaatataaaatcttcattataaatttcattttctcccaaaaatattttttttatttgatacctccttgttcacacaagtaaagttataatcctatcaaatttatatcttgttattatttttttttctcaatatgattttttttctttaaagctgttttttaataacaagagaacttttcaatgtaattgtaaagtccttttggcaagttagttgacaaaataattttttcatttatggtaagattgttgagcat

SEQ ID NO: 387282 - DNA, 884 bp, Cannabis indica
gtatggttttgaacaagggtaacacccaagttagaggctaaggcaaccgctttagaattgtcgatcttacaacccacacacatctcagttttctcaaagttgatacattgaccggacaatttctcatatgttgccagcacctctttcagagtagaactttcctccacagttgcatcaaggaaaacaaggttgtcatctgcaaagaggaggtgagacaatctttgttccaaatcaccaaaccgtaacccatggattttcctagctctttcggcttcaaatatcaaacaagaaaggccttcagaacataaaagaaataggaaaggagataatggatcaccttggcgaagtcctcgttcgggaataaaaaatcctttgattgagccgttgatgaggatggagaaggaaaccgagctaacacagttcattattttagcaatccacctatgatcataacccaaggatatcatcattgcttctaagaaattctattcaactctctcatacgccttggacatatctaacttgactgccatttttttcccattcccgaagcgacctttcctcatacaatgaagactttcaaatccaataattgcattgtcttggataattctaccaccaataaaggcactttgatttgttgaaattacggtactcaagctttgtttcattcggtttgcaagacactttgaaaccaccttataaatcacattgcataggctgatcggacgaaattctgacatttttgttggcttagggactttcgaaataagacatatcagagtttcatttaaaggcttgcaatcggcattattatttaaaatgtcaaggcaggcagaaataacctccgtacccacaatatcccagcttttatggaagaaaag

SEQ ID NO: 387283 - DNA, 1088 bp, Cannabis indica
aaaaaaaaaaggtgatatttactaacaaatatctattttgaaacctattaaaaaattattttaagaaatattacctcaataattaaaaatttggggaaaatataaaaaagaaacattttaacccataataacctttgagataaaatgcaattagttctttattataataaatacacatatttaatttttatatggaatatcaatagcctcataattactattaataatattaaatgcacacattaaatttatattgataacataatctcacatttttttttgtagagtgatacaaattcatacatttagaaacaaaggaattgcggcaaaattcttaatacttttattttacttgtactgaatctccaatactcaatttttgacggtaaaaccttcaatactcgtgttctgttagaaatttaatatttctatccatttcaagtgttaagtactatgtgtgattgtccacgtgtatatctacatggacacaatgtacacatgacacaatttaattagtccatgtaaaaaattattaaaaaaacttaaaacaaaattaatttgaaatttaaaaaattgtaaattataaaaaaaacaatttttttattctctattctctattctctataaaaaaacaattataaaaaataaaataaaataaaaattaaaaattaatacaccaaattgaaaccctaattttctattctctattctctattctctattctttttgtattaatttacagtgtagttatatagttggaggtaattaaaatgccttaattactataagaattatatataattacatgtgtaataattacaaaatccattacattttaaatattaattattaaagaatatgtacaatttttcgtaatctaattttttttgaaacattttttgtaatctattttaccaaatataacaatatcaattattaatatgtaattttctatttacatccaagtacaacttttttttttttgacaaagtgattagaattactcatgaatttacgacgcccacgtccgccaccggcgctggaacctcctcgaaccaggatagctcatcgtctaaccgcagagcat

SEQ ID NO: 387284 - DNA, 1872 bp, Cannabis indica
aaatactaaaaaatatcaatctatatataaaagatctatatatctttatatattaaaattggctatgtaacaacaatttttggtttaacgttttgctatttttattttgttaattttaacagaatctaacccctccgttaacttgtgccattcaatttaaaatgcactgtagattcctctttcttctccctcaaactcaaaatcaaaaccattttatgcgatattcttaatcctcatttattgcgattcttttttattttttccaaaactcatattgttgttgcgattttttttctcttccaaaccaatattgcgaacaaaaaattcagtcatcttcttctaaccctaccaatagctgcaaaggagggaatgccggtgaaaaccagagtcgatgatccctctaaagattgacccttatcaacaatttcaagagattttgccatttctagaaattggtaagtttttttcacttccttttaccattaatattttctctgagttgaacttagcaatcctttattttatgagtaccctagaaaattctcactttcagataataattgaaacttaatttgcaaaattctaattcagattgaattgagaaatgtcagccaaacaataaagaagagatcagttaccaactacaaattcattccctctttgcagaaccctatggtacatatatataagcaatttttcatgtttgtggtttctttttggtagatatggctgagaatcattaaatccatatctcctaatgtgccaatcttcttttactccttcttcattaagctttgatctctttcgatgatggggtcttctttttcacatctggtttaagtactaagaatgaagatggatacgatttgaaatcttctaatggatacgacttagtatccttgaagtaatgttctaatgttggcatgtgtttcctatatactgattatcctaactttatatatgttaatactggatttttcaaacggtttgttcttcagagaggtcaatgaccacttcagctggtgccttctctctggacggggtctcaccgcctttggatttcttggccggaggggacaagctcgagcttccccccactctcttctttaaagcctcaatcattttctaagacatttctggatgaaataaaaataacatagtcagaaaaaagcataagaaatatgaaggcaagataatcaagaaggttaaatgcaagatggagtgccctgcacgctggcaagagtattttcccgaacaagcacggatggggcatcgtcatccgacgaatcttcctgctcctccaggacggctttcccctttccttctacaagggtggatggctgagcaggtagaccaggctctttaatctggattgtatgttcgatgggcctttgcctggtcgggagggattgtacgcgagctgtgcctgctgtagagggatgtgcgagatggggaggcgtgacagggggagtgagttgtgcctgctgtagagggacgtgtgagacagatggagaggtgtgataggaaggagaggtgtgtgggggctcgcatgcgagcccatgggggctcacacgcaagccgtgtgtgctggagggggccgtgctagtcacaagtggggagtgtgtctgaggggtagtgacgagccgtgagtacactttggagggatgcaagtgtagggaaggaagtgagggcatatggataagggtgaagttgagtaagaactctgagcacacggcatgtggaagaaggcatatacccacgccttctgaaaccgtgaataaagggagtacaagtagcggcgacaacggacctacatggtgtgaggacctgaccaaaggtatgttgggttttttgccctaaataaaactcatt

SEQ ID NO: 387285 - DNA, 1058 bp, Cannabis indica
tttttttttaaaaaaaattgcagtgctgtctgtagttcttccttaaaataatttcacacaactaaaatataaagttaagcttaaaagggatgtgaaggatgctactcaaaatctatgaaaggatgttactcttcaaatgaattgcaagcaatgattgtctatctcagtttgcgatgggcactcaacaaggtttaattcaagtgcacactatttaattttgaaacgaatattcttgtgaattctatcaattgtgtacttgtgttatgtgtatcatctagtgtgtttgtaactcattctctgatttgatagatgataagagtgttacctatagcttttgggttagatgaagattattgtacttaattggaggatgttacttttctcatttttctcatttgatgtaatgaatattatattatatattattaataatagtaatatattttttaaagaaaaactcccatcagaaaatacccatatgagtggcatttgatcaatgataaataaaaaatgtcatattttacttacctatcacatattttaattcaattaataatttaattttttttaaccactcgtaatatgtagtactcaaagttaatatacatttccattaaaaaaaagtttatatactgaaaaattaaatttatccaaaaactaatttgaatgattctaagtttaaaacttaagtattaaaattgaatgtaaatcaagaacacaaaaagtttacaagtttaccctcatattggaaacaaattctaactaagtattgattggggtcccttaaacactacaagaaatgtcacttttgccagcacatttttgtgctggcaaaagttagtattgtgctggtaaaatagaatttacctatgatgtgttggtaaaaaagggttggcaaatcaatgttggtattagaacttttgccagcataaaataaaaagcgctgacaaaaaagacttttcctagcgcgtaaatgtgctggtaaaagttagattttagccactacaaatgtacgctggtaaaactttgatctctttgccagcgcagtttgtaaaatg

SEQ ID NO: 387286 - DNA, 1701 bp, Cannabis indica
cattcatcttcaccgttctaactacctcaaactgagtctcgccctgataaattgcatgaaacattcggttgagagacaagttgccaaggatccatgggaggaggcaaagtcatcaatggttcttgttgtgtagttgtaggtgcatcatcttaaggtggtacattctctgggaaatactttgaattcttgtaagctttaacttgctcaggggtaatcatggctcctactctaatgggaacatcagcattcctaggagtaacaccaaattttttagccaactgagtgatgagcacaccatgagccataaaaccagtatgtcccccttaaactgagtctcgtcctgataagatgcccaacatatcgcatcatctaatcaggtgaacctgtacctatgcccggtactcacattcatagtatcgtcacattgtcattgcctaatcagacaattgacatttacagaacttgtcatgccatgtggtatattatacttttattacctcaagttccggttcaagtatgttggccgacctgcatggataatgatagatgaaatcgggccctatgtcataacaataataaaccaataagtgtttatcctaaaatactacttaacaattacaaatgacaacttagggtttcttacaaaatcctgtaggataaatagactaaaataaaacttatattttggctctaaaatatacaccataacatagagcttgttgcaagcttcgaaacagtatatagaaagtctaaaacagacacccgaatgaaaagttacggtaaaaatatgatccccaaatttttgagactacctaaaaatggtacatcggttgaggaacgattaattgcctccacaagaatcgattgaccagttaacaacctcttgactagtttggtaggggtaaaaactctcaattctcaatttacacactcatcaaaacgcaaccgaaacctgtccaaaccactctaaacatcatagggcacacaaatacgatacaaaaaaccattcttacgtaatcgaaactaaatcgagctcttaattggtaaacgccactaatgttcaaacttcagctataaaaagttccaaactcaatttctaacttgaaatcacttcagattcaacaagaaacatcaaaactagtcccatgactactcgagaataattcaataaggtcagaacctccttgactattctaattcatgaaacccctatataaaaactaattgtttttatcttaaaatgaaattaaactaaaccttaagctttccttctatcccactactaccgcagcttagatggctaggttttaggttgaaaattaaaaaaaaaatagatagagagagagaagaaaaaaaaattcgtcaaaggaggatgagggttttgttctgttttattcttctggttgtatatattaaacttatctgaatgaaaaattttaatataaaatttttaataataataacaataataatgaatataatattaataatattaatataaattataatataatattaataaaaattttattatttataattgctaagttaaatttctcatactcttaattactccatatctacattatcaacttatcaaaatattcccatttattttatcaattaaacccgttaggacatttctcaaatcgccaaacctgaaaaatatttttagtccacatatagttcatattacattca

SEQ ID NO: 387287 - DNA, 1924 bp, Cannabis indica
gtttttattgaattttgttcattaattgaattgtatttttattagttaggaaaaaagtgtgccaatcaaaatttgataatgatgagaaactggttaatgtcattaacaaaagataaaaaaaaaaacccagttttcaaatcacttggcaagaaaaaagagtgagactcctgttgatgcgtctgtgccttttgctccctttgtaatttttcttatcaaatgaaactggtttctttatttatgatttttcttgttttaggttttttgtttatagtattatttttcataatttatttttattttgtgaaatctttttgttcatctttatcttttattgtttaactttttttattaggctatttttatgttctttgaaattagtttctttaatctatattgtttatttttaagtttttttttttttgtgtaactagtttttaaatattttgttttctatgtaattttatacttttttgttgggattcttttttcctcgtaggaatattatttcagagttgatgttaagaagagatttgtagggaaacctcaactttacaatccttatagtgtcatcaaagatctaaatgaaaaacttttagatgtacaaaaggagttgtttcggaagtttccttttggtcactttattgatgtcagtaatttcaattatcaaatacagtctattcatcttgttcttttgcgtcaaattcacactgaaaggaatgatgttgaggtgtggtttacattaggaaacaaggctattagatttggtattgaatagttttcattaataactggtttggattgtaagaaatcttatgatcctgatcttttcaaatcgaagaagttacttggtttcaaggaggagatcttttctatgcatggaactactgaaaaggtaatcgtgagggatgttgccagtattttctttagcggtgtattgaaagatgatgaagatatggtgaagatatctcttgtatacttcttttttggttatttatatagttattcccaaggcaagaagattaacaattttatttttgctatggtttatggggatgattatattaaagtgttgaataggtttggatggggaaagttattgtgggagaagacattatatcacctcaagattgcattgaaggatggtaatggtatttttgaacaacttgctaagaaaagaaagattgagaagggtcataagcttaaagaatatcctattgcgttcttaatatggctgtacgagatcattccatctttgtcaccttgattttgtaaaagaattggtaacaagattcctcatgttttgaattgggagcataaccctacctcggaattcagtgagttgattcagaaggtgtttaacaatccgaaggtaattatttttctcaaattttattttttgtttattgtttgttatatttttttttttgattttttaaattgtatctttaatattatcttctcagtttattgttaaagattttgttgctttgtatggtgagaagtctcaaagtctcttcgagaatttttaagtttgatccccaatacattcctaagaggattgatgattttttgtattctgatgaggttaatgataaggtgaagatattgaaaaccagtttcttatgttaaaattattttattttgtatttttttaattctaattttatcattatttatttacatatatttttttgtctaatatttagttcccaatgaaaaattggctagatttgcgtagaagtgaattctatcaaagagtgtcaaaacaaattatagacggaatttttagtttgaggcttaagtttttcggtgagtgttaggttataattagcctatgtctcaggtctttaaagttagcattatctcgtctattgctgtcttttggagcagttttacgcttgattttcattatttcaggttcccg

SEQ ID NO: 387288 - DNA, 982 bp, Cannabis indica
ctttaaaaaaaataaatataaattttttaatttaataattataaactaaaatagtgaaaagcttctataaaattagataaatttaataagagtaattataatgtagctaaaaatataattttatgataaataaattctcacaaaataaaaattctaaattctaagtacgagtataatatatcgatgcatcttttgagaatgtaaatttaataatcgtatttgtttgtttaacatcagcttgctttttctaagcattgcattgtttttggtttttgtttttaatttatttgatattttaagtttgttatccaattttttttgaggtaacactactctatgtcatttataaattatttatgcatacaatcaaagtagattaaaacttactttgatgaatattttttcatgttttttgatgtattaaaatcatattgttagtaatgaagagtttattttcaaaataaataaataaataaataaagtaataaactaaataaatttaatagtttattaaaagataattggcggcgaaatttcttatattttaatttgtgtacacttagccttgttattttttttagcaaaacctttttaaatttacttttctttatgaaattgaggtgctaattaaatattactgctaaatactaattagatgatcaatgtgtatacttatgtatatgacagttaacctctaagcctatacaatcagtgacgaagccagaaacttggttgagtgagggcttgaataaatattaagtcaaaactaataaaaataactgataaatatatcatttcaaattttcatcttcaacaaaataaaataaaacattatcaatagtattattttatttttaaaaaagtgttatttttttattatttgtattgtgctacttttaaaatgggcttgattagaatgagagtaaactcatgaatcatgattaagatattgagtgagtgcttttgtgaattgggctttaat

SEQ ID NO: 387289 - DNA, 2902 bp, Cannabis indica
atatcagtagaaagaggtacgagttttgtcgaatattcctttaacaacgacattgatgaggggctttgtcgaataggcaggaatcgaatcattctttgctagaataaggagaaatgattataaataataaatagcccacgtgcatgtagactactaattacatcactcgctgaggcaagaggcaagtctcaagtctcattttacaaaattgcaaaaataagacttcgggggtaaatgttgtccctcttttggcccattatacgtggaaaccccatggatcgccatgtggcaagtgagtcttaagatcaggaagtacttatgataaatcctaagtaaacttatctttatcagatggatgtgtccgagaggtcccttcgggtgcttcatctgtattcagatgcgaagatattttattcttctccaagagctaggcaatctctagggccggtcactaggtcccagacatggcttatataggtgcattaaatgcaacatgggagaagcatctgcgtatgggtttgaaaagacatgtcagacgcattaaacctattttttgacaattacactctaatcgatgagattattgatggctacataatgaactgtcacgtcaatcaaagaaggttaatggtttgtcttacccaacacctagcaaaactctatgtaacctactgtgcaaacatatataccctattattcgaacctaagaacttgtgcaagccatggtttaacacttgcaacaatagagacctattggctcccttcataaagctataaataccctaaccatattctggaaaaggggtcaaaaaaatagtgtaaaaaaactactatattaaataggagtgactcgtggactaaggcttattaatgcacgcactaaccacgtaaaaattattcgcattaaatctcttctaactattaaaacaactctcattaatcagttgtcgaaaatctcagtcaacaatactaataatattttaaaaaaccaataagaaaaattaaggtaatataataagaattaaaagattattcaatttttattaaaaaataattacaaaattgctaacaatcatgatttatatgttacttatttagaaaaactatcaacaactatttaaatataaaattttaaccctaaaaatgtagggattatttcataaatatacaaaagtgacaaaaatatttacatatttttggatttctttttacaataatacaaagtgttgtttttctattgtttttgaaataatattattttgacgttgctgctacaaataaacattgtgatttttttacaacaatatggagtgtaatttttccgtactttcagaacaacattattttcatatcgccactataggaaagcaatattttttttgaaaaacaaaaagacaattgaaaacctataaaaaacagagcctttaaaaaatgtaaataaaagaaaaaaaattgtaaaaatataaaagaaaaaaaaatctattttttagtgtactgtgtaaatttttcaaaattattcattattaaaataattgtaaattaaattttatctttcaattattataataaccgtgcgaggtataaaattaatttataagaaaaatatattgaattagttaaataatatttaaagttgtaaatatattatttataatgattataaaagtacattttacattatttaaaagtatgtcattattttttgagaaaaatacataacacagtatataggtgaaggaataacctccaaccaaaagtatgtcattattaatattcgactcactaaaaaaaattatttttaatctatttttttaaacataaaataagaaaaagtgaatatttatttaattactataaatatataaatatcttgttgtattatcaattatgttgttattctattttatatatatcttatataatttaaaaaattaaagagttattgaaaataattaaagaatattatattttaaattccattcacaatttactgaatattttaatttgttctttagtcaaattataatttaggctaatttagacttttacttttaaatttagatatgtactaaattatgctctctaaacttttcaggtcgttaaaattctccagaactattaagattgttggatttaagaacttttgtctaattttactaaagaaaatctgaatcggatgaaaatttaagggccacaatttgatatatattaaagtttaggagacataatttagtaaatatcaaagttcaggggacaatttaatatatggacaatcatcacattatcaaaattgaataaaatttgataaaagtccttaaatttaataatttcaatagtttaaaggaatttttaggggctgagtagttggtgatttgaaaattgtgcttttaaaatttgtgattctgaaatgaaaatttgaattttgtgattcaaaacatgtttctgaaaatatgattagtttagtatttgtaatctattttaaaattttaaaatattaaatatgtgattggtacagaatttaaaaatataacaataccagaatgtatttttgatttaattgaattttaaactgctttaattttaaacaaatagtatatgatattcaatctaaaaaagaaacgtaatttcaagagcagtcgtttgagagtagtttggttcggctcatcgacgtcctccgtttcagatttttgttttcatttattaatttactattcttagtttaattccaattaatgtttttatggggttaaaattataaggagttcattccttaattaattttaatgttgtgatcgtgtttatgtgttgaaactaatttagtttttctattagtcttgtcttttgacatggttcttttagtcttgtcttttgacatgattttttagtctttttcttttagttt

SEQ ID NO: 387290 - DNA, 786 bp, Cannabis indica
ttaagaataaatttaatgagatttattttttatttattgcttttacagctatattttagtttgtaattctataatatatatttatatatacaagtatctatactatttaatatagctgtgttgttgggatagcaattggtgggaaaaacgattaaatatttaataaagaatcaataataatttttttccttgaagaccattgtaaaattttgaccttcaattttttttttgttgcagaatttctcccaattatataaatcataacaaatatttacttttagttacattttgcttatgtagtcatgagtaataagtatagttgtagtacgatgttctatttaataattttaacctatttaaaatctaatttattaacattaaatatatatattagctctaagaaggatatacatatttttaattattcaatatcatactgctatttacatatagttttttgcctagactcttaaacttgaactgggccaaattaacgccacgttagtactacattaataaattatttaaggaataaattagtagaatgtgattgcaaggtgttattttcaaccaattttataggggctatttacaaaaatatgggtaaaaaagataaattttgatatatatgacatagaaacttaattatactaaatatgacatttttttttttaaaaaaaaacttaaaatatgagaaaaaaatcattttataaagagaaatgtcataaaaaactttaaaattgtgtttccttttatttatttttcttttttaaaaaataaaatact

SEQ ID NO: 387291 - DNA, 638 bp, Cannabis indica
gagaaagagaaagagagagaaagtggacgacagtggagtttttttttcttttctaacttttttaagttttaaccttttttttcaactcgacccgattgactcgggtctctttttattaataaagaagcccttaaagtttgtagatatttgcagtttgatactttactgttaagtccttgaagtttgcgtatattgttagtttggtccttgggctaactccgttatgtggcctgacaaaaaacgacgccgttaaatgcacttccttttttattattattttttttgaaaaggtaacacatgaaaaagtagtcttgctcgaccataataataagataatatttttaattaaaaattaaaataacttactttatttttatttttattttattaattaaaagaactataaataaaagataagtatgttttttaataatggtaaattaattaaattttaaccttttgagttttgattaccttttcaagttatacaaacacactaaaataattttaatttttttccaaacagtttaataaataatagggtaaataccatttttggatcttctgttttacaaaaattaccaattggaccttgtgttttgttaaatgacaaaatggaccctgtgttttgttaaatg

SEQ ID NO: 387292 - DNA, 560 bp, Cannabis indica
aacaagaaaagaacaccttacaaatcaaagcttgaaaaaatagtaatagcaacagaaagaagtttgagagagagggagatagcttgaccaagagggaaataaactcggagtgtgtctctttctccctagaccgcgacatagaaagttgagtagaggttttacatgacatcgaggggttggggacaagagggttgaagacgagagaggttggatgcaagaagtaaaggtggagatggttaccgcttgaggtggatctgtgtgaataggaggaggaagaagaagaaatagtgttagccgtataattttaattatcaaactttataatagtattaaagaaaaatctaaaatgtaaaaatgtaaaaagaatagagggcaagtataaatgttgaatattggtaaaaagagtcacttagtgtaaaaatccctagattttttcaagaattattgacacacattttatttttggccaaaatattgtgacgcaatccaagcaagtttactcacataaaagtgaagtaagacatgtagggtgtgtaaataaatatttataatgagaaatt

SEQ ID NO: 387293 - DNA, 780 bp, Cannabis indica
cagcaagtgaaggttgaacaccaaaggtctgcaggtttgttgcagctactaaatcttccagaatggaaatgggaagatattgctatggccttcacacaccttttccagtgtaatgttaatgtcaaatatcattgtcttacttgttgcagaattgaatatccagttgaaaccctccacaacccaaacaccatcatatagtataggcacaaatacagttaaatctgtccaaaaaattacaaacaacaagtaaacaatatcgcacaataatcacacaagaaagtaatgatatcgcataatatcgcacaaaaaacacaacaagtaaaaatccacccaaatattgcacaaaaatgacccataaaatgcacaaaatcgcaatagcatcgttcaaatgtcgcatggattcatccctaacctctaactttagatagaatcccaaaaaaattgacaattattgtttaaacgtcgctaaaaaatggaaaacacagaagaaaaaaaatacagaaaacatatcatagtctactttcaaatcaggacacaaagtggacaaaatacaaccaagaatgtacagatccatataacttacactaaatataacaaaaaccaacaacatgttccatataaagtacttattcattgattttgtgtgagaaaaatgaatgtggaggttggttgagtgtgtgggaggttcggcttgaggtcagaggtcgtggtggagaaataaacgtttggcctgaggtctgaggtcgtggctgaggtgagagagagagagagagttagttt

SEQ ID NO: 387294 - DNA, 1474 bp, Cannabis indica
attaatacaagataaagagcaaccatcaaaaaacgaaaaggtgttattacaaaacgaaacatagttcagaagcatccaacaagaaccctttccagaaagagtgttgataaccaccttagagtcgctcttcaccataacaaacttgtggccattagctttcgccacttccaaagctaaacagcaagcagccgcttctgcaatcaaagcataagcaaaatgtaaaagttttgttctaacccaaaccacctcaccaagttagttccttgctaccacatcaatacacatgctctccgaaccaactctgacatcacaattcagtttgagccaatcctggagtgagggcgccaaacatcaaccaccaatgaggagggagaggtaaagatggaggcacaataatctatagaagatgagcgaatggaatccatgcaatgaattacattattcggcctattattgtgtaccttatcattgcatacccgccaaatggtatcagcaatagtggaggcatagaggaacaccttgtcagtattaatattaatgtcttatttttttaactcccaaatgaatttcacccagtcccacatacgaataccagaaccgacaatgggaaaaataccccatggagtagacctccatagatgaatatccaagttgcaagagagaaatagatgttctaaggattcttcttcaaccttgcaaatagggcacatcttatcctcaatatggaatttcttattgagaactgcttgcaccggaagggcattagacatgatacaccaccacaagaccttatggcattctagaattttactattccaaagcttgttccagagagagagggcgacctcacacataaaggatctttgtaaagcttggattaattaggcagacttgcaggagaagtgcccactttttttccttagaccaaatccacttatctttaccgtgacctgtaggttggccaccttttaaaatggcagacatagtctctatgtcaaaaagaccgtgcaatttctaaacatcccaaccactactttctgacaacagatcaacaacttttgaaacccttgaagccccagggttattagaagttgggataaaattattcccatggactacccaaggatcttcccatatagaagtatctctcctgttagccaccaatttacacgcacttttccttaaaatggaggaagctttcaccacatttttccaaaaccacgaatctgacttttggactcacaatgaagaaagattcttcctttaagatattttgcttctatgatacagcaacatagagattggataccagtcaataagttccaaccccatttggctaggaaagccagattcatctctctagttttttgaaaattgaggccccctagatttgggaagtcacaatttatcccaaacttttaagtggatcccatgattacctttatcaaacccctattgggaattattttaccag

SEQ ID NO: 387295 - DNA, 1031 bp, Cannabis indica
tgaattgtttgatgtttggggcactgactttatggagccattccctccatcttttggcaatctttacatattggtggacgtagactatgtgtccaaattggtggaggcaatagctagtccaaccaatgatgccaatgtggtgagggaatttttgcataaaaatgctttcataagactcgggacgctgagagaattgattagtgatgaagggacatactttgtgaacaaactctttgctgcccttttagccaactatagcgtgaagcacaaaatagccatagcttatcacccacagaccaacgggcaagctgaaatttccaatagagaaatcaagggaattcttgaaaaagttgtgaatcctagcagaaaagattggttacagcggttagatgactcactttgggcataccgtacatcatttaaaactcctctaagcatgtctccttatcgcctaggttatgggaaagcatgtcattttcccgtggagttggaacacaaggaatttcgggcattaaacaacctgaattttgatctttcagttgcaggagaggcacagaatttgcaactaaatgagctagatgagctgtgattgtttgcctaagaaaatgcaaagttttacaaggaaaaggtgaagaggtggcatgatagtagaatcaaataaagagtttttgtgaaaaatcagcaagtgttgttgtttaactgaagattgaagctatttctgggaaagcttaagtcttgttggttgggtccatttacagtgacgaaagtgtatccttacggggctattgtggtcaaagatgaaaaattaagaagagaattcaaggtcaatggacaacgattgcagcattatttgggggaagaggtcaatccagaaaagacctctatctccttgaaggatgcttgatgttggtaatttgtgggtcccaaaagaaaagaataaaaaagaatagaaaagaaaaaaaagagaaagaaaaaaaatactaagaaaaaaaataaaaatatatatattataattagtttaaataaatgtc

SEQ ID NO: 387296 - DNA, 1898 bp, Cannabis indica
tatactgttgcgataaaatacatcacattaatgtcaagatcaagtaaacttaatcccaccttgctccaataactcaatcaatcaagaagaaagaaacacaaaatagaacataaatgaatgtattgtattgaatatatatctcaactcggatattacaacttggatatccaagaatctaggaacacaaagtaactcaaacaatcaacttcttaacgttctagtgctccacattaactgaaaacttagacactgggacacacttatatacattttgaactaattgacttgtaactaacaaaactatcatcagttttgagcttggcaagtgatcgatcataacaccacaaaatcctccacaatcttgagcttgtgccactgggatgtatcaacaaggtgttgattaatgaatttgttaaagactgaggtctcatccatgacccttatgtttagtaacactaaccaatatctgaatttggctaataaataaataaaaaaatattaggagcggaattattagtggggcgcaccttcttcctctaataactactataaaaagggtcacccatgaccattaaagatatgtcattaaatgagtatttttcatgtccaatgataggacttgttaagatactttatcacattcagttttgctccacatgaaatgtgataaattttcttctttatttaaactcgatattaataatctctatttttataaataatcaatattataaatttggtttggagtattaatattaatgttatttatttacatatttttaacttcaaattttatattatcatttgatgaaatatatattaaagtctatctttaaattacacacataaaaatgattgaaaaaggaaattatgtgagaatattttgtagaaattatataaaattaataacacgtaaaaataaacaattcttaagtctatattacactcttatagattattgtaaacatttctagagaaccaaacacaggaaaccctaaaatacattatcaaaaaaataaaattgaactatttaaacattactgagttccaaatagctagagcctccaccgctccattaatttcttacatcttggcaaataagaagattaaatttattaataaaatatagaaaaaaaaatatatgtaatgtatccaattcactacaagaaaattggcctatcccaatatgaggtatagttcctttaaatgaaaagatttcttatcattcctgaaaagttgtggactcatggatgcagctcgtggaaggctttcctgctcttccgagaaaggtgtctaggaaagcaagccctcctccggaaaggagttctggatggttagatgctcttcctagaaggtacttctggatagtcgactttagctagctctttcctatccatgaaggaccttcagcaagtgcctggaccgtgactctggaagccctcatacttgctctaggatgcactcctacttacgctaacatggaaacctcgctcaaaggagagttggttaagttatttatcgcctaattaacttaacaactttgattcttgcaaccaccgactttaggatcttgatcctaaggcctataaattttaccaacacttatcatttgaagataatgatcagattgagattgagagttagagagagaaaatatttagaggtacagagaaaggagagagattgggttttggttttttgagaagaataatctatagacgaagaaggttcttgggtaagagtgtgagagttaaaacattttgagagtcgatcacgactgtattgtacctatactttctcaatcagtaaaaatgatttggtggtaagccataaactagagtagccatagatcacatcaatctatcaaacttgaataaatatatatcttggtgttgatt

SEQ ID NO: 387297 - DNA, 959 bp, Cannabis indica
tagtgtccagtgacaaagttttggtctgacaacggcataggaacagcagtaggaagtcagagatttttgaatttttttgaatatgttggttaggttgaaaattgcaaagtggtgaaagtaacccagcaaaggaaaggtgctggcttttataggccagaaggggtgcgaggcagctatgatcagacaccatcgtacggtgagaatttgtagcgattcgaattctgtgatccaacggatggggtgaataggcgtaaagaggagaaagcacggttgaaacatttgagtatctccctgacaccagcattaatgcaaaggtctatcaatagacgggaagcgaatcgttgcctgcaaaaggaagtaaaaatcaatgatgatgatgatcataaatgtgacccacgcgccagtgccatgtgccactatatttattaaggatcggaggccacatacaagtctcatttatctgttactaaataagacttgggggtaaatgttacctcggatttttcccaaaatacgtggctgcggcagcatatgacacgtggacaaaaagggcacctcaccggagaattagctgagttgtatgcagacggacaagtgtagttcggggagtgagcccccggagaagtacgtaaagcatgtccttcctctccgggagctagatatataataaagcatctccaggagaaggaaaatatattcgaacagtcacctcacatttaatgcaacatgagaaaagcgtctaggaacacccataagaggatgtgtcagacaacgtaagcctcgtttacgacgattacacgctaatcaaagaggctagtgatgactccattataaagaatcacatcaatcaaggaaggacaaagattaatctcacctaatccctacgatacctacgacataggttatgcatgccctattttgtatctcttaggaacttgtgctcatacattactggcact

SEQ ID NO: 387298 - DNA, 614 bp, Cannabis indica
cattcgttattttttggtaaaacttaaaaagccctatattataatgtattttccttttgttgttgattaacaacaaacaatgtattttcctaagtaagagtgcatccgggagcgagtatgagggctttcggagtcacggtcaaaggcactcgctaaaggacattcctagataggaaagagccagctggaattgactgtccgggactaccttcttgaaaaaacaactagtcatccaaggctccttttcggagaggactatagctttctaaagacccttcttagaaggataagaaagccttccaagaccagcttctgcgagtccacaattttccaggaataataagactcttgaagatcttttcatttaaaggaattataccacaatatatatattaattttataataaaaataataattatttattactatttttttttataataatgatgactatttttgtcttttgattcttatatttttatatatttttagcaggtaaaaaacttttataagtgtgtttattggatttttttttttgattatataatttagtaatttaaccgtgacaattatttcccgtccaacccacaacgcggccccccctatattttat

SEQ ID NO: 387299 - DNA, 1025 bp, Cannabis indica
ccatatgccattaattccattttcatgtctcttaacttatggtgtacatcattatgattcactggatttgcgtattactggggattaaaagagtattcaataccacattgactgaccaagattttcaaagtatttctgaaaactacttacaccaataccattaattcccgttgtgcttcttgaggcaccatcatcgactagaaaattaataatggagttattttcttttctaggtactttaattgtttaaaactttcttttatttagaataaaccttttttagaaatgtcaaaattgatggttgacctgacctaatgcagaagaattgatctaatgtggctaccacatgcatattcctactaagagcatctctaatggagatgagatgcaataagtgatgcaaatgtaaaatatagttcactttgttaaaagtcgacttgctaaattatgatgcaaaaatctcacataattaaaagtgatccaaatttacatcacaatatagcacacgactgccctgcacgtgggtagaagatccccgacttgtatcataatcaagatttttgatgcaaaatttacatcacaataaatgttatgcttttatatttaccattattctattttaatattttattattaaattttaagtaatatacttctctatattaaatgacttgtattattatcaaagcattgctagtaggcaccaatagtgcctagcacccttctagacatgttgccttgcgattatctagcgatactccctaaaagttattacattaaactatatgagacacgataatagtgatattgacatgtaggagagtgctaggtaccattggtgccctttagcatttctcttattattattattattattattaaattttacatttaactttacattattattattattttatattttttaataaattattaagtgagcattaaataacatattaaattttgcagatttacaattatgcatcgaagcacaatagtaaaagttgatgtaaaaatattac

SEQ ID NO: 387300 - DNA, 759 bp, Cannabis indica
tttaataaatattatagagatttactaactaattataagaccacatagaaatcctaggcacttccaatggtaggcaacacaacactcataagtgacatctttttttataaaaattactctaatagtgagcaactttaaaaatttctcgttatgatcccacaaaccactttttaattaaattttataattatatcttctctaaaaaattgattggtgataaaataattttttaaaataaataatgctacatgatcattgcttattttaataatgttcataaaattagtttgaaatattgatcaaaatgcacatgtgccacaaataccactctatgggcaagtccatttgagatgctcaaacaatgctctaatctatattccattgtttttctttttcccaacttcctagtatataggagaagagttttttttgtcctttttttagagagaaagtataaagcaaaagagttaggaaattggttatataccattgaaaatatatttttcaaaaatatcactatataccatttttttggttagataataaaaagagaggaaattacactctatactctttttatgttgtcctattttatttttattctcttttttaaagtctattattttacctatttttttaaacattgaaccaattttgcccctgtcactttaagatactctctacgtgactctcttatgtcaggctatattgagtacaatacaaataaaaataggtatgtttcaattaaatataaaatta

SEQ ID NO: 387301 - DNA, 506 bp, Cannabis indica
ttaaaatccaacaatatcaatagttcaggggcatttttaacgaccttaaaagttcaagagacatgatttgatacatgtcaaagtacaaggaacaaaaatactaattagcctttattttttttttttaactattatactatttgggagtaaaattgaacttgaagacctcataagaaaacaacaaaagaaatagctatgatgtcatttacaattgccatgttaccataaagaatctgtcggccaaaatttgaaatctgaattggaaaacgaaaatttatagtaataggcgtttttatggtgcattcccaaaaagaagtgtttggaaactgcactggaagtagaagtgctctttttgtgtttttaatatttagatagttgtaatcttttttattatattgtggttgtttttgagaaaattaaattaattaacaatttagatagcacaacattttatttgatacatatatataaaattatttgaatattatttttttttgggtaaatac

SEQ ID NO: 387302 - DNA, 1275 bp, Cannabis indica
aacaaattgaggtatgtaacttagactattttaattaatggacatacataatgttcagtgcattttgttaggaataatcaaattgaatgaatgaaaattagaaattgattttaattttattctttttattctattgtattactattctcatttctatttttttgtgctcattcctattacaatttgaatcattaactagttttgttttacttctctttattcatacggtaaaatttttgcttacaaatactaaaattgaagttgatgcggtcaatgcaaacatgtacactgcgctggacattttagcacaatgtcagagaagcgagaaagactttaacattgtagaatctcttcgatcttatggagcttcacgaaccatagatcaacctgtacctatgaaaaggcctgtcattcgagatgccatagctagccatgagattcgtcatgatcatgttcataaaatacaaaaaattcaggaggacaacaataaagaaacaaaaaatccagaaaattggctagccagaaagagggaatcgttaatgattgtttcatcccttattgccactatggcttttcaagccggaataagtcctcaaggcggtctttgggaagatcacggcaccctcatatgaccagtcaatttctaaaaatgtgacccactctgcaggagagtcaataataagttattacccaagtaaatcatattatcatatttacttaattagtaacagggtgggtttcgttggatcattgagtataatcttattgctcgttacaggcttgcccttttgtcgcaaattcttgatgtggatcttaacaatgattttgtgggtgactatcagtgctatgaccattacataccttgttgctattcttgttgctgctccacacaatgatgtgctcactattccatataatgtgagcacgtgtttagtaataggttgggttggagttatgttagtgattttcattacttcatatgattcgtatcgcaataaattaaagttgtttaaatggttaaggagctaatcatcatgagaagaagatcaagaaaacaaaacaatagtaatgatgtggaaactacttcaatatgattatgtatatatatatatatacttgtttggaaatataagtgaaagtattgtttaaacaaaacaactttaagtattgtttctatagagtatttgaaaaataaattatataatgtatgatttatttaagtgtaattcttctttggttgattagaatttaagtgtaataaaagagttattacgg

SEQ ID NO: 387303 - DNA, 817 bp, Cannabis indica
aaagcacaagagaagaaaagagacacttttttttttggacaagactcattcttcaccattctaggcaaacacatttgtatcaaaccagatagtattacacctcaaaaacttcagaatatttctactaagcttcctcttcttcaagggaaacacggggaaaaaaggagtttcaatccattgtatctctacttgtaaaaactgttaccggccgatgtgcctaatgaaatagacttgtggattaagaatagttaacgcccaaacaacgtaataatctcttatttgttatttggttatttattccattttttctttcttaagctctaaaaatacccggttgccgaaaaaatcagtaaacattttgggactttcattgagagctgaagaaagaaagaaccatgcatggtggtcatcggcacaagcctataaaaaagaagggcccgtgcgaggaaagaaaaaggaaggtcgcctgattgccccccaagatctggccagaggtcaggagggtcttggtcaaaggtattctcaagactgaaggcctacaccctcgaccacctgaagaaggtacagtaaatgaacgcacatggtcttgaaacactccccgtattaactctcatccctaaaagctcagatctggccagccaacaccctggagagatgacagaccactggcatcctctgtttgattatgttttaccaggatctagatttacttttatgtatgttatttaacatcctaaatatgaatctctaaaataatgtaaataagcacatataaagtttcagaaaccttacagtgggtgcagcgaaatattaatgg

SEQ ID NO: 387304 - DNA, 599 bp, Cannabis indica
tattgatcaaattaagtggctattattgatcatatatatagttgataaaatggttgatagtttttatatggaaaaaaatatataaaaaaaaaaatgctgaaacatttaataacaatctatatagtaaattacttggaaattgcagtctttttgaatattcttactttagggttatgtttgctataagagaaaaagggaatggaaaagtttgaacacaaaagtgatgagaaaaagtgaaactataaatacatttatttggtaggaaatgaaagaaataacaatatgaactagtataaaagtaatataaataggaatttttaaaatattttttttatttataattttatagtctaaaattttagttatagaaatacacttataaaattttaaatttataaaaatacgaaaatagtaaaaaaaaaaaaaaaaaactaattaagaaaacgaagaatcaaccttacgactaaggttgggcatctgattcaatctaatttttttctcctcatctaattcaatccaattagtaattagattttgaaaatcatcatccgatccaatctaattagacctcaaaatctaatccaatccaatttaattac

SEQ ID NO: 387305 - DNA, 1298 bp, Cannabis indica
gaagtttccatgatgatgatgatgatcccaactagtaactgtacatacactaagtaaaaagaatcaataggatatgaagtgtttgaaggtctttagtttttggttttaggggtcctttatttttattttctgttttctttaactttccacatggaggggtttgtatggtggggttacctgcatgaatttccattatagtgttctgaattgcaattatgagtttcaaagttttgctcccagcttgtcgccctcatcgtcatcattattgtcatcaaacaacaaaagggtgcctatttctttcttcctttcttttttttttggaaacaagggtgcctatttctactcttatttttatttctactcgttgcattgttgtgggcaacagtagttcctagtacttatagatatgtcgccatacatttaattagcgatactttctaaaagttattatattaaactatatgagtctcaattaagatattaatacatataagggtgctaggaaccactggtatttttttagcattcctcttaaatatatcactaaaattttatttattcaaatttaattttatatttacacatgatcctctttcattttatttctataagctctttttttacttttagatttataaaagtcattttaaaggtgtttgaacaaaaaataaaaaagtttttttttttaatttaaaaatcattttataagaagttaggagttgtaattttttttttaaaaaaagacgaaactatttttaaaattaaaataatttacataattcttaatttacttataaaagaatttttttcaataatatttaaacagtttgaaaaataattttcattaataaaagacttaatatagtaattattcaaacattaaatctaagacaaaatttatatttatcatacttttaactataaacaaaaacaaaagtaaaagtttcgtcaaacaaaatatattcttatacaaaaataaaaattaaaataattgataaaataaatatatttataataataaatattattggaaaattctaccatgcatatcttaaaacggatgtaccgatatatctttatctattttagtatccgaaataattttttagtcaaattttttcttatggtcatataaattataattatttaagatatcttccaaaattttaagacattgggaaaagtttaacacgccaaaaattgcattcaaacagtgtgttacacgaatgactattttatattatacgcgtgtaaaatagactgtttgaacattatttttgtatattgtaaattattct

SEQ ID NO: 387306 - DNA, 447 bp, Cannabis indica
aaacttgaggctctaagaccaggagacaagaaactaagggaatcccccaaaaacccaagaagaccaatctggaaatataagggatgttccaatggatagagcaaatcaaccaaatcctgataatacaaaaaatcaagaacatcaacaagatgtcccgtgaacttcccatggatttacaaaccaagagaataaacgaacaggcatgccagaatcatctcgcatgaatgaagaggcaaggcagcctcgaccagggaataagggattttcttatgataattagcgaaaccctggaaaccaaccaaggtccagtttggtctttctccaagacatcctcaacgtccttctcgtgtggataaagaaaatatgcacacatacttaagtagaggatgtttgttaaatctctttcgaagaagaagaccaacacgagatgaagcaagctcaagcaca

SEQ ID NO: 387307 - DNA, 1509 bp, Cannabis indica
tatatatatatatatatccttagaccaaatatagctagcttatactatatatatgtgatgtctatcttcatgagataaactttactagttagtgtttatccattatacatttgtggataatattggatattatatacatatttcaacaagaaataattggttttaactttttatatgatggtatgaaagagacaaaagaagatggaataagcaatattacactaaaattatatataaaaacacgtgcataattatttgatataaagacttctaatatattaccaaatatatatataatattaatcttatagtgggagtggagagtggtgctcgagattgtggcaaggaattaagctaatttatttattattaattaaaattgtagtggaaaacaaattttaagtttatggttaagagcgtgccactagcttggtatatatgtaatattctagccaaaataaattaagttggaaacacgtaaacttcaaagacacatacatataaatatataattatatatatataagtaattagaggggtttaggatttggataacatatattgatttgcacgacccccttataagacaattaaggtttgttgtgtatatatatataaatactacttcttcccatgccctaagaagctatactagttttcttttaattttatatggagaaagtccatttatggagatcatcattggcctaggtttattaatttaaatccgttttaatttgactcgaatattatatatgtttccttataattaataataattaaacttaagagaatatagaaaaagaaaacagtatagtatatatttatatcaagaccaaaattaactatatctctgtacatataaaatatgtaatatatatatatatgtgtgtgtgttagaaataagtaaaagaagtgttatatacgtacgtacgtacacatgaagtagttattttttcttcatatcagaatatggagtagtgtagcattgcaagaaaggaagagataatctgcatcccaaggtctagaaaatattcattttattaacaaaatatatatatgttaatttgatggtctaaacctcaggatgcagattatccagtcctcactcaacattagaaatatatatcaaatcaatttgaggaaaaaagaagagaaaaaatgattattattattattatatttttcagtatataatatataagtataagcttcttgcatggtaaggaattgtaggttgagggcttatatatataatatggtaggaatattaattaatgggggaatatatatatatttatatatctatatatatagccaaataataaaatgatcatttatagcatataatggaggaataaataagacatgtatatacatatatatagcatattcaataaataataataaggttctctccaatgatattgttcttctcttagccaatcatatgtataatagggacatttctttaattaataagaagaattagatgatgatatgtatgtt

SEQ ID NO: 387308 - DNA, 1718 bp, Cannabis indica
gcccgaattgggtgtcaccaaaacatagccaattggggtattgtcaatacagattgccctgaaccaggggtgagggatcaccttatctctgatgtagtttatgccatcttctttgctggtgaaaggttcccaagtgcaaaaaataggcacctttttgtctgtggcccataccatgaaagcatctatgtcagaaagatccaaaggcctaagattgatggaagacatccttgagaaaccatcactaccttctgtacaagttccatgatctgagttgtaagcactttcctgcatatttttttgatttgagaaactaaaaaaagttgtgggaaattataagatttgttgagatctgtaaaatatgacgcacagaggtgaaagatattatagagtaaagaagttttatgatttctttgtatttatatgcacatagacaaataatagtcacatgatgttgcttggaaataatggttataggtataatataatagttttggactttaaatcatcctttcaatttacttggagtggaagcaaggagaatataatattctatccattatatatatatatatatcctatacaatatacatattttaacaatactttctccttgttattaatgtggccttagtaggcaaatagattagaaaacaaatagattatcattagattagattagtttggctctgttatgaccattggacattatagtcttcttcaagtctcatggacaaattttttagctattttagctaaaaaattaaaatagagtgatatttttattattttggctccatgcttaaaatatttaactattttaataatattttatatttaaatttgtcaaatataaattaattcaataaaataataaaaaataatagtgttttagattaaaatattactaaaaaaattagcaaaaaaagagagctccctatatttagagagctttatatctcttatgtattatacagagccatttatgtttgagaactcattcttttaaagctgactctctaagttagtattggacatcaaccaaaatacgtctgatttcactattaaaaaaaaaaagcaagagctcaatttcagattttgtttgtgctaaatatttttcgattattctccaaaaattggagagcactgccatctccatatggcactgggcgcataggctttattctacggggatcttatgtcattttgactttatacacaaatttaagcattttcatgcccaaatgagtaaagtccttgttagtttctttagcggattgaggtctctagggtgaaaatactcgcgcgagcccatgaaccttagtttgggcatacttgggtgtgtgagtcccgacaccaaatggttcgttaatgttttcgaattttctagaagtgccatagggccctcaagaaggatgccttaactcatttgacatttataagtcttgattacagttgaaaggttgattttttttttaaaaacaaaaatctgagtataacaaatgatcaaactaaaaagagttacaacaacaaaaaaataacaaaatattattattgtatatatatatatataagaaatttttacatgaaaaatccattttacataatttattacaaaattactcacacacgcttatacctacttttttacttactaaagtttgttttattacacatataccacttagtcatcatttcatccatcatcaatcaaatcctac

SEQ ID NO: 387309 - DNA, 1874 bp, Cannabis indica
accctcctcgacagagattaatctacaaatgactcaaggttccaaaatttatagactggcaacaagttccagtacctgtcgatgaggaggataaggattatgtgggtcagagccactatttgaggaacatctcaccttgggaagctaaagatgatgcctcctgaggtaataattttggtgcttgttgatggtcccccaccgttcttagggctgagagaacatcacttgttcaattcaaagatagccaatataacttttacatttggaacagtgtagatctcatttccgataggtttgatagttggtaccccaaacatcacgtccaattgagttgtaacagttcttattttggaattgctaatcaatatgtcactaattttgatagggccagctattcagattaggacatgtctccgcttaattctcttgatcttttcatgattactagctctagggacttttgtaattattattgctcttcttcctcgtttgatgattacggtaatattttgtactagaaatcacctgcatagaagagacaaggggagttgagcaacctgaaaaagctacaaggtacagacaaagctctggccaattatacccaagggtacttcccagataaactacattgtacaaggctaggtatcagcgaagtaccgtctcgagtatacctacttagacaaagggtgagtcttatgttgtgcattcgactataatagactcactaccaagtcttgtacaaagttcccaagggaaccacttatgagattacagtagtgtatgcctacaaggtcttcacaaaacccttgtcgaggttaaacgaggacagaaacttggctgcccacttggaaccttaggcatggccggccaggtcccatgacctagccaagggttggccagggaccctaagcccatgccttagctgaccagcttttgaggtaccccctatggtcggccagttcccatgagaaagactcatgtccaactaggtcttgaacaagactcctatagctggtcaaggtgtgtttcgaatctaaacgtgtgtttttaaagaactcaaacacattcttagtgttcttcctattcttcgtgactcaaagagtcaaaaatcacaattaaggtcaaaattagatctttttcattaagaaatcacacattatacatcctaagactatcatccagatcaaaataccaaaaatattacaatctaacttagggataaaataatattcaaagtgaagaaaagcttcataaaaccatggaaaaataaactaaaataagtgaataatgggatttgaaaggcttacccactactagaagtcattgatgaagaagatgggaagcttggatcgtcgaaatagcgcaaaaattctgagagttaaagcactatgggtgttggcctctagagagaagtaagagctttcaaaagttgtttttctagaaagagattagaaaagtggaaagtgaaaagtgatttccccccataagcttatatagcgttttgtggggacctcgttttttactttgccatgtagtgtgcaactaaaaagcgtgcagaatagtaatgcagttaacttactgacacagagtgtagatcagacagtacaagagcaaatatttctaaaggctacatatactgcaagattcacccagttaaggctacatcaagtcccaactaagctagaaagtccttatccgcacagatacctgaaaagagacttagaggcaaatgttgtcttaattttgtccaccttatattgcatgtctacgtggccaacatcagtaccacgttgcagtacaacttgccaacaacgaaggctaagccctctactcagcacttcaaccaacgaggggtttgagtactcaagcgggat

SEQ ID NO: 387310 - DNA, 1222 bp, Cannabis indica
caaaatgaaagacttgggaagagaaaataagatcttggggattgacattgtcagaaaaagactagaatatattatgctatctcagattggttaccttcagaaagtcctagaccatttcagcatggataaagctaaacaagtaaccactcccattgctcctcattttaaactcacaagctcaatcaccacaaactgaaatggtcaaaagatatatgaatagaataccatatgcatcacatgttgatagcctcacgtactcaatagtatgcacaagaccagatttggcctatgttatgagtgtggtgagtatgttcattgccaatcttgcaactgaacattgggctgcagtaaaatggattctcagatatgtaaagggaaccctggacattggattaaaatttcacaaagacaacatctcaccttgtgaattgacatgctatgtggattcagactatgcaagaagcatagacacaagaagaaacctcacaggactattttacagtgttgggtggatgtgtatgttggaacttgaacatacaaaaggttgttgcattgtctacaactgaggcagagtatatggcagccacaaaagccataaatgaaacagtatggctgaaaggatttacttaggaactgaaagttaatgcagtagacataacagtctactgtgacaattagagtgctctccatttgatgaagaatcaaatgtttcatgaaagaagcaaacatattgacattagacttcactacatcagagagatcattacatgtggtaagttcaagtgaagaaaattaagagtgatgacaaccctgtaggtgtgatgaccaagtgtgtaactttagcaaagtttaacattgtctaaacttgctcaacaaaactttacaaagatagacctcctttggaggtacagtgaaaaaacaagtttaagaatctatgacttatatcaaaaaggtagataattgtagtatttttgacataagtcaaagtgtgcgaagtggcactcttggatttgccacttttgaaagacagttaagttagttggttaggggggaatccttattttttattcaggctatatataacataggtttttgttgagttttgtgccctaaataaaacccatttcaatataatcagatttacttattaataaagatcaaaaataacaatttatgttgcatgcttcacatgatttatttcatgattatatatataatgtat

SEQ ID NO: 387311 - DNA, 1787 bp, Cannabis indica
tttttatttttcaaaaaaattgattcaaaagttgttaaaagtgaaaagagaggtaataagagtttagagattgattgaattaggtgacaaagaaatggagtgattatcattacaagatataatgtttatatattatatatatagtcactgcattgaaaagatattatataaattataacaatagaatcatatcatgtggccccttctaccaactcaattcaatcttattgatgtataacaacttaaccaaaaaaaaaaaaagattgacattatcaaaccaaattagaaataggaggtttgattattttgtttgtttttctaaatttaattctgatcgtgtttttaatgaggtgatatttcgatagaattgcagactattattttaattaattgatattaataaaattgcataattttttttgaaaagaagaacaaacttcattaaattaagtcatccaaaaccaaggatgaaaattcaggtggcaaagtagccgcactgaaagtacaatcagccatatgaacagagttacgtcccaaggcatgtccaactttattcgcagatcgcttaataaaaacaattgaaacagacaataaaactactaaaattgcctaacaattacaaataaacaaataaacaaatatagaaacaaattttaaaaattattacaatttactcgaagttttttattttatttttaataatttattgaagtataaatatagaagaattttacagtacacctcttttagagaggtgtattgatgtattactatttgtttcgccatgtgaaaaaaaaaaaattagtttcatttttatagttgtgtacatggtagttatttaagatattttataagtttttgaaaaaatttaacacactaaaaataaaattcaaataatttattgtacgcgttactattttattttataaatgtgggaagtatgaaaactatttttcatattgtaaattattcttaattttttaaaattttacaaatctttttaaataattataacatataaattagactaaaaaatatttaaataccaaaaaaaaaaatgcatcagtaaatataatgctaaaagacaaaagtcatgggtttctatttaattgtactggttataagcacgtggaatgattttcacccaaaaaattgaaaagctattctagaaaataaataagtaaataaatgaaaaggtaaagacatttccaaattgaagttttttaactttttcagtttataaagtagaaaaaaaagaaggaaaaataaaagcaaaggctgaaaatggtaataataatgacatgtccagttggcagagcagagcagaccattccattcttttctattattctttctccaacattgttattagagcataatggcattattgctgccaaacacttttgcgacatgtcgcgttgcgattgattaacgatattctctaaaaactattatattaaattatatgggacccgatacttaattaaaccaatagcgatattaacatgtagtagagtgctaagcaccactggtaccctttaacaatactcttattattatgtattagttttaactaatattgttttagaatttttggcggctaaccctttaataatattattttacttgtatttaactaaattcaaaatttagaagtaaaactttttaaattacaaaacacttagtaaatttaaggtatcatttagttaactatcactctagaatgtttatgaatacactcttgtatacgtggtacatttatattaatacacataatattattattt

SEQ ID NO: 387312 - DNA, 1533 bp, Cannabis indica
tttttaatgaattcatccttattcaaaaaaaataaaggggaaaaaatagaataaaaagatgtataaataatatatctatatattatccatatatataataataacaattaatatgtagttttaagtcatatatataaatgataaaattggcatgtccattgttaaggttgtttcttccttacttttaggtataaatagtaataataataattaattaagacattacaaatagttgactaacaaaaatttgtttaaagtgaggttgattgagatttagattaaaaaaaacaaaattgaaaaaataaaaaataaaaataaaaataaaaaatccagatcgattaaatttgaaaattgagatttttgaaatttgtaaacccacgaaagaatcatattcttctttatctaactttcaattcaacacgttgtccttatgatttttagtttataaagagaaaaaagaaaaagaacaattacagataattttagtatttcttttttggttcagcttcagttgtttcaaaaaaaaatgtcttcttttaagtttatggagtctcattctttattttaatattcaatctaaatgactagtgttaataatatgattaagggcttatttggtatgtcgtattgtattgtattgtattgtattagtattatttaatataatattatgttttgtattgacttgtattaataaattgtgtaaagttataatatatttttaatagactcgaccacaacaccaactacgggtctgggtcgcgggtctcgggtctagggttcggatcgcaagtctaggtctaagtatgggtccagatccgagttcgggtttgggtcttgggtctgagttcaagtttaggtcctgggtccgggtcaaggtctcgagttcgagtcttaactctgggtccaggtctgggtccaggttcgggtccaggtctcaagtcgcagttctcgggtccggggccaggtctaggtttggggtctaggtccgagttcaggttcgggtcccgggtccgagtcccaagtttaggttctgtttcgggttcaggtccaagtctcgagttcagatcagagattggtattgaccttgaatcctttgtaaatattataatacaagctaatacggactatttgttatgtattaaataatacaacatacattgtattaaaaaatttgatcgtaataattaatacaatacattattttatccaaacatgatgttatttattatttaatacaatacgaccaaacaaatcatgatatgattaattaatgaattagtaatagcaatccacaagaggtgaggctgagaagacaatgacttgtttcttggctgcatttaatgattgctaatattgattctttttttaataagacaaaaaatttaataaatcccaattacaatacgatacacttaggaccacggtattatcataaaatttcccaattagaaagaattattaaaataccctacaaattaggtcttttttaaatgtctcgccataaaaatttcttatatttatatatatata

SEQ ID NO: 387313 - DNA, 1612 bp, Cannabis indica
gaatctttcctatttcctcgttctcagcattagtaaccttctcaacaaacagcttatcaaagtcgttgtcgatcttcgaaagcgccttgaaattattctaaaaatgatctccaatttcatccctttgtctcaaccaccttcctgaattatcgatgatgcttccaataaaattttgccttctacgaatgatggtagaagcgtgaaaaaactttgtattgtcatctctgaactaaagccaattctcacaagatttttgctttcatattctatccatcctcccctccatctccatgatctccaactgaatctctgcttcaatttcaaccaaagcatctgttattggtttgttctgtacatcagctagccttcgatgtaattcttttaacttgcgatcacaaaatccaaagacctccgtattccatttcttaagatctcgtttagtgtatattaattcctttgaagaagacacccagcagtgttctgtcgcaccccatccacgagttcccaattaccttctcacaatcaggtctagaagtcaaaagttccaaaaaacagaagggataccgaagcttaggcccctcaccccacgcacgaaggaggataggggcataatctgacccaatgattgggaatttttccacacaagccttcgggaattcagtgcaccacaacacactcgcaaccaccctatccagcctcttcctgattcttttacaagcagatcttgagttttgccaagtagtcattccgcttccacaccctaggtccactccacctatttcaaacagaaaatttgccaagaactcgccctccttatgatcaaagtttcttccaccttccttctctgtttcctctagggtagcattaagatcccccataagaacccaatggtcttgacaatcagccaccctctcagtcagccagttccagaagtcttttttttagcatgatatggcgtaccatggacacagtatatacaccatttggagtaccccaacgcctcataaactccaattttgaagccggttttgaaactttccataagttggaaattgatgcctcttttccaagccacgcagaatccccctgaagtgcctatcgcaggaatacaacaaacattcaagagacccaatctattcatcacactcctcatccaaacttcgtcaactttagtttcagacaaaaatagaatatccgcatcacagtcgcgaataagaccccgaggggttctctctgccgcaggctgttgaagcccacggcagttccatgctagacacctcatgatgacggtgggggcatgatcacggccgtcctcgccatttccaaaattttgagcgaactccacattgacttcgatacaattagctagtaactcatttaaatcacctgaattaggctgaactgaagatgccttattgccacatgttttccttccacttctagttttgcccctgaacctctgctgtgacagtcagtagtcccgtcatccgtaaggggacgttacaaatggtattagagccttgacccaaccggatgtgtggtcgacgaggacgtcggaccttgtaagggggtgattattgctgaaatttattaattactacgcaagtgcacg

SEQ ID NO: 387314 - DNA, 947 bp, Cannabis indica
tttttgttcttgttgtggggaaattgtaagagaataagagagtgaataaaataggggtgaggctttgacaatagagcatttttaaacctctctctaaagacctattttgttcaaaatgtttcagatttgtgtagcgagaagggcagcatgtgaaagggaggcatgtggacgacagtgtgatcttggggtagtctagcttgaacgaatttgagagaagtggagctcgaagggtggtaatgttggcggccctgggttgaagggaaaaggagaaccttaggacgacgacttggatttttgggtgatgcgatggtgtagggctggtgattgggttcaagtgagataggacggtgagcaggaaaggcataaacgatggtcaaagcttctagccatggtggctatggagattcaggcgtagaaggaagaaaacaaaaaagggagataagagaaagggtaggggctgagaatgaaaaaagaaaaatgaaaaaaagaaaaaaaaattaattttaaaattaaatttatttgttttcttaaagaaaaattgttttaaattaaaattatgatttggatcaataatttgtcaatacatgacattttttagaagatcaaacaaataagttaactacaactattagacttataaaaatcttgatattgaggattattatcgctaatttttgaggttggggacttatctgcatcaaatataaatttctagggacttatagcgtaattttccctcaatcatatgatttatttttgagtaacttgctttataaatactcaagtttaaccccggttgcattaaatactttaagtttaatttttgatagtaataatacttcagttatatttttgaaacttccgtaggtacttgttcataaagtgtcaagtcaatgactacgtggcaacccctaattagtccatattattaaatttttatttttatt

SEQ ID NO: 387315 - DNA, 783 bp, Cannabis indica
ctttcgttttttttttttttctttttctttctcatttggttgaaatatttttattggataatagataatgatgtgttgggtagtacttatagggatgaatttggttacattcacaatcattattgattattgtttgcaaaattgcaattatacacgtaattggctagctaattaattgttgcatttataatattaatccaattatcaaaattctattataaatttaagatgaaaataattatgtgaagaaaaagagcttaaaccagaaaaattgtaaaaaaaataatggtgcgttataattaacgtttgtgatcctaattctaataataataattatagggttattgcattcattttagtacgtataaaatataaatatataataccaactttatagtgaaattaaaagacatctaatcgtgcctcttctaatagaatttttaccaagttttatattattattactagtgaaatttgtatcttaaatataaatatgtgatagtttctattcattttcattaattactactttgttaaatgttgattgttattactaaggtgacgatatctaatttgtttaggtttatttttagttaaaatttaaaatccaatttaaattaataaaagataattaaaacatattttaatttattttcaaaacaatattaaataaataaagaattaaataactgaacaaaaaataataatattaaataaataagtaatcaaacaaaacaaataaaacctaaaatcttcatcatcgtctctaactatccgagcctc

SEQ ID NO: 387316 - DNA, 1159 bp, Cannabis indica
ttatatttatttatattatatttgggtgcagtttgaagtttaaagttaaacttcaagatagttaaaatataaactccaagttcaaagtctcaaattttcttgattctaccagataatttaattcgattcatgagcaatcaacaataattcaatgtactagtgaaatgaaacttttaatactttgtacaaatgaaattgacaaaataaatgtagataaatcccaaattttcaatattctaattctactcaatagtaatttattgtccctacaaatgggcttcaaggcagtaacacaaagaaaaacaaaaatataatttcaaattagagaatattttttaatgagatgaaaaagtgaagaaagaaaaggctaaatgattagagggtacatgagaaaagaggaaaaggcctcaacttgctcgtactcataaaaaatactagactaacattaatatatttaacaaagaaaaaaaaaccttgaactttggccatataagatcagggccgatcctgaaatttagtagacattaggaaaaaaaaatatttttggatcctcattagaaaaaaatataatattttttaaaagtgataaaaaaaatgtgtaattttaaaaggtgataaatttttttgggcccctgagttaggtaggccctaggcacaggcttagtccgcctatgctcaaggctaaccctgcataagaccgaaaaagaagatgagttctcgagttgtggagaacccaggttttatggctcttgtcgtacaatgaaggttaattagttattcacgaacccaagtaagaaattctcgcgaacctaatatgtacttagaaattttaaaattttaaacccacaagatactaaatatctaatttttgtaaataagagatactaattgattgttattaaaataaagagtatgtattttgacaaaatccggattattaaatgaatatttaccttatgttatactatattatcgatttcacaacaaatctaactattcattcaatgtacattttgttattggaaattgtgttaccataccttaaaagtagtgtaattatgtaatatagacttaaatatttgggacttaattacaaatatagtcccacatggaaatcataccgaaacacaacatatttatttttttttattaagtaaac

SEQ ID NO: 387317 - DNA, 1971 bp, Cannabis indica
ttccccttctaagagttggttctcagtatggtgcaaagagtttcgaaaaacttatttgccaaagaaagttttaatctttatttggcgtgggtttcatgatgctctccttatgtacctgggacttcaaaaaaggaaagtagtcgatcatactaattgtcctttatgtggctttagtgtggattcaaatagtcatgttgtgttcctatgttgtggttttaagaaagtttggaaggaattacgtgttactctattcaacaatctctcaatggatatctcattcatgcaaatagttctaaaggcttcggaggtactttctagatctgactacgaattgttccttgttgcagcttggtatatttggggtgaaaggaactaaattgtccatggttgcaaagccaaccctcctgatgttgtggtctcacaaatctttaagttatttaatgaatataattaatgttcgagacccaatcttatgataaaggggtcgaaatgcctgtctccagaacgatggattaagccgcctttgggagcgtataaactaaatgttgatgcgtcgctggatgttaattctaatactataggaattgaggcaatagttcgagatactactaggaatgtgcttgggtgcctatgtagatccttatttggtatggtttatgacattaatggttttatgacaggaggtgtaccttttttgctttgttgtttatggtattttttgtatgagggtgagcaatggtgtttcttttatggtgtatgttttgtccaatcttgagaagttgctgctattctcaccttttagatattgtaattcttgttctctttaggtaggtaatcttatagtgttactgttaggatttatagtttttttgctaaatgttttagttttctcaggatggtaggttatggtttttggtaagtatagtttgggaggcagtttacttttatagagtatttgtgttagactcatggagtgagttgaccggagggagaattttctctccggtgtatggtcattgtttaacgggtttgtagttttgtttttttctttattttaatttctttcacttattaggattgaccttttactttctttccttttttgtaatttcttttttgaacttattctctacttgttggttagcattaatggttccattggattggtctcacttttggtcttcctcttcatgtggtggagtaggattgcttagccttggtttcaagtctcctgaagcgtttttccttttgtaatgaactaggttccttattagatgatcttgctagtttgttttctagttttcctgaggtatccctaattcatgttcgacgtacaaccaataaggctgctcatgaattagttgtacatgcacttagagtggatggtgagttgacttggattgaggattttccttcttttcttattgatgtattaaactctgattgttgttaataagagtttaatttttttaaaaaatgattattaatttattgtatcttattcgacagatagttcttctaacaatgaaaatattttttttttacaaatcttcaaaattcttacacgctacactattcttctcatacccatcgaaaaaagaaaacctaaaaatctctgagccccatcactgtcgctttattcacagggagaagacactactttattattattattattattattattattattatttcgctaattaggatattttctcccgaactttgacatgtactaaatcatgccccctgaatttttaaggtcgttaaaaatctaacatagataaaagttcaggatgcatgatttagtacatatcaaagttcgaggggcatgatttggtagatatcaaaatctggggagtatggtttagtacataaataatcaatgaaacaataaaattaaatgaaattagataaaagttcttaaatttaacaatctcaatagttcaggagaatttttaacggtcaaaa

SEQ ID NO: 387318 - DNA, 1587 bp, Cannabis indica
ttttcaaaaattctcaaatacaagagtaagagaattcaaagtcctaattgtgttatgaatgcttgaagaactacaaaaaatttgtctaagattatcaaaattgatgcgtagtttcaagagaaacgggctctgttcacgtaatcaagtcagcttcacacaattgtaaagtggacttggggaaaaatgttaactcaaaaaactttccttggtgtcttcaacatcaatgtttgacacgtagaaagaaagataacatctcggagttgagtagtcccgaatcatagcagaggacctaggaggggtccctagccctacgcccaaattgactttgggaactctagaatggaagtttgaatttctttaagtcattccaaacttaatttcttttagtattctctaccatgaagacatggagaaaataattccaggtcctaagcgctaaaaatacacgaattagcacctccaaagccaatttgggcacctagggttttacctagtgcccagggtaataacctcaacagggtttcaactctaagaccgtcttagggaaaataggtccaactttgcattggaattttaactagagataccatgttctgaggcatcaaatttagattcacaaaatgttcattttttagccctcgaacacttaaccattaggcaccccaacatctaggttgacaatttgtcaatcaaggccacttcacaacatctgattaaaaaacatacttgtgcatcttctttgtctctattaaaaacaaggaaacacgttcttttgggaaaggaacaacccatcatgggtgctaaaacaaggacccagcgcctaggttgacattttgtcaacctatgcaatgttcgagaagtctttcgggcatattctctattttcatcacagtaatattcaactatattcaaaggccaaatagaacttctaggtgacctgaaacaggacccattccctaggttgacacctagcatagggcctagcgcctaggtttacatattgtcaacctggaccattttcaatcagtttgccaaagagtattttggacattttttcgtagaaataacaaagatgcaagaaaacttgtggagaataccacaatcccaaggttgacctaatgttgggcccaatgcccaagttgacaatcaagctggtgcactggttttgataatccaaatgcaaattcttctttgagaattgtcgccaaaatgctcaaaaacagggtaggatacccaatgctaaagttttaaaacctcagaattatcaaatgacatcccagaagctccgaaatgagcacccaacgccctggttgacaaatagcccaatgtgttaggtttttcttatccaattctaattctatcccaaccattcatctagttttttattataactacgatccatgaagtcagaataatgaaattaaaaacttcatattttcacatttccaacaaggtgatttactcaaaaattgggtagtttcgagagtcatgttttagcaaaataataacatcttcgagaacttgtgaccagctttttcaaaacacaaaaatggactaactaatttcaaaatattgttgggttttatg

SEQ ID NO: 387319 - DNA, 897 bp, Cannabis indica
tacttgatcatctatatttatctatatgttcttgctatacctttacacttcttatcatgcatgagagagagagagagagttattaagagtaaaatagcaagcaaaggcacacaattctagagagagagagagatgtaaattggtggtggtggggtattatttatttatgtgataagtctataaaactcttttggtgcatgacaaaacatggggcctacccatcttctccacccaaaagaaaatgaagcacgttttttttttttttacttttttctttttggttaggaagggtccccaagatggatatggggctggaaaaagtgattttccatttcagattatatattgaaagcttttttttttgggtgggtgcaaaaaatatgataaattgagttgtgtacattggaacatggttcagtggacctgatcgacccaacaatggtagggtcttatagtgcttctcttaaccctaattttaatttgtgttctagctttctcttcatcttttatcgatccaaaaaaaagtaaaagaaaaaagtaaaaaataaaatgtaagaagggcttcttcatcatcataacatgtatagctaaggagacaagaaaacagcaagtgagttttgtgtagccattgactcctcctaattctgcctccatcataagcccattaattatattatattatatatattatatatatatatatatttatatatttgtatgtatgagagagagatgtatgaactttgaaattgtgttatatcaagccttggatgctttcaattgtgaaacccttttgtgtaaaaatgtcaaccttgtgaaatctaaaagtcaatagctagcttttatctctataatctttttcttttctctatatataaatatgtatatataaatata

SEQ ID NO: 387320 - DNA, 1135 bp, Cannabis indica
gaggagtcaaagaggaaccacaaagctgaacttgaggtagctcaaaaagaagcaaaggacaaacgtggggcctgccagaaactctaggaagaactcaatgcagccagtgtgaagcttgatggagccgaggttgatgctaaggaaaggtggaacaatgttgcaaagcgatccatatatagagcctagttggccaacgaccccagcatggacttgagcttcttgggtgaaggtgtcgaagaagttttggcttattgcaagcgaaccaaagaagaagaggtagtggactccgaggaggaagaagaagatccatccaagtctctcaccatgtagacttggtttttgttctttattttttgtttagaaagatggccttctggccaagacaatagttgccccttgtggcattattttttgtaaagacaattttgcactgttggatgaccaactttgctccttatgcatttatctttactttagttatcttgtatcttatgttgaacttaatatttttatttatttgcgttttaatttacaatgtaaacatttatattttgatccaactgaagatatatttattaagcatttctatttttctttcttttcctttgatacatttaagtagttattaatctactatatatgtgtgtgaacagttatactctgtgtatgttttccgattcatcagcagttatagtctgtcttattatacacgagtagtttacaatctaccaaatattatatgagcagtttaaatctgccatatataacttaaaaatactttgaataattcactttaggaactattttgtatattttttgattgctcatatgaatagtagatcttctattcatattttaggttaagtattatttttcaaggcattgtcatgcctcttttataatacataccggaataatgcgagctattaaatattcagcttctcgtgtagctttgtgtttttttatgagttgatctcatttacaactgctactttgattttcctatctaaagaagaggttcttcactttttagactttatattgtccatatataatattaaccaattatccttttctttgtgaaaaactttgtgaaaaaaaaataaaaaataggtttgcaatataatatgtactt

SEQ ID NO: 387321 - DNA, 601 bp, Cannabis indica
aaagaattttaattatgaaattagcatattgactattatataaaatgcttatatttttattattaaatttttattagttattacactaatacatataaatatataattatttaatttattttaccatgagatgatagcatattagttagtaatttcttttctacacaaaattaaatgttattctcttattttgttacaaaaattaaaataaatttttaataatttatataaaactagatatagatctcaatgtatatggttttaaaacaaacaaaaaaaaaaattatttaacaaactaaattgttattaacttttaattatttaatcaaaattattctatctcttccccaattcttccatctttagagtaggggtatccatcggttgtttggtcgggttgtagtatatttttaccaatttaatatggatatcagattgtaaatatttaattgtaactcgtccaaataattaaaaataaaaaataaaaaaaagtttaattcgctcaatgattttatcggtccggtttgggttaactcatccaaatcgatttttattattttctttttttgttattattgttaatttttggtgttcaaaaaat

SEQ ID NO: 387322 - DNA, 1241 bp, Cannabis indica
aggatgaagaccaagctataatcgtgctgaattctcttccaactgatagatatgagcactttgttgataccatgatgtatggtataccatgatgtatggtagagaatctttgacattagagaaagttcaaagtgtattaatttcaaaggagatggagagaaaggcagactagcaataagacagtgctagtgaagggctcttcgtccagggaaagtgctcaaagaaggagaacaggaaacaaagctatgcaaacaaagggaagtcaaacgctaagctcaagagaaggtgttttctttgtaacaaatcaagccatttgagaaaagattgtccaaccttgaaagattacatctccaagaaaggtggaaatgtatatgtagtgtctaatggagatgacagtgatggctatgacagtgctagtatattagtaatcttaaaggctagatttgacacatgttggataattgatacatggtgttcatttcatatttgatctgacataatttaattctctaactacaaaactatcaatagtggcactgtcaaattaggagacaatcatttttgtccaattaaaggtggtccattgaaaaatgtcaccttaagtgaattaatacaactgtgtcattaatgtatattttgtttccttatttatgtaaggaaattttactgaaaatctatcaaggtataatgaatctgtttgaatgaattgatagtttatttgaacagattctgactttctttttgcgaatatttttcattaattatctaattgtttctttacttgtaaagtgcgacttgtggtgtattaattgagagtatatttttactcaggttgtaattttatatgtgaagaataaaatattttattatataataaatactatatatatatggaatttctttataattgattattttattctttttctgatgtgaactcaataatctcttcagctaggttgtgtgatgaccaaggaaaatttcttggggatgaacttggctttgatggagtctagattcacaatgctgattaaacaaatcaggattttgtctgcacactttctatatctgttcatgaatcccgtcacttaatgagtttttgtaaggaaactaattaatattttttatttgtattctgaccttttgagctcaattttgggtttcatttatcactataaatatgacataaactagcaataaaaggttgaactcttctacttcttatatttttagaagagagt

SEQ ID NO: 387323 - DNA, 1373 bp, Cannabis indica
gttcaagctgagattccaatggaaagtgaagatcagaccacaagaactgttcaaagtccttctgcttctaccgaacatggaaaccaagacttacaattcattaattcgaagaatcctctcgaagatccaacaaatccttactttctccaccatggcgacaatccaggtaacgttcttgtatcccaactcctcactggacaagaaaattatgcatcttggagtagagctatgcaactttctgtttcagttaagaataaaattggatttcttgatggttccatcccaaaaccatcctcttctgatttttctttatacaacgcttggatcagaaataacaacattgttatttcttggatattgaattctgtctcaaaagaaatctcttcaagtatcctatatgatgagtccgcagccaacatatgggatgatcttaaaactcgattccaacagaggaatggacctcatatttacaatctcagaaagggattgatgaatcttagacaggataccttaaccattggtatgtattttaccaaactgaaaacaatttgggaagaattgtcaaattacagaccaaattgttcttgcaatggctgcacttgtggtggagttaagaagctccaagaacattaccacatggaatatatcatgtcgtttttaatgggtttgtctgataatttctctcaagttcgtgggagtattcttttaatggatcctctcccagatgttaaccgagtctttcacctcgttactcaagaagaaaatcaaaaaggcaactctactgctggaaacgatcccaacaccagccacgcctttgcttttcaaggtgacaaatcaaacaaaggtgatcaacaagggcagaaatctcaaggttctaagaaaggaagacccttttgcacccactgtaacatacatggccacaccattgaaaggtgttacaagatccacggctatccacctggatacaataaaaataacaaacctaaagatgctgttgcaaatcaaattcagactactgcagaaactagtgccaagacagaagacacacacactctcctcccacaactaagtgcgacacagtaccaacaattactcaatcttcttgccaaccaacatggtaatttgtctgtagcagatccttgcacttccacagacacttctggtatgatactgacctgttctacctctaaaatttttgatacttcttggattttagactctggtgccaccaggcacatatgtaataacattaatctgttccaaagtatcagttataccactgctacaagacttattttaccaaacaatgaagtcctattagttaggcaaaatggcattgtccgtatatcgaaaaatctcattcttgaggatgt

SEQ ID NO: 387324 - DNA, 2190 bp, Cannabis indica
ctcccgcaaaacaaggaagacttaaataatgacattggggctaaaacacactacaaacttgtcaaaatttactaactatcttgaggccgctccatagcaactcaaaagttgtcgaaatctcacacaacacacatcaaaagccttgaaaaagaacaaactatcatcagtaaatagcaagtgcaaaataacaaggccaccccgaccacaagaaacacatacaataatttattatcacaatcccttctaaccaatctcgaaaggtcctcagcataaagtaaaaaaagataaggagacatgggatcaccttgtctaagcccacgttgaggagtgatagtgtaacagcctaatccataggaacggcacgcgtgtgatttaaaaactagtttaatacttatagactaattaattattaaaaagctgtgataatattaaaaacttgactaaagtaaaatactaaaaacgaacatcataataacattaaaaatgtattctggggatccctattataaaagttttataaaaggactatatacgacaacaattcaaaaaacaaaattaagatacacagcagatacaacccaaaacaactcctggaaacttaacacacatgttgttgaggttaatatgtacattgttggagaagactgtcatctcatggttgctctaacatttccttgtccttacctgcactaaagagcacccgtgaatcatatagactcaacaagaaatgtaacaaagaagaatacatcgaattactaattatatatttcactattatgaaatgataaaacaaaaacattcaagattgggtaatataaccagccatatgcatggaaatagaaatgatcatatattgtattgcctaattaggcaagcccatgtcataatttaacatcatatataatatcactacgctacctaattaggtgagtctgtgccacaacctggcaccaatatatcgcattgcctaattagacgagctcgtaccatagcctggtactcacatgtcactgctgcatgtacctaatcaaatatgccaccaagaggaaacccaacaacggttttaatctatgccataacccgtcattctcatatcattatcgcccataccaaataatgtatcgccaacaagtatattgtatcacctaatcagctgagcccgtgtggaacttgacggggaggtcagaaatgtcacaacaataaaagatgaattaaattagaattataccagactaatttagaattttaagttgtcggtttgacgaattatgtataattaccaaaatatccctagggttaattttaggtttaagatttcctacaatggtaaaaaggtcattttagggttaaatattggctttgtcttatatggtttgttggctgggattaagattgatttaatgaaataaaaataagtaaataataaaaacaataaaaggtttggaattaagataggaagaagttatccaacaccttctttctttttccttcttgcccgaaccctaggagtggctgcaaccaaggaatttcttcttcaattgctctttttccagctggttcaccaaggcttagaggctgtcaaggttttgatgtaagtgttctttgtgtttgttgaatgatatcttaagttttaggttagtttgggttaaagttttcgaaatttggggctgtgatgctaaattgaaattgtagcaagtttttaggcttgtttgagagcttgtttgagttggttatggttagagataagggttgtttaacttgatttgagttagatgtggttttatgaggattatttcacttaagtatgcaagtttgagtaaatgaataaattgtgattaaatgatgtctgggataggttgtatttgtgatattatactgaactggagcagttgggcaggtatggctagttttggttcaaatttggggaagaaaactcttgaaatttggtcttccaaaactcgtctagcggttggttctggtgtgacagaatcggttgacaggttgtactgcaggggaaaatttttgacttttcttaaggtttagttttggctcagggttgtgcctagcatctattatggattacttaaatattagatggcctattttagggtattggggattgggaaattgtctggttatgggaattagggttattcccgaaattattgattaaggtatttattgaatgtt

SEQ ID NO: 387325 - DNA, 518 bp, Cannabis indica
ctcctcaaatagtgagtctctttctctcactgaatgaaatgatatggagttgttctcattcaatggttttgcaatgaataaaagcatttcatttcttagatttgttgtatttttgtttttttttctggtgtgatttgaatacgaaaaaatgcaggttgtggtggtggtggtgggagttggtgggatggtggatttgaggaagatgagggggtgtttttggttatgagttttatgatttttggtttaatttagtttaatttaattttaaaggttttttttaatttaaaatgaatttttaaataatttttataatgtttaaataataaagttaggtggaccaatataaatgggatacgtgtacaaaaatatacacacaagcaatccatgttggcacttagctatgctaaatggatgacactttaaacttactaagagatgagtagtttggaggggtttacaagtaaaatttgagattagagggttaaatgaaagtaaaatgagagttgggagggtttagc

SEQ ID NO: 387326 - DNA, 823 bp, Cannabis indica
attactcaagcttactgttgcatgtttatgatcaaatcaggctgccactgaggctgaccgactgtctaaagaacaaattgaccaaggacacgcaactgctaccttggttgggctttcagagatgcaggccaagctgaagaaagcagaggaggaggtggaggccttaaaggatgacgtcccagcccaaaagacactaagggagcgacaccagaagctggcaactgagacgaagaaagccatgaaggagagccaagacttaatgactcaagctcatgcccagctgttggctgctaaatatgcttgtttttaaaaagaagttgacctatcccaagtccaattggagaacaagaacttgaagcttctcctatctaagctttaggagcttcataaagtcggcttgcagttcgtcgctaatatgtttgtagagttgaaagaacttcatttgctttgggactccaacaaattagttgatgaagtctcacctaagatggctatctgacttccttctccgattacttgtcacatagcgtgaagcgctatgaggatgtggtttcatatgctggaagatgaataactttcattctcgtcttcacttcttgaccgatcctaaagttaccatgaagcgcttcttggagaagaacaagaagttaaaggcatcttgagcagcgaagatgggcgaacctcggctgtggcccttttggcttctccaagatgatagatgactcaagatttttaaatagtatcttatatatatatatatatggaacacttcttaatgggtaatacccattgatgggaactaaaaaaattaataaggtaataa

SEQ ID NO: 387327 - DNA, 874 bp, Cannabis indica
  modified_base (827)..(827): a, c, t, g, unknown or other
tttatcaatttgttaaagaggaattagggcgccaaggtaggactaattccttttcataacctctgttaagcttgaccaacttgttgttattgttgtgttgcttttgtatttgatacttatgaaatatcgttgctcttattttgcagatcgccccatggaatgctggaaatggtggacgtagatcttgaaggggtcgagactactttgactgccgtggtccccaaagtgatggttactttaaggggcccattgagtcaaaccaagatgatccagaagtaatcctacttgaggagggcgagatactcccgttcaagagctagaagggtaagtggaaggagcactcttcctctaaatcgacttcgtccaagaggtctaagtcttctaatacgccgtctcaggacatgtctaacttaagaatcccctcataggcgactcattttctgagggtgccttccattcggttcacccagatgaggctcactcgcatctccagcttgctaggcacaactttgtcgtagacaagcatactaagggaagtgcggaggccgaggcttcaaaaatgtggttggacgaaaagtaagatggggcactccgaggtgagtactccgggcaggtgtatgatttaaacctgaccctatggcagaatatttctctaacttccttggctcttccctcactccttttgcttatgaaattgtcagcaacttagcagctgatctggtctaatttcctactaagaggttcgcgacttatgcgtcctcaccgtctattaagctcaagcttaaagcatggtgttggcttcaatgagttaaaattgtcgtcaattntcattttgcttctttatatcttttatactcaagctttactgttgcat

SEQ ID NO: 387328 - DNA, 811 bp, Cannabis indica
aaagggaaagactaaagaaccaaataataaacttttttcattctactagatagtgggtaccacccgtaccctaaaaacaattttttttttttttagaaagacactcaatgttgatcaacactatcatcacattcacatctttggcagggccggtcctaaggtatatggggcctaaggcgaaatcaaattttgggcccctatatatagtttaactattaaaaaaattataattctagtgcttagtttaatagtaaaacttttaaaaactcaagctccaaggttcaatccctcataactacacattaaatattttaaaaaagattaaaatgtaaaggttgagaattgatcccattacttcttagagagaaattaaatcttttaccactacatcaaagaatttttattatattttcttcttatttacgattttatctatatattaatatttttttctcttcacaatttcggggccttgagcgttcaggggcctgaggcgcacgcctagcctgcctactctcagggtcggccctgatctttggtctagtgctaaatgtctcatgctttgtatcttggggtgaagaactcgaattgaacctagaccataaatatgatacatttgcaaggagcaaattttattctatttgggtatgcatttgttcatctctagatcaaaaattaggttaatcaaacagtttttaatcattaaaactcaaaatacatcaaattaaattgataatacgctaaactttgatcaaagtacatgaaaataaaacatgtagtattaatcaaaaaaaaaaaaaaaacacatgca

SEQ ID NO: 387329 - DNA, 1672 bp, Cannabis indica
attatgaactgattttgtaaaacaaaacttaacaataacccaatataaaagttttaaaaattacattttttatatttgtttgtgttataaattatcttcaaattgattatattaaaaaaaattatcgaaaatttaactcaatatcctatttatactatactagattcattttgtcatttaaaaaaaacaagaagattaaatcaataacttttataaaacattcaaaataatattaaccctatatttttctcaaattactcattacttacatgcaactttttataaattgattgtattattatttccttgtataattttttctcctagctgttagtctcctttgtattctatatataataataccatatatataccagtgtatattctgagttcaatatcaataaagaaattaaatttcttcttccaaaacttctacaaagaattcttgaaaccttactctgtaatctacaaatttcattaaatttataataacttccccctattcctgaaggagtgaggctacattgtgcttgacatcttctttggcttgtttatcaaatggatcttcaccaatataaagatccagaatcgacttacacaggagtttgctctggatacttcccacctctttcccatcaactgaaaaaaaataaaaataaataaaacaaagtgttaacaagaaccaaaactaaatgaattagtgtttaaactccggatatactccaggccccatccacattaaatttccattttttgtatagatttctctttttctaatcttttcaatcaattagaaaaggctttatattctgaacccatcttcaaattcataaaaggtcattggtttaagagttggtggagcatgtacgcattctaaaatgtatacagctatcacttcctgagggtgaaaattctcacatatcatgaaaccatctaaaaatgaaggagctaatgcataaggaagtttaaggaatcatacttgtcgttcgaagtacatagccccgttcccttgccagttcgatcacagatcctcgtggtatcttatattcatctttgaactgagaagtgaacctgcaatttgttttgggtattaagctgttgttaaacttacaccaaatgatactcatgacttgtataaacaattgtcagctgtaactgcaacttaacaagattgagactcttcaaagattccaatttttcataaaatgtcggcttatgatattattattcttttcataccatgaatgtggttaataaagatttacctttgaagaagttctttattatcaggtcccccaaacttttgcagtctgcttcccactgattcctcaaaagcatttcgtacagatcgaatgctcaatttgctgtacattatttgaagcctaacagtcatgcttatatcattttctatgagatcatcagtaaactctttgctttccttgatttcagaactagacaatttcttgtacttcttccccaacattttcttcacctcattattatcagcataaacacctgtttataagcaaaactgaacttatacatataatatgtatacttatcattatgctaaactctacaatctgtaaaaaagcaaagagcttgatcacttgccttaacctcatttgtcataattaattcaagcacagactaaatagtaaatattctcaac

SEQ ID NO: 387330 - DNA, 692 bp, Cannabis indica
tgggggttgcccatggagctatttttgccacatatgcaatgtgattgttatttttaatgctactttatcaatactattatctatatatagcaacagccatgtgtcattactttatctttctttttttttttcaaaaagtatactttattgtattattttataatttatagtatttgataaaattattgatttagatgatggcaagtgggtactttttggagttgtcaactattaaatagatttttgtatgaaaagttgtcaaatcttacgtgcatgagaaagaaaataaaacaaaaatattttagaatgatgtatgcacttttgataattataagtgttgcccccattagagattctctaagaaggaagccccacctagttgggccacgtaagagcatctccaatagttaaattttagaggatgcttggttatgcaaattgcttatttggcaaaatacaaagatactatactattaaagttaaataagtgctatcataaaaaattatgttgatactactatattgtaagtctcaaaatgatattagaaaataaataaaataaaatattatatttttcattgataatttttagcaaccttacaaaatgcaacattggagatgctcaatacattgcatagactgttaggattaataaaacactcaagaaatatatatatatatcatagatctaa

SEQ ID NO: 387331 - DNA, 1336 bp, Cannabis indica
atatatatattttaactcaatttttttatattacaccatacatcaatttcttcaaaatatattgcaaatatctcactttttttcaaattttaatatattttatttatttcaaatatataatattaatctatacacttacccccatataaaaatatgatgaattttgtgccctatttaaaatcttatttcaatataatcttgaatttcattatcaataaaattaagagtgaggattattttattacttatttagtataatgtttgttttacatgtttaattcatgattatatgtttgatatataaattctattaaatccttcatgattatatgttttatttcacattgctattcatgattcttgtgttgtctacatagtagaaaataatcaagattatgtgattaaactaattagtcccatgattttacagtatactggatttacactgatatgataatcaacaatttggtttgcttacacttgtatagtgaaatgtcttttccaagacattagcaaagttagcttgtattagatgtagatatacacagtggaaaaaaatcataaacttgtcataatatctttcgaagtaaatatcacttagttgatcttagatcaatgatctcaatcttgagatggttaggttttggtttaagtactgtattacatgtgttctttgacttgttcattaaaggtaaccaattggattgaactaacacttacatcttgggagtatggtagtgcaattgagtgggagcactaatcatagatatgaaacttatagcttctataaacacatagaagtgaaacgatagttttcttagagcttggctaaattagtttaaatggtggaatactcatttcagtaattatattagtgtattgaaatatcatttacaattagttaaatattttaaagataaaatacagtgaagggtagaacggtaaattttcccctactcaatgtaaattattaatagaagatcgttgattatttggattgaaacaatgaataatttatagcgtatctatatttggtgttgagcgttttatatattcaggagtacaattttaaatctatagtagagtctagaggaattaataaaatagagaatttactcgataaattttagaactacttattgaaagcttatttatataaatctatgatccttacactaattgagataatattttgttgtagattaacaatgaaagttatggacccatatatttatatttatgggtaaataccattttggaccctctgttttacaaaagtgaccaattggaacctgtgttttgttaaatgacaaaatggaccttgtattttctaaaa

SEQ ID NO: 387332 - DNA, 2257 bp, Cannabis indica
tatatatataaatatatattggacattggtattaattagatatattttaatattatatttattattagatggaaagcaagagaaaccgtgtcctcaatttcatattacttagtcttgtaatttacatattggccagatcagttcgtgtcttccactcctgccctaactcaacaaactatatatagagagggaaatttcaagatcataattaaatatgaaaaataaataaataaatgttattactagtactatttggtgaggtatatatagggtatacctcataacgacctctttcagttaacaacagcctacactagctaatatataccttctttaatatgtattattaaaaacgtaactatatgtagtcaaatgaattataaatacatatatattatatattaataattgaaaaaaaaatgctttgtttacatatatctacattttcaaaatgttttcctttttcgttctctcccatgcttcaattaaattcaatattatttgattggctattagaatgtatacgtaacttgatcttaacgaattttaaaagggcgcattaattgcgacatatatgtcatgaaaattaatttaatattacaaaaatgacataatttgtcactatttatgtcatgcagcaatatttaaatgacataaattttgttttgtgaattacatgtttaagttataagttagtatcatgctagctatatatattttcatatatgatcatgttcatgatctgatcttgatcaaaattagtcaatcaaaatgttttatagtatataaaccgagcattttattttttttttctttaaaaaaaacgtacaagaagatgaaaaaactaagattacttaaaaggcacttaattgtgtcaattattataaagcataatctgataataaaatagaaagtcttaccatattttcaggattagtgttgtttttctcaatatcttaaaatattatttacatgaggtgttgattttttttttttaaagagagctcgtataccgttatatatataatatacacatatattccatttacaatataaagctatatcgatcttagatcatcattagatatgtttctaaaaatatataaaaaaaaaaaattgactaactacttaagtagactttgaattcaagttaaactaaatgactcgtgtaaaaggatcatcatattatacatgatgtacatatatatatatgatgactaataaaggctttagccagtagtctttgtcgttaactaatccatgcatgaacatataaatgtagtacaaagcagtacgtactgtacaaactaaactaagacggcagcaccaagccaaaccccctcaactacaagtctacaaatatatatcaattaaagtacgtctcaattgcacaaagtgaaagggaaaaaagtaaataaaattctataattcatgcaattgtggtaatcaataataatttatttgtactatcccacacaaatctttagagcaattgtggtttttttttgtatagaaacataccttccaattttaaggtgaaggttggtgttgcgaaaatcctgtaattgatcgatcgtatatataatcattataaattataatattatataaaccatgcatgcatcgatcgagagagagattaattattgacgagtttctagtatatatactgagcaaaatttgtcgttttgaaaacacatttgccgtacgttactattaattaattagctagcgtacgtaacattataataaattatactaccaagagtaattaagtaaaatacttataatataaatatgtatatatatgtatctaccggttaaccatgtttatgaatgctgggcttcctggtaacacaacaacttctagtggccagccttaataatcgaaagcttgtccaacaagaggaaattaggcaaagcttaatttctcacggacacaattagcaacatcatgctaaagatatatatccacaataaaaacacagtcctaagatagagctctgctggaattctatgtttgatattaatctccacctgtagcttcaggaatcctcgtcgagcaataacgttgtcatgttagacaatttatatgtataaactgaaatatatgtatgtgtatataaaatgcggaattaaacaaatatatacactatataacttaaggatcgaaatacctccagccattgattcttgagcttcaaacccacataagctttgatctgcaagggaaactggttgatgtgggtaatcgggc

SEQ ID NO: 387333 - DNA, 2252 bp, Cannabis indica
ataatattttttcgttttatattgcatcatcagtttttcactttgtagggaaacctttgtcccttgtcatgaaaagtgaaataataatcatttattgaatgacaactactcaactgtctagtcctccctgacatatgaaacacaaataaaattacaaaagatcgtgccaatctctattaagatcagagaaaggcacatttttaaactcgctaacactacacagccaaatagccacccagtttgattcaatcctaaagctgttcttcgttgccttattctctttttcctttttaaccaaatttgctcaccaagtagccataacccctggtctccatagcagcttcttagttttaataatgttgatttctacaattctttggtatgcacctcagaatttttaatttcttcagaagtatgaaccataacggaaaataataaaaacaatgcagaaatacctgcttcttttttttcttttttttttggtctcgaaacacaccagcttgagtaaagcacgcattagggtcatttttttttttgaagagaggcatgaacatttaatttccttgacacaacaggcaactaaacaccttcacttaggaggcgtagggctagatctttaccgtagggaagtctctgtaatatgcatctccaccttcactaaagagtcagaattaggctatagtacatggttgtctacaatgatattattaaggttactagtaacagttaatgtgctgtaaaatcatttttcagattttgttcttactttttgattaacttaagcatatgttaagtaagtacagtggttgtgattattacagacagttagtttggacatttcatttgaactgtcaccttatatttctacaggtactttgttttaactcctcatgatctggaggagttgtacaacaaccctgaatcatttcatcatgagcaggatatgattcagtggacggagaaattgaggccttgtgctgaggctttgtacattgttttgtttcataaccatagtgaggttggtggtttttttattgttatgtaataacccaaaatgttttctgctaaatagattacttaaattttcttttgtcttgagtaaataattatctacttttttttttatttatatttctactttgtagcttttaggtcctcttgtggtttcaatccttcaagaagcaatgaatggttgcccaacatcagttactgaaatcactccggggctgcttcttaaagatgctgcttatgctgctgctgcatatgtttattatgagctttcaaattacatgacctttaaagattggtccgtcaattatttacttagctatctattttgtaactaacttgttctctttctaaattagaattgaataattgctgcatttaaattttgtgttaattttccacgaggggtaggttgagtagttaggagatttgctttcagagatctgtagtttgattcttctatgtagcaatatgttagttttctgcactcccaattctatgcattcttttattatagaatctgtgttgtaagcgattagaaaagtttgtacagagagttccttttatgaatctcagtatatttcttggtttcttttcaaggataaaagtagtagatacagtttgcactctcttgttgaaggattgtaatattttgctctcaacatgttaaaagtgcctgaatgcccccaactgatagcgttaattgttttgatgaagaatagcggctaggatatgtgttcacacttttagtggctaggttcaaagcaataattatgattttattgtagaattggtttgtcaggtcggttgtctgtttaagttagcttatagtttgactctaatatcttcttgggtttgttatatttgcatgatttcatctttctaatgtgtaaattttcaggtttaatggtgcattatcacttgatctctcaaatgatcatccaaatatgcgtatcatccatcggaaagttgcaattgtattgggacaatgggtttctgaggtgataattttatttgatttccctattataaaaatattttgggctcgaaaaagcagtacactcacataaaagtttctcctggatttcaagtggtggcaggtgcaaaaaatttgttaattgcagtgttttcttgtttcatgctttaattgcataaccattgacatttaagaaatttaacagtgtttctggccagtgaacctaaattaggagaagttaaaaaatatggtggcgtttggtaacact

SEQ ID NO: 387334 - DNA, 806 bp, Cannabis indica
tcacgataaataataataataaaaatatgatgaaattctaaaatttagtgccatatataaagtttgaagatttgaacacttacctaacttggaattaattatgcactatatatatgaatacactatatatatgaatatatatataaatatatatactatgtatatgattagtacaacttttgtgaaacatataagttattataccaataccattttcatttatgatatactataatgcaatgcaagatataatttcaacagagaaaataatttatttttattaaaaattaaaaataaaactcctattgaagtatgaattatgcatcaattaacactttacttacttcattcgtttgtggtggtattaattagtggtgggtgtggaatatataattataattatatatataataataattgacttgtactacctgtctttgttgagcagacactcttcttccccatacatatatataattatttcattaatataatagagaagagaattaagagtaccacttcagtttcagagatatgaattaggaaggtcatcccatgtggtatccactccaaatatggtcatatcacttggattggccaaattttcaaatgctttgagccttttacgtaattggttggtgcatgatattatataatatttacaatattacattttttaataacttgctataacagattattaatatttaaaattttatttttagactcaaaatataattataattaattatataattaagataaattatttttttaattaaaatatttaagataatttttttttt

SEQ ID NO: 387335 - DNA, 936 bp, Cannabis indica
ggactactgactgtcacacacacacacacacctcaatcgcacacttttgtgatcccgaatagccgaattccaattacacagattctcgattcgtcaccacttacagtacctaggtaaccactcgtcattgtcaaccaaaccatggccaccactcatgattgacataaccaatgaacccttcaaacaagggactaaaccttaagttagttatcgagacaaaggacgtcacttagagacttttttctttctttctacaagttcaagttctgattaatgatgtgaatttttagaattttaaaatgtgagctgtgtatttcttttaaaaaaaaaattctatttttttaattaaataaagtgcaaatctatttatttatttttttgcttttaagagtttttttagccataaatctaggctaattaggatttttgctccctaaatttcgacatgtaccaaatcgtgcacctgtaactttttaaactactaaaaatctcctgctcccaccttaatttatgaaaattttggatcgaaggactttattttaattttactaacagatgtttgacgtggataaaagttcataaggcacgattttgatacatgtcaaagtaggcacgatttagtatatataaaaatttaggggcacactttgggacatagacaatcatcacgttagtaaaaattaatgaaattgaatataagtacttaaatctaacaatctcaatagttcagggagaatttttatcggcctgaaaagttcaagaggcataatttagtgttagatgttgttttactaggatctagatttactaacatgtatgagtcagtttggcatagatgtgatgtgggaaaaagcagttgtagctgtgctgtgagaaaaaacagctgcatcagaactgtagaaaaaagctgagttaagtgtttggtaaattataaat

SEQ ID NO: 387336 - DNA, 643 bp, Cannabis indica
cgtaacatcaacttaatatatatgtgtgtcacgtgaagatacatgtgtgcattctatgtggagaggttcttttttttttttttttttgaaaaatgccgtaattatattgaggtaaaagaagttagacctcatgtttattacaatacaagttatccggtatggaagacatatctaccataccagtcaccttgccgacaaaagcccatttagccacattatgggaagcaaagttacatagtcttgaaataaacaaaaaattacaactaatcaaaaggtttgagagcattttacattgaagcacgtaattctcaataccccaaatagaagtagttccctttagcgtgttaagcaccgtcttataatcgctttcaatgatcacaaacgaatgcttcctacgagtcgctgactcctgagctaacaaacaagctgtagcttctccaatgaaaatatcagaaaagttaagaatgttgctagccacccacaaaatcgactccttatgatttttctccaaagcccacacacattgagtcactaccaaccttaacgtcatagtgtatatatatatactagtaaaaagttacgtgcaaggcacgtatactaaattttattctaattttttttatgttattttaaagtgatacaa

SEQ ID NO: 387337 - DNA, 2185 bp, Cannabis indica
ttttttttttttttacaaacttcccatgagcaacccaacacgttaatagagagaatggtcatctactactctctcatagctatcttccttatcccttctttcttttcttcctatttcttttcagagttggtggttgtgtaagtgtctttggggtttggttgtgtcgttgacttcccttggtattgtgtgtttgtgtcttattctgctctgggtcttaggttctctgcccttttctttggtttatttttcttttgtttccttttgttgtcgtggttgtggggtatccctggtttgtggggtaggggttggttaagggtgtgagggagttggtgaggttggttgtttggtggcttgtctttcattgtttgctttcaatggctttagttaatgccaccaactattctactaatggaaggtgttattcctttgaggaagcttcagtcaagatcagtccgtgtgcctcttctcagcaagccttatccaccttttgtcttcttgggaaagttgtggccccaatggtaattaatgaggccactatcattgactttgtggaaaaggtttggaagtttaatgtgactgttgtagctttgaatgatggtgctaacaaccataactgttttgagttaggttttttaagcactgaaaatcgctcatgggcacttgaacgtggtccttggtgtatacgtggatacacttttatcttgaaagcttgggcacctaagaaggaacattttgacatgtttgaaaatgttagaatttggttacacatttttaatctcccgagagactatttctccattgataatggtaaaatcttggggactaaagccggttcagtgattaaggtcgatttagacgaaggcaatccggccctatggagcaagtctctcagagttttgattaacctcaatgttaacctacccttgttttcaggttgttattttgatctggaatcgggcatccaaaggtgggttcaattcaagtatgagagattggggatcttttgttataactgtggcaagttaggtcatcaaagaagaggttgtcaccttgcttctccagttacggtttcaagcttgaagggggttcctttccctttgtttgggccatggctgtctatggattcttcttacctggatgtcttttcgggtgcaaagtccttcaatccagcttcgtcgtcgtcggcacaggtggcttctggttcggttcgtgggggaagtcgaccgttggccttggtctctggtgcgaagggagcggttcgacggacccctgtttctcggttagcgagtcgcacagtgatggcggcgggtcggagctcgctgggcgaggggaaggctcgatacaagatgtgggttcccaaagctggctctgcctcgtgcatgccagaatttgccattacgggtaatatggcttctggtcgtactctgcgtgatggaaagtcgactgaaatgttgccttttattaattcaaaatcagttgacctaaggaagatgagtgggaaagagaaagactttctaaagggagctattgggccggctttctcttctattgggacgggttcaaaagtggatcattttagagatggagctttttctggtgggcctattaataggtgcaatgagtccattttagctcttaatggagccgagcccactatggagaaccaaaaatcacctttgcctttgctaaaggctcagaggccgtgtattacctatgggccgggtgggctccctgattttaaaaataatattaattttgctagttgtgaaacaccaaacaagaccatttccattgagagttctacttgtggccaagaagttaattttcataatgatgaaactcttgccttatcctatttttttcaagctcaagaaacgcttcttcatgacctcaagaagtttggaaacctggacttatatgagattaaaaccataggtggtgacattggggtccctactccttcggaggttaatgaaagaaccactcctttcaaaaagagaaagtttgacggggcgtcggcgtctctttgttctcggccatggaagatccctcgccaccatccaggggttgtcagggactttccctgggactcagacgtcaaggctattgctactaatgatgtggaggaggagccaacggaggatgcctccttatccaacagtgacttcttgggatcggatgagtg

SEQ ID NO: 387338 - DNA, 2164 bp, Cannabis indica
cataactcttgatattatccgaaataccttctttatccaatcctctgttttgtctttgtttaaagtcttgtcaatagccactgatatcatctcgatctgccacatagagcaatggaatatacatacatacacacaacaaacacacacatgtacacaatcaaattcaaactcagcaaagaaacaaaataaatcaactctttaagcaaaaaagccttaataattactgtcatgtctaattgcgcagactgcttttggaattcttttatcactctaacttgtttagcaagtgtcatttgctaaaacataaaatgttgaaaaaaaaccttcacttagtcatctttcaatatatatgtcatagaaagaaaatttgtgtgggaaataaactcatatacatgctactcctaataattccattaaagagaaagattttaaaatttctaccttgttcattgccacaaactagttgtgtgcattctcatcatctctatctaaatagttacacatacaatgctgctactcgagcaacaaaaaattgtgtgtattattataatgaccagaaaattgcaacctttagagatatatattagctccctgcatttttatcaacataattgaaactagtccaatcatgtatgtttagcttataataatgacacacatatataatcgttgtacacaataggcacagcttaattaaggcatgtttggttatatgaaagaaatacttttgttcaaagcttaataatggcaacaaggctattattaatatagaaaaatcacctaataaatccataaatatataaattggatgagatcataaagatgcaaatgtcaccataaatcactcatccatggaaaagcaattgcttcaggtccaaaatgggatattattgatccaaaacacaaaggtacttaattatttggaatatcaaactatagatatgtgtagcttgcttcttttattaagttaacttataattattactattttttttttgttcccacatcatatatgtaaatataaataaataaatgaaaataaacagttggggagaagataatcgtttgataattactttacggtgtatgcaagaaaactgtaaattacttggggagaagataatcgttatttgagcatatccaccagattgcaaagtccaccccttcttccatttgagcatcctggacgaaccacacgaagcattcatgcaaatcccattaagcaaaattggaatcctttccaatatcctttgaaccaaacaaaacaaaagaatcaaaatcaaatccctaaaacccctttttgattaaaaatccagctataaatcagtaacccaatataagttcatcgcccaaatatatacaacgtcagctaccagcatttcagattaaaaaaataatagtaaatataaataaataaataaaaataaacagtaaaaacaaaccagccaaccaacttgtgtgtcttccgaattgacgaccccaaatatcgaaacacaaaatgagaggaggcagccagggttgggtcatcgcctgattatgtagaagacgaagaagagaggaggagggcaccggggttgggtcaccgcccgattaagtagaagacgaagaatagaggaggaggccagtttcgaagaggacgatcgaagggaaaggggctcgagtactgggcgaatttgaagaggacaaggtcgaagaaggccgcctagttttgccagagaaattttgaagatgttgaagggttagggatcatagtacgatatgattttgggttttagggattatattagagtctattatagcatagcatagactattaccaacagacgcaaactgataaataatattttaaactttttaccttattacgtcggttctatttttaccatcatttaaaaaacgacgcaaattaaatattattggtgtcatttctaaacagagcgggtctaattatttgggcactattcacgtcggtcaacgcgatgaacagtagcgttgaccgacgtaaatagtgtaatttgtagtagggaaaaaaaacagcacagtaaaattgttataagtaccgtgtgacagtaaaaaagaaataaaatgagaaaaaacaagtatagggtgtaaatttcccttttaataaaaccaataaaaactaaatgtaaagcccaaataaaaa

SEQ ID NO: 387339 - DNA, 1243 bp, Cannabis indica
agtattttttgaaaacaatattgcctaaaagttaattggtttttagaacagaaagcaatattttgttgttttcaaaattcttgttttaagtaacttgttttttgaaaactattttcaaaaaacaaggccaaaccagaaaacaattttctatttttaaaaacacaaaataattttttaattatgatctcaaacatacactaataatgcttccatgatttctaaactgaagatttatcatatgcaaaattaagttgggttagcaagattgtttatttttatttattactttatttttggaaacaaaggaagcggttagcatgattggtagaagggagtaacaaaggcattatagtcgttatgtaacccaccgatgcagatagccaaatagatgacatgatctttgttactcacttgttcactaatatattaattaatataataaacactctcatactaaatatcctagttatgataattttttaagtggggaaaggaaaagacaacaactaaacaacaaaaatggtgaccaaatttctcacatattctagcaaattagagtcttttgctcctcaacataatattcaggaactgaatggttgatgagagtttcgttttccttgaatattctctcccttgccttctctgcctgcaatttccacacgaagatatattaccaaaaaatataatatatatttatatatagtataagtttagattactgtgctataaattaactcaataaataacacacaatattatcggtataatttttatcaaagttgtcattaaaattatgctaaataatataatattatgggattttttcaataatatacttaaaatacaaattaatttcaaaaataccttaacaaatctcatttacaataataccttgccacgtcttcaaaaaaataccttaatttgaaattaatatgcctgaaacgaaattaatctcaaattctactttttatttttaatttacctccgttttcaaaagtaactatttggttacttagttataatgttgataagaaactaattagttaattttacataaaaaaaaaacttcatttttatatcatataatttgagatacaatttggttacctccaaactttatttgtaaacatcttaataatcaattaattatttttaagttatattattgtatcttattatttaaaatatattttggtaatcttaaaatttattgaaactaatgagttgttatgtaatataataa

SEQ ID NO: 387340 - DNA, 828 bp, Cannabis indica
tttttatgggatctctctctctccctcttaaaagttgtaacagtcaacttgtaacaataattccacgtgtatgtaaagtgaatggtgagagagtcaaagaaagcagcaataacaatcgcagccatctaatattccacaacctcctcgtacaaatttctaactcctcactctattattaattaaagatataataccaaaattttattatttttattattttacattttaagatgagaaatgctaaagggcaccagtggtgcctaacaccttcctatgtgtcaatatcgctattggtaaaactaagtatcgggtcccatataatttaatataatagtttttagggagtatcgctagccaatcgcaacgcgacatgtcgcaaaggtgctagacaccattggtgcctaatagcaatgctcttttaagatatatcattaaaattttatttattttttattaatttcaaatatacatatacaaattcccataaaaataattattaaaatttaaaataattaataaaatatatttaaaacaataaataatatcttatgaatataaaacataaataataatttttttaaaaaaataaaataaaagtatttagagtattagctataacatgtttttaatacagttgtttaatttttttttttgtgaatgttctaataatataaaacgtgccacatcagtgtgatagtattagtgacagtggccaaattattcataacttttttcacatcaaattaactatattttattactatgtatacccacgaaattcagctcttccaaaaacatttatattttataatattattaattaattaa

SEQ ID NO: 387341 - DNA, 1011 bp, Cannabis indica
aacttaatctaaaccaataaaaaatagaaaaaccatacattttttgccggtgatggtggcaaggtggtggtggaacggtggtggcggcacggtggtccggggatgaccgcgggtggtgcgagacgaccgcacggtggtgcggggatgagcggagggtggtcgggggacggtggtgcggggacgagttttgggtggtctgggtttttggttttgtagaagaaagggtctggtttttaagttttttggtctgagataaaaggaagaagaagggtctgatggtttaattaataaagtattaggggcgacatatgttgccccaaatagtcgcctccaatggtcgacaagtggcagcttttcaaactattaggggcgacgaaaacatttagggcgacatgtgttgcccctaatacctaattttgtcgcctctacacgtgttaggggagacatatgtcgcccctaaagctttaagaattaaaaaaaaagattaaataaggggcgacaaatcaaagtcgctcctaatagccatataattagaggcgacaatatgtcgtctcaaatttagtcgcccctaatagattaatttgttgtagtgacttcccgacggtttaaaactatcacctatataacagggtataggcgacgattttaaaccgtggagaatgtaaaaaaacaagagaaaataattaaaataaaacagctaattaattttattacaataacaactaagtttaaaacacattaaatttatataataataaaataaatatatatactaaataaaaaaagtatataaataaataaaagtatatataccaaacttggagagagagaaggagacggacaggatgtggtggtagtccgatgtatgagacggagatgagagggacaccgacgggagatcgatggtggtggtctgacatatgcaacgaagaggagagggagactgacaggaggaggggtgggtggagatcgatgtgttggaatatatttttccaggatttagatttacta

SEQ ID NO: 387342 - DNA, 853 bp, Cannabis indica
gagaccaccataacagatgtgaacgtttctcaacctcggccatgaccccatctggtggcagagtaaggtcatacatatgggccaatattgtcttaaagccaattattttaacggctttttacaccatatattgaaatgttaacatgatatttttaattttttattgtgagacggaaatatttttaaaaatactgtataaattttatactgtgtattgtattatattttcacagtttttttagttattccactgttgtttttttacgattgtttataaaaatactatttttggaaaaaaaattgtgtgacagtaaaattgtaaatttttgctaaaatctagtattttttataaaagttcctattttaagtccaccactgattggacttccaagttaagcccacgtcaaattttaagtccatcactgattggtgacttcaatcaggcccacataattttagacccaaaccaaaaccattcaatttttattaaataaaaacaagatgaacaaaggaaaacattttgagataatttcaaaagaaacataaaaacaataaaaacaaaaaagaatttgttgtggtcaaactttttcaactgttgtttcacttgcatttaaatttctaagtttaaatttcgacagtaaaaccttccaaattactaaacaggttgaaaatttaaggcatcgtctggttaactgtcattatggactctttatgtgtatactcttgtacacaaaacacgtttatattggtagatctaatattattattttagaataaatactataataataaaaaataaaatatttaaaaaaataaaaaatatattaaagattttgaaataattttatatttt

SEQ ID NO: 387343 - DNA, 1489 bp, Cannabis indica
gtattcaagctcatacccattttctccataattgaggttgaattaaataaaaatacataaacaagaattatgattaacacccagaaaaagagagagagaatgagtggtataccttagtcccaatttcagaattgaagtcgtacttttcgatagcagagtgaaaatcatcgacgttaaaagtgactccttccatgggacttgtacggcaacgttcgtaagcttcttcgaagagttctttaagcttgagacgctctctggtctgagcattggaaatggctacagctgagacaatggggagcagagttggtggtctattatgagtctgttgctgcttaggaaaggagaaaggcttagagagacgagaagaagagagtggtgcgcatctaagtccagtgaattgctgagccaaagacgccatggctcaaagctcaaagctcaaatctttcgttgtgtggattgtgttatgaagtttctggttctgaggctaaagttagataaggcaaacttgtattaaatcaatggctatatatgtcaagaaacatgtctaacactctcatatcataattatatcaaaattcaaggtctaaatgataataaatcattgatatcaaactattgggctttagatgggccttgaacagttgggcctgatttagaaataatttactggattattagtttttgatgaaggacattaaacaagaagcaccagtggtctagtggtagaatagtaccctgccacggtacagacccgggttcgattcccggctggtgcaatatcaagctgtgatgattctctagcgtttgatgtgattgatgggtctttcacaaccgtctgatcagattgattaagggtaaagcgcttctgagcttgagtaattctttttttgggtttgccaaaataattttaattttaataactatatttgagttgttttatgactaggtaagtaaattgtctaaaaatgagcatactttaattctaaaaaaaaaaaaagaaatggcacaatttaatagtagacaaaaaatacatacatagagttgttgaacaaaatatatggtattgtgtcatccacgagctttttactcataagctttgatattgattttgcctataaatctacttttgtatattatcacacccttgagaacataattctggtgtatcggatctaattaataaaaacaaagtagttgtaacccccggttataaaaaaaaaaagtatgtaatcccattatcatcaggacatgagaggtgaaactagggctgtacatcggtcggtttggacggtttatcctatatattttctaacccaatctaaagttcgggttgctaaaatttaagtgcaacccgcccaatttaaaaaaaaaaaatctataaaccgaccaacggtttgaacggtttggtcgggttaacccggccgcccaaaccggcctaaacgttttttttttttttttttaaagttcaaaatcaataaaaaattaaaaa

SEQ ID NO: 387344 - DNA, 2727 bp, Cannabis indica
ccccagtttactgatagtattgctataggtggtcaacgttccaggctcttggaattcttgttccatctagtctcttcatgtgataagttccatcttcaattttgttagttacttcatacgggccttcccaatttggacctaagacccccactctggcctcctgcgaagcagggaaaactcttctcaaaacaaggtcaccaatttaaattttctactcttgatctttgagttaaaattcctggcaattttgttttggtacatctggagttgcacctgtgattgttttcagagttcctcaattaaatataaggattcttagagtagatcatgatttcgagttgggtcacatgtatccctcctatgtgtagacacaatggattcgattggtattacgacctcacatccataggtcatggaatatggagtgtggtctgtttctctcggttgttctgtaggctcgaaaaaccctggaaagttctttcggctagtgtgctttacaagcctgaagcatcttttttaaagtagtcttctggattttattgatggcttcaacctatctgtgtgcttgaggtctagccacagcagaaaagcttttgattattccgtgcttgacacaaaaattgatgaactggtcactatcaaactgttttctgttgttagacactatttgagtgaaagtccatatctgcacactatatttttgatatcgaagtccagggccttcttggaagttactatattcatgagctcggcttccacccacttagtaaagtactcaacaacgacaatagaaaatttgactcctcccttgccggttggaagtgatcccactaaatctattccccaaactccaataggccaaggactactcatgagggttatttctattggcagagccctaggaacttttgaataacgttggcactgttcacatatgcggacatattcaatgtaatcctttttcatggtaggctaaaagtaaccttgacgaatgatctttttagaaaggttgggtccggatgtgtgatctccacaaaatccttcgtggaatttatgcatgacaatgcttatttctttcctagctatgcatcgaaggtacgacatcagtaaccctctttggtataaccttccatccatgattacatatctaggggcctggtaccagactttccttgaggcaactttgttttctaggagtgtacctatttctgggtactggactattggtactatccaggaggttgaatggtcaatggcaaagacccccagtccttccgtgcttggagttatcaaatgtgcaatgaggacgagtctgtatttttctatttctgggtatgttgttaacttttccagcatatcaacaaaagcattcttgtccctagagatttgctttatagagtaatgttttgaagtgttgcaacagttctcaagttttggctacgtaactggccatcttctctccttttgtctagtactctccagccacctgattgaccataagctgtgagtcactgtagagttcgatgtacttagcaccaacttcatttgctaatagtaaaccagcaatcatggcttcgtgctcatctttgttgttggaggcctcgaattcaaaatgaagtgcactctgatgctggaggtgttgtggggatattagtatgatcctggcaccaacacctttctcatttgatgatccatcaacatatatcctccaaacttctctttccggggtcgaagttttagggtcatcatttatcccagtgcattctactatgaagttagctagagcctgacctttaattgaaattctgagttggtattgtatgtcgaactgactcaattctattacccattttaggagtctccctgatgactccaatttttgtaacacttgacaaagggggtggttggttagtatcttaatagcgtgggcctaaaagtatagtcttaacttctaggaagcaattagtaggcagtaggaaagcttttgaagcattggatatttagactctatgcccaacagtctcttgcttacataatatactggaagtggtactttttttttcttctcgcacgagtgtggcgcttagggcatgaatagacactgctaggtaccaaaacaacggttctccgtcaactggtttggatagtataagggccttcactaaatatcttttagttactggaaggctgtctcgcattctagtgtccacttaaacttgttatttcctcgaagtacattgaagaagggtatgcacttgtctatggatttggaaatgaatccactaagtgctgctattcttcttgtcaatttttgaacatccttatgtttcctgggtgaaggcatatctataaaggctttgattttctccgggttcgctttgattctttaagagttgactataaaacctagaaatttccctaaagaaactccgaaggtgcacttctttaagtttaatttcatttcgtactcccggatgatggcaaaggcctcttttagatcttgataataactttcaaatgtcttcgactttaccaacatgtcatcgacataaacctccatgttttcacccaggacattttagaacatcttgttcaccatttgttgatatgtggctccgacattcttcaaaccaaatgcatgaccttatagcaatagtttcttttgtcagtctagaaactagtatgctccttgttagccacatgcatttttatttgattgtagccgaa

SEQ ID NO: 387345 - DNA, 1716 bp, Cannabis indica
attattatttatgagtatttcttgagaaagtacttgaattataggagaataactacgaatattcactcaatcttataggatatttccttcacaaaatgatcgattccttttcccctttgtccctatttatagggttttaactatgatagttactctttttcgatcttatctagataactgttcatgaaacgtggtcaatttccacgtttcatgtttacaatatatggataaaatgaaaactgctgataaccgtcttttgatctaatttggaagtagtcttttgttgtcaaggtaacctattctatccatggctcgcattttttcatcgatgctcaggaatagttagtcgcattttgtgagacactgattaagattattttcctcactgtttcctttttcggtaattactgaccagtcctttaagaactccgagagtggttgcttctgacttattttccttaatctttcaacatactcacgagtatgtgggtcgatgagttgcaagctcttaaaggactcattatctaccctttccaatgatacagttttggtctgttatactcgaaatgacttctatctttatcatctcaccatacgttgtttatctcgctatctgtttgccaatgcataatgcgagacaagtattgctctttatttattatccctccaagacaattcatttattacacaatgagtttttcataatttttgtgtctaattatccacgtgtcatgtccatattcatggctcaaaatatgggcataacaattgcccctaaaaaattctttctaaaaataaaagggtttttttgcagaagctacaaatggacattttgatcttttctctttcaacaatgagtactttctttggcggtttcatcttcttgagaaagtgtattccatcataaaattgtgcatcttttcaactgatgggcttttcaactatcctttcattttatcaagattgaaccccagccgcttgatctaaatttgaaacctgatcaatggttcttcatctttcaatataaaaaaagtttttaccattgccttcttcctttcttcactcgaaacacaaaactagagagaaaaaacctattttattcaaaaggttcttacatgctcggtttttctttgacctattttcttcgtgtaattaatgttattttttctcaaccaagctcccgttatatcccctacccatggtaccagcgatttcctgtgagaaactatcaacgctatcatagaaactcagaagctggtaagccttcgttttccattcttttttatttttattttctattatttcttttaaatgttctcgttctgaagtaattaggtagtttaaattttagaaactcccttccccggacttaactattttcagagttttttgaatgaaaaaacccaaaacaatttaagatcacgacctgaacattcgaaaacaattttagaaattaatgatgagaaagttaagttgtttaacaaaaaacttgatcgagaggatacttctattcactctagacatttcattgatgaaattattgatggaaaatgacatttcctgcgagatgtggcttggtcagaacccctttgtttaactgtgtatccggtagcgagcccattatttttatccaaagttactgttacttttcctcaagtcaattaaattttgagatcatgtcttcaaaggaacgtaagtctaagttaccccaaaacc

SEQ ID NO: 387346 - DNA, 1787 bp, Cannabis indica
tctatagaaaacttcttaaatacttggcttaattaaaaaaaaaaaacgcattgaaaaataagactagtaatatatgtgcactaaaatgttatgttctcaaccaatcaaattcttaaaatgagagatctaaaagtacttacaatagtttctctaaaatagaaaaattttaaaaatttaaaaaaattgtactaaaaaaaggctataacggatgctttaaactctatcttcattttaattatttttttaaaaaaatttactatttatgtattatatatatttatataatattactcattgctctaaacatattttaattattttaaattttaacaataatttttgtatagaaatatgtgtatatattaatataatatatttgatatgaatgaaatataataactttttaaaaaaatagagtttagtgaaatattttaaagaaattaatgtatagtgcaatgtaaaaatgtattgtaaaatagagaaaatagagttttaatgatatattttaaatgatagagtagataaactgataggagtactctaattagagatagcaaaatatgtcaatgaaagcggccactcgaacatgataatgtttgtaggtcaaggataaaaatgttaggtgtagatcaaaagtaggctcttatgtaaaattattaacaataaagagtttgttatagttagtcttagcttctcttagttatacagctatattgtatcagtatttagtataaatactccgcaactactcttttttcaactaatgaaatcattctgattcattcttctttttctgtttgctctatgagctaatatggtatcagagctctaggtttccttcctagctcgttttttttttcgtttcctctcctttcttctttgattttgttgcagaatggtgtagactcattctagtggtgctcaagaaacaaattcctctgttaatgtcgactgtgttgcgagtctcgtggctaagattatatcataacactattattttaccaaatatgtagtactatttcacaaataatggtgtgataataataataaatgtctttataatattaaaaaaattaataaaaatcaattaaattgttttgatatatgattattattagttcataaattttaaataacgcatgcaaaaacaaaatttgtacaaagtttatttagaataaatttaatatactaaaataattatttatcaataaatcatgcaattttattagaataaaattcaatatactaaaaagttggtatatttttttttgacgcggtgatcaaaatcacacatgattaacaaagcagcaatctacaatcggcggcagcatctcctcaaagttcgtatattttatttatatatatttttaacaaagttatgtaattttattaatagtaattagctaattaaatagtaatctacaatatctaactgggacatctatcccgttgaaaatatgatcaaaattagaattagaaatacgagtcaaataactagctagtcacctaatttctaaatcgttttcaaaataaaatcagataaaaaatattacaatatatcacaataaacttaagaacccctatatttaattttatcttatctctcaaaagtcacaacagtagaaattgttgcagcagattcatttaccttgttgcagcagattcactcaccttgtaatttatttttatatatttttttatttatgtatgttgcccctgaattcgcccaaaatacgtggaccagtcgaatagggacacgtggatcagataactggtaaatacttgat

SEQ ID NO: 387347 - DNA, 598 bp, Cannabis indica
aaaaaactctaacaccatagcaccacactcatatattggagtcgtagtgaccttagggaacaaactgaaagaataatataatgaattgctcaaaatagtgatcaaattgggctatggtgattctaaaatacattcttccgttgtatctcccaagtctttacaatttaaatttttcacaatgccagaaatgtttataggatcaagtatgaaagatttgaaaaataatacataaatttaatgcctttaatcaagaaaaatttgattgtctatgcatttactaggttaaaattggttctctaaatctaagttaacctatattggtagaataggttaacatttcataaaactcaattttatttctctcgtttcaaacacctgatcttctctcttcctcccttctctctctcgctctctgaactcaccctaaggactcgcccacaacccacaacatctctccacgaccaccacgaccacaaactcaacgaccaccgcagaccaaactacccacgaacccaacgacttttctatcaaccgcaacttcttcatcgacaatatcgtcaaaggtaagtataattttttttgcatgatttagggttaa

SEQ ID NO: 387348 - DNA, 1010 bp, Cannabis indica
aataataccgtgttatgtgtactgtgttaagtttttattgttgttttacgattgttttttagttgtttcattgttaatttaaattattctgttttattgttttatgattattttataaaaatattgtatttttgtaaaaaatttcgtgtagtagtataaatttttgcctaaaattcagtaattttgtacatatcccaaaataaaataaagactactcctaacctatctgaagcccagcgcccagcccaaccttctcaaataaaagggctatttacaaaaatataggaaaataaagataagttttgatatatatggtataaaaacttttttttttgataaagtgggggtgtccaaggacacccattcattaaaaggcaaaagccagccaagttcaatcaaaaaaaaaaaaaaaaacaaaaaaaaggaacagagccaacaatagaaaagaaaacacaataaaggaaaaaaactacaaattaacgcaaccactagaccactgccaggatttatatagtcagtgtaggcccaggatcccattcgctgaagtcatcaagcactccaccaggaagctcatcaaactcaattctcccagatttttggtgcaccgctgcccatttagcaatgttgtgcgctatgaaattacaagtacgagaaatatgatagatatcccattcctcgaacttggaacggcaatctttgaaccgcgccaaagcctcttggattctaaaatcctccttgtcgtgagccgatactacgaaggacttagctacacagagattatcacaaaggaatataatctgtttcatacctgaatccagagcaaccttcgctgccaaacactacaagaaaaatatcttttagctaccatgcttttagctaccaaattttattggtagcaaaatgtagcttattgctaccaaattttagtagtaaaatttcttagtagccaataccaaacaaataagaccaaatatttctactgccaaattatttagtaggcaattgtgatt

SEQ ID NO: 387349 - DNA, 1789 bp, Cannabis indica
tttttataagaccgttagtcacttttttaactgatcagttaaacctacgtaaagtactaccggtcaattttttattagtccaaataataatattaattaaaagattaaaaaatattttaaaattataaatgcgatagtagagtaaaatcattttgttgataaaagacattatttgatactcttagaagtttgaactagtttaacctttgatgaatttatatatagttgtccacaccgaacaaagaatcaaaaccagttattattttatcacaatatttttgtaaacaataacatattttcattccatcaatttcactcaaattcaacaatgatttaagaagacacaatttgtaacactctacaggtataggtgtgttatcgtgattttataataactgttcagttcgttgctaatcaacgaatttattaaaaatcgtgaataattaaaactttacttaattactaacaatattaaaataaactaatttttatatatccagaatttcgagcttaaaatatttacaacctattcaaaatacttaatgcaaaagttgtcgcctagcgactatacaaaatacaattagctgtcccaaaaatcgtacgctccaggcctaaccgtctcgacatgtacaatcttcacgcttgccctcacagctcctcagccttagccttgcccttacctacacatgcgaataatatctgtgagtcgacagactcaatacgaatagcataatcatactcataaatataactcggattacaattgggtgcccatacacccaactgtaatcctatccccacaacctaggcgatatttggtctagaacgttcataagacaatactatcagccataatatcagtctatactcggtactctagttatactctagtcgtagtgatgtgatagtgtcgatcagtatttgagctaaacatacatctattagtatccaatacaactctacatgtatttataccgctatcgatgtaatctaacagacttaataaacatgtacgctaaacatgtaaacgcatatgcatatcattatactaatcttaactcgtttttaaattcaagtgtgcaggtcaacctacgtggaatagttgctcgacgatttataggcgccttggattggattcactaggatcttgctagaacaccaaaaatagagctgaaaaatccaatttctctaatggttttccaaaggggttgagaggatgagaaggttgaagaggaataaggtgctacttgtcttattttcttagtttagaagaataaataaaaatcttgtatattaatcttaatattatcctcaaaaatatcaaactacaatacctgactaaattcactaaaggacgaaagaatcatatcgccaaaaagaccattttactcttgcctaagccaaaaagcatacttaccacctccgggtattttggtcaaaccatatacttcgaatattcccaatattactaatattgtctatctaaattgctccactattactaaaatactaactcataagaaaatgtgatactattggccaaagttcgcgttccaatattgttgagtataaaatatgaaaaacatgaaattatatatataatataagtaacacacctaaaatttaaatatatctccataaatttataaatcataattaaaattctaatttctaaattaaaccctaattatttgctaattttcattttaaaattaaccggtctttataattatctcccagttaaaaggattttgccctcaaaatctaacctgaataactctggatattg

SEQ ID NO: 387350 - DNA, 657 bp, Cannabis indica
gagagagagagatgaaaacagagcccatatctcaaacctaggattttgattgggggtcttggacctgcgacgccggaggttatgctaccctatgcgaggcagagagaagataacacgaagtgaagaccgagcggagagaaatcgagtcaggcattaaggtttgggagagcttgaccttaacggggcgttttattcgcccttaaccggagtaacattgggcagcagatttcatcaaaaaaaagtattgggtaacaatggttgtagatgcaagagaaaggggaagaagaagagggaggcgatagatcacttagggtcttttttttttttttgtttagtgtatttaatttaaatagaaagagagagaaaaaaatttaaagagacaaaaggagagagaaagagagatgcggtattaatgcctaatggtttatagcgcctggcatgatgtaatataaaaaaggggtaaataccatttggactctgtgttttgcaaaagttatagattggaccctgtcttttattaaatgacaaaatggaccctgtattttctaaaatagtaaaaataggaccctgagcttaatttttgataacttttttttaatacaaccaacttgaagacaatgcttaatacgaatagatacaaaaaatgtaaacagtttt

SEQ ID NO: 387351 - DNA, 980 bp, Cannabis indica
tgaagaattccataccagtccatctcatcccctgataatttctgtgcagcagagcaatgcacatgacacaccataagcaactgagaaatattctcaacattaggataaagtcgttgggccttcaaagcaatcttttgagccaccacaaactccttactttgcatcttcttctcagcaaccctcatggccctcagggcctcctccaagcgtgaatcaatactagcattaccttcaaagcctttcttcaatccatccattttaactggctctttaagctctttgctcttcttggcattgtctcgattaggtacaccttctttctgtttaacccctttctcatcatctttcatactagaagctacatcagacatcacattagatgtctttgccttttcaatctttaaaggactcacattcacatagccatcatcatcacgacttaagcttttcttgtaagagacctgttgtttatggcatgaaaatctccgtatatttttctctctagaaaagtcagtgcccagttcactctgaagatcatcactctcgtcaatcatcatttgcatgtcactgtccccctccaccatggaatcaattagaggcaaagcagcaggatcaagttcgaaagatccatttggaaatcctcttccattaccttccattttatacgatggaatcatatgggaaaacctcaatagctcacctggtggaatgtgaaatgtcttcctccctaccttgtccatctgaaagaaaacactcacaaatccatttactttgctcaatagagcaacatctactccaacatctgcatcataatcgtacaaaatttcaacataatcatattcactctgacgatgtgcagctggattactactccatttaatattccagtttttaaaaagagcccaggtctcccccattctcggatatatcaggaaagtacctccactacctttcccccaagaaacttcatgagagaacat

SEQ ID NO: 387352 - DNA, 1285 bp, Cannabis indica
tatatatatatatatacatgacattattaagttcccatgcatagtaacacgacgttaacctatgcacaacattattcatcatttcaataaatatagccccgaataataataggttcaaaaaattatttttgtgtataaagtattattgggttttctttttaaaattttttataaaatactattttttttcaaagaaaataagtatattatattaaaaaaaaattagactctaaatttgggtaggtcttatagccttataggcacgagcctagtccgctttagcttacagacgtcgtgcttgaaagtagctatagatatatatataaaaaatattaaaaggtattataatagtagtctaacagtaccatttaatatgtaatatcgttatcagtacaattaaatattcgatctcatataattaaatatataaatttttgtagaatattactaatcaatcataatgtgctaaatttagatagttttatgtatcactgatacctgataataacaatgctcatatatatatatgataattaatttatttaaaagacaatgtcatatttctttattaatgttgtcatctgagtcttctattataattttatatttaatttttatgctcgaaaatacatagaatattttttcaattttttatagccatgtttgtcatatatactcacaacatcgattcatatgaaattttgaaaaatttcgaatagtttatagtgttgaaaaggtttgaagttttttaaacacgcatatatatgtggtaaatttggaatgtcaagaactttgtttttggtactgtaaattattcaaaaaatttcaaaaatttgcaaggatgatatcgtaactataacgaataccgcaatgaaaaaaatatagaaaaaatgttaccaaatgctctttaaggtatgaacaggttgtaatagaaggttgtaattaacactcattatacatcatataccacatgtgtatgcatcatagggtgtagtatgatctatactacaccctatcttgggtgttaattttttttattatcaagtacattatagttatttaggatatcacttataaattttcagaaaattaattgaatagtgttaaaaataagattcaaatgttttattacacgcgtgactattttctcttatatatatgttgaccgaggtttttggcaaccagttaaataatatataagaaaagctgtaggaagttcaatgcatgggatttttacaaggttggggcattaatgagccttagtccacgagtctttgttattaat

SEQ ID NO: 387353 - DNA, 732 bp, Cannabis indica
ttataattattttttaaaatttacattacgtgggcgactaaaaagttgtcacgtgtacaggtgtgtacatgtgagcagtccactatggtacttaactgtgatttttagacggaggggtacagagcaaaacggaatgggagtttaggtagttttgcccctaaaaattaatttttgtggttaagtgttaaaaaatttataatttaagtaattaagccgtcaatatccctattttaaaatagtacaaactaatatatggagcttaatttttattaaattaaaattgaataataatctgactttatagctaaattgcttatatatatttaatctagtcgtgttaaaaattaataaaaattgaactcaagattagagatagaaatttgacctgtggggacgggtacccatcccaaatggggcgggcattacccgcctttatgggtaatggggcgaggcaaggtgcaattttatatagggctttttttcataaatgtacaacaaaaataacataattacaaaaaatgtgcaaaaaaaaaaaaattattttaaaaacttatatattttgaaaacttattacatgaaaccatacattttaatcattaaataataaactatgtttattaaaactcaaaataaacaatttcgtaaaattaattaaacagttttataaaaataaacaagttaatttttttcatttaaaagataaatgtttattatctattttagtatgaatta

SEQ ID NO: 387354 - DNA, 868 bp, Cannabis indica
tcattataacgctggaccgagagtgcatccctcttgttcttcaattttttcagctcatcacgacaatgcttgattcggagtttgaaatttccagttacattctccccccaggtggccaacttatctgcacaatgagtaatcttttctgctaccgaggcgaggttagagccattccaacaatctttcacaatctccaaacacattggttccttcaaccaagcattctcgaacctgaatcgcctatttgggatgaaaacaaccggagcaacaaattcaagaaagataggcgagtgatccgaaggagaaaattcaaggttgattaaacgagcttgcgtaaaggtttgaagccaagaagatgaaacaagagcacgatccactctaacttctatccaccgaggcgttccccttccttttttcccaagtgtaaggataaccaatcaagtccatatcatgtaaatcacattcctagataacttgctcaaacccagatataagccaatttggatacggttgtcctccacgcttgtcactttggctaagaacattgtttaaatcaccaactacacaccacgggtcacttgagttgttcaacaatgatcttaaaaggttccaagtatccatcatttgttgccgttggggttctccatagactcctgtaagtctccactttgggttaccatcaacttctaccataaagtcaatatggttttgagaaaagccaattattctaccatctttgtcgtttttccacaataaagcaagaccaccactcctaccttgggcctcaacagtaaacatcccttcatagcccaacccccggcccacataatcaattcgagctttattactttttgtttcacataaaaaa

SEQ ID NO: 387355 - DNA, 643 bp, Cannabis indica
ctcaacagttgagataatcaactagctgatgcaaatctttttacgaagagctatataaatataatataagatataattacattcgtgactagctagctacaataatttgatttaattattaggggttgttgataatacatgcatgaatatatgtacgtgtgataagaatttcgtaattgaaggaaatattagaacgaggaaattaggagaatggactcctatacacagatacttaatttttgtgatagattatttttaggttttgataaatcatgataagatatattttaatcttatctttattcttttggttttttgtgattgtgtatctgatgttacaaaagagggttttctttgcttggggtccaataattcaagttcccatatagatgcatgattcaactttaatttgatacaaaatacattatatatatgtcacatctaatcggtagataaaatcttaatcatggattcttccatgctgttattaatcttgaatctgactttttctattttttcttgataatcattgaggtattacatttattagaatttgctacacatttctacataatttagtctagaaatttctatacacttgtagaaaaatcatctaagaacttaagagatttctagattagat

SEQ ID NO: 387356 - DNA, 1408 bp, Cannabis indica
aaatgttaaaaggcaccagtggccaagtattctcttatgtgtcattatcattattgatctaattaagtatcggattccatataatttaatataaaatcttttagggaatgtcgctagcgaattgtaagacggcatgtcttaaagatgctagacactactgatgactaataacaatgcatatttattatgttagcagttacttaaaaatttaaattttaactcgttctccatctctagagaaagacaaaaaaaaagtacataattgtgatagaatcaaagattattgactgacctgtaatatcaaagattgtggaattaatgttgattttgaattatataaacatgttcattaatatcttcggttactttacttaaaatttcaacttcattaattttgactatatagtatgacaaaaacgtacaaattaatcataattgtgacggtatatatgaaagtagtaattactagtactgacctgtatcagagataaggccagagcggaccatatcaggtatagcaacgaccaagcgataaacagcgagcatggcaggccaaaatccagcgactctaacaccacaacggttagccacttcaatagcccaagaagctaacaagtcgaccaccacacacaccacatcctcaccttgatcacgaaccaccctctccaaatgagcaggcatcactttctccatggcctcttctagggagaagaaatctctggccacggatgattttccctcgaatccatcgggtatagccacgaattcgatgctgtcattattattattattagtttggtggtggtggtcgtcgttgtgtgatgaacatgtcattattatttctcatgatcatcatatcgagcaatgatttgatcgtggatgaatcgaagggtgacgaagacgtgggcgaaagccttggtcgagattaaggaaacggccttttgctagagtttagcgatgggagttacgtggccttgagctggataggggataaacactatgatttttgactctcctgattttgaactgtagttcttcataatgtttcactggttttgctgtattatcttataataatcagggataatgaaaactctaagtttttttttgggaagggtgtgatcaaatttgaagatgggggaataataataataataatgaaggttggaagaagaagaaatgaatgaatttatatattggagaggaggatgagagagatgatgaagagagaaagggagagggtcaactataagcgcatgtgcctcttatggtctctattaatataaccgactagtatatattagtcactcgttcaagcaactgttaggaaatacataattaaaaatgtaacattgatctttcttcaaaaaaaaaaaaaatgtaagatttatattaggggtgttcacaa

SEQ ID NO: 387357 - DNA, 1169 bp, Cannabis indica
taaaacactagtagaacacaagacagaacaactcaaaacaccagtagaacaacaaaaaaacatcagtagaacaccagtgaaaaacttaacacaatatactgcaatatgaaacttataaaaagacacagtaaaaaagtaaaatataccgcctgacagtatttttgtaaaaaaatgacaaaagttagtataccatgtaaatttctctttgtcaattcaatatcagaacactggcatgggcatgcacttattgtgcaatatagtgtgaaaatatacaaattagagaggagaattggaaaaaattaaataaaagcttaaaattttgaaagaaaaaaaaaattaaaaaatacagaatccaaacaacattacaaatatataattagtactgaaaggatataatcacaaataaacacagtgtttatttttctaaaaagaaagctaacaaatttataacaatacactttgttttgtaactgaagtttttacaaatttataatttaacttactacaagttaaattgataactattacaaagtactgttacaaaattattacaaattacaaatatgaaattttaaaaaaatagatatacacctaagctataaaagacacatatataatttgcatgtggtacgtacactaaattgaaggtacgtactttaaatgattattatagactgaaagtattgttatcattttagattattattattagagagatctgatattcttcatactagctaataataataatatactgcattgcattattatcacaataaataaaataattaatactatactactcttcatccttagattcctttgctgtaattcaccaatttttttttttttgacaaattttaagtcaacttattatacttaatactttttggaaaaatattaattactttttctttcttaaaaataaataaataagtctatatatggatatttaagagcatgcaaaatgcatggttggtgcagttgtatcattcatgccagccttgctcattactagactacgtacccacttggtatgtatatactatatatctacgtgttaacatcatctatattatatatattgcatataaatatataatatataatattcaatatattatgactcatatttctccaaaccaatatcaatatgtatatattattac

SEQ ID NO: 387358 - DNA, 965 bp, Cannabis indica
tttactatacagtaatcaaaatcataataaattaacaaatgaatgtaacggaataaataaaaataatcgaaatcaatatttgtaatatgttgtttactaaagttttttgaaaatggaatagttgtgatttattttgtttactttattaagaaacgtaatcggaatgcttaaattgactaaagtgcccttttgagttaaaccatattatatagtagttcttttgtaagacatattttaaaggataaaattgtcattgtatatttaatattaaaaataaaataaaaataattaaaatcgattacccttaatgacattccttacaaaatttgtgggggatgttctcccttcttttctcccttatttaaccaagttttctctttcttaattttaataatgtaagtaaacaaatgtaagggaatgattaccataccattgattcccattacttattagtaaacatgccataagtgttataattttttctctacgaattttgactattagttaagctatatctaataatttagtgttagcttaagattatcagtttcctaatctaattgggagtctattaaatgtaaaacttcaaagaaaaagatcaaaatatcttttctcttttccttatggcttagtaattttaaaatttctatgagaataggaataagaattcttaatttagaaggtaaaagcaattcttaatgctattaagattcaaataaatctagagtttaaaaaaataataagcaaaagatcaaagatcttatcttttcttctattttttttagggtgcgtttggaaagccacaatgtaattggatttatctggacttggaggtaattaaaaaatgtggcatgtttgtctaaccatgtaattacactgtaactgtgtaattggaagtagttgaggagttccaatttatactctcaaattctcatgccccccgtgagaattgaatgtaattacac

SEQ ID NO: 387359 - DNA, 597 bp, Cannabis indica
taaagagaaacactgacccaacggccccttgggaaccggcatcgtcaccatgaatatcgagatggttcaatctaaggaaagtgttgtcgctggcgggagtagccatggtctgctcgctacggctagagggtgaacccacactgccactcatggacaccgattggccggaggcggtggtggcgagcccaggtaggtcttcgtcttcgtcagctccggtggttggctgggttcggttacccatgttaggaaatcaaatacaactgattttggagccaaaatcttttagatggaagatttaagcaatctgaattaacaatcacagtttgaatagaattcagctaaaatttctctatgcttgaagcaatttaggtaggaattaggaaaaggcaggtaaattttccaactcgattttccgtcgaacattattttcccgagaaaatgaaatcagtcacacacttacccaaacacgtatatgcccatttttgctactctttccaaaagcttatgctaaagtaataataacatatctttcatgtaataacaaaaaatagttatattttcatgtaataatttcatcataataaatagaaattcttt

SEQ ID NO: 387360 - DNA, 827 bp, Cannabis indica
agacaatgttattcccatttcagtaagaactgaagtaatccatactacttcggttgctgttgtggacagagctctgtattcagactctgtactagaacgagctacagctcgttgctttttagaaccccaggtgattagattattgccaagcatgacagtgaagcccgtagtcgattttcgatcatcaagattgcaggcccagtcagcatcagagtaggcttcgactgtcattgttgttgcaggctgaaaaacaagaccaaggttggtggtgcccttgatgtatctcagaacccgtttgcatgcattccaatgtatgttggttgggttctgcatatactgactgagtcgattaattgcaaaagagagatctggtctggtgagtgttagatattgtagagagccaatgatacttctgtagagcttagggtcatgaaacaagtcctctgtattggtaaacaacttattaccaggacacataggagtgctacatggtttggaatcttccatattggctttctttaggatatcttgagcatatcttgactgatttaagtataggcaagaatcagttctgtgagcttgaaaccccaaaaaatagctaacagaaccaagagttttgagtgcaaacttgttgttgagagctgtgataacttgctgtatggcatccgaatcatgaccagttatcaatatgtcatcgacatatactaagacaagtaacagatggcctttgttgttagagatgaagagagagttgtccgagacagagttgacaaatccccacgatagcagtgctgttttgaggtgttcataccaagcccttggggctt

SEQ ID NO: 387361 - DNA, 834 bp, Cannabis indica
accactgaacacctcaggtcctttatttggagggaattctgggatgtttggtactccgctgaatctcccaatacaaaggattaaaaacttaaattgatagacctgaccaaaaataataagacagacagtttaaaagcaagttttggagatgactttgtattttaatgagaacacttttcacatgttaatttcatatatacctcagttgagcaagttttggtgtcctgtaccacaacatgccatttccctttggactgaaatggcttgcctgttccaccccacaaatcccaactctccatctcttcataggattctccattgacataatccaaactaaggacttttgagttgaactttatgtaaggaaaaagattaaagtgtttagcataagattgaatatactccaacacctgattgtgcctaggaaaaacgtcctctactgaagaaggccaaggaaaatctgagaactggtaactttctttagcattttggagcctggtggactctatagtgtgattccaaagccctccaacactttcttctgcttcaaacacaatcggattaaagctcttttctaaaacatatttgcaggcagcaaggccacttgttcctgctcctataatggctatatttctttccattttttgtaatgaaaacatatgctttggtgaagagacaataattgccttataatatatattgaggaactattatggccccgaccaacacacccggtccccctaatagtgtatagataacattggatcacatccaatagatttggacccatccaatccaatccaattatttattggatattagatttttccatcc

SEQ ID NO: 387362 - DNA, 2172 bp, Cannabis indica
ccaaacatttcattgctcaagtctatcaagatcatttactgtcaagatttgacatcaatactggtggaagggattgagagccttccctccctagagtatatgcgtataaccaactgccccaatttgacatcaattcccaacaacttcagaaaagtgaagaattctactatttcagattgtcctcatcttgaacagagataatgtaattgaagttactttgtgagtttgtctttctctctctccctctttaattgttattaatttgatttccttgaaaattaaacagaaacaggtcaattatattgaggattgctattgggcactagtgctgcctaacacctctagatatgtcgttttgcgattggctagtgatactctctaaaagttattatattaaactatatgggtcctgatacttatttggaccaatagcgatattgacacatagaagggtgctaggcactactggtgacttttaacatttttcatttatattattcatccttgtgaaccaatgggggcctgctaaccatattttaattttatttattttattagtttgttttttcatttgttgtttttgtgagtgtcatgtatacaagtagttcaatatatgaatatggatatggttttctcatcctcacctctgttgtttgatggtcagcaagcttaagaggcaaaacggaagcggtgttctattcaaccagaaaggtgaggagcagagatattgtaattgatgttttcccttgctgtacatgtgagtttgtctgttctttctcttttttattgatttataattgtgtattttatgtaaatatgtaatatttgatttcttattatgtttgatggaacaagatcaaagaggtgtccaaactctgggaaggctgcattgaattaattcaaactctcacagggcagagatcggtaagtattaattcttcccttcaaatgataccaccttcttcttttgtttattattatttttcctaattcataatattacattgtgttcttcaatcctcaaattcttattacattaaaagggtttttctttttcactttaacagtgcattttatttattgtatatgggatttcttatacatgtttgtttgtggttttcaaaaagagaatatcacaaaattaattatttgatgatgttatgttagtaccttttataaactaattaatgatgtttgattcacttttacttgtgtgtatatatacagctttattatttcaatcataagatatggtgtgaactgtgaagagaatgtttcacactaagtaagaaatgactcattacaaacttttaatttctatctatgcataatgacaataataataataataatcacagtgctttgttttgttactgagtttaatattcggatgtagctcaaaggcattagaagatacgttgaaaatgatgaggggaaggaacattgagggtgttgaggcacacaacactcagccaaacatttcattactcaagtccatcatgatttatacctgtagcgatttgacatttgttgggattaaactcacttaacatgtcaaattaatatgttcatctatttgttcatcagataaatctgaagaaagctgctgctatctataataattggcttttaataccaacttaaaggggacccactaacaactatatataggggttcctttattctcaaaatgagagttctgagttttaatctccaaaactcatactttagattcattagagagagagtccaagatcatagtgagtgtgtgtggagggatgtaatgggagtatcactcttgaagtgatttccctcaatgtgaggcatttttttgtaatactttactgtgttgagttgtaatcttgggctcattctattgtgtactactcactattcctattcaataaagatccatcattcattcattatcaagctaagttttctttgtttatttttcaattaagttcaagttttgattttgtgattgattttagttttgaattgtgtttcttggacattgttattgctgtaacaaccggttttgagggtgaggtttcaccacaacatcactgtcccaatttctgtatatatgactgtcccaatttgacatcaattccagacaagttgagaaaattgcagtattttcatattgagggttgtcctaaggttgaa

SEQ ID NO: 387363 - DNA, 837 bp, Cannabis indica
tttacattttaccacttagatatagttttggcttccgcacacaacaatatcaataatatttatgtgcaaaaagaaatcgcaataatttaaatttaaattttagttattattattattatctttattaaatattttattgcaaaagagttttaattttagttttaatatgctcccactcttgattattaaaaagattcaccctcaatttgattgttttttattttttgataaatctcaattcgaaattaaaaaccagaaatactttaaatataatttagggttaatatcattttgaactctgtattttgtaaaatgattgaactatctgttttgttaagtaacaaaatagtataaataagatcatcagctcaatttttatcaattttttttcttatataactaacttgtagataattcttaatacgaataaatacagtaaacgtaactatttttgtcataatacctctagatcgggttattagtaagttttattttaacaggaaatcagttcataatactatttaatacttcttttaaaaatacaaggtccaatttattatttatcaaaacagaaagttcatttagtaattttataaaatgcaaggtccaaaatgatattaaatctataattgaagacaataacaacactacacatgaattttattactttacaatatcactgtttcatgtaagaggaatttaaaattactacacacaacagaagtaatgcaattacgtagctagctatgattgtaaataactcctaactacaatttaaatttactataaagtccccactatcggtaaaagtaaaaatacttaagtggcgtttggttg

SEQ ID NO: 387364 - DNA, 608 bp, Cannabis indica
cagcaggttatggagcaggtgagcatttggctgggaatcaagagatggccgactagtttccagagctggcagcagtggctgctacagaacaatagggacaagaagcatcggattcatgtgtcgatcttggcagccatgattttcagcatttggagcaatatgaacaattgccttttcaacaaatactcgagtacagcaacaaagactacataggaaattaaaaaaaaaaaatagtgtattatagattacaaatagctaaaaaaagaagtttgaaagatcatgagaagagatacaaagagagaatttttatgtaaaagctagtttgttgcctagctttttggattgtttagctttgtaattgtttgtgattaatgaagattgttccttcttgataaaaaataaaaaacaagagcaacaattttatctatttatctaacatgttgccttttaatcttgaaaaaaaaaaagaaaaggctatattattttattttttatggctcctagaatatatgtaaaagattgtctattttctttgaaaagtctcgaaaaaaatggtttgtggttgataactgtaacaccctaactaacttaggcgtattacgtgattt

SEQ ID NO: 387365 - DNA, 1981 bp, Cannabis indica
tgagaagtaaaatttgcattattgggaaaaggaagtcttttttgtttagcaagagggcaaatatagcaaggttcagtattatgcaaattcttagtgttacattgtaaggaattttgaagcaaattcaagtatttatttgacaaatgacctaatcgtctatgccaaatttcagcagaagtgaaagcattaatagagacgggagtggtatccaagatgtagagaccatcatccgaatcacctttgccaatcatcttcttggtgtacatttcctgtatgtaaaacttattagcaagaaacttcactttgtgcttgtcatcatgagttaaacaacttacagatatgatattatatttgaaagtgggaacataaagaacttcatgaagaatgagatgatcatttatgtgaacatttccacttctattgaccataagatgattattgttaggcaaaataagtttagtaggatttataggatggatattttgaaagaaacttagatctgaacaaacatgtctatttgcaccagaatctaaaatccaagaattgattttaggtagaggattgcaattagacaacacgatactaggattacctgttgagggaccagggtctgtagggatttggctactggtttgagcagcaaggagaccgagcaattgttgatattggctcggtgtcaactggggaagtatagtgttgctgtcagtgttgctgcaaccggtttcagtggtggaatgaaattggtttgctgcaacatcttttgattttgctgatttgttgtaccccggtggatagccgtgtatcttgtagcatttctcaatggtatgtccgtgcatattgcaatgtgtgcagaagggtctcccacgttttggttgttgagctttagattgttcagatttgcccgtggacttctctccttgaaaggcaaacgccatgctggtatttggatctgcagtagcgttctgtcctcccctttgattttcttcttgggaaacaagatgaaaaactcggttaatttcaggcataggatccatgacaagtatattacctcttacttgagcatagagatcagacaatcccattagaaaagacatgatgtactccatattgtggtgttcttgcaatttcttgacccctccgcaagaacagccattgcacgtacaatttggtctgaaattggatagttgttcccaaactgttttgagcttagtaaagtacatgctcacagtttgcgattcttgtttcaagttcatcaaatcttttttaagattgtagatatgggctccatttctttgctgaaaacgcactctgaggtcattccatatagctgaagccgattcatcatacaagatgctagatgaaatttctttagaaaccgagttaataatccaagaaatcacaatgttgttattacgaatccaagcattataaagaacatgattagagataggaggtttagaaattgaaccgttcaagaagcccaatttatttttgactgaaatcgccaactccattgctctactccaagaaatataattttcttgtccagttaacaattgggataccaaaatattcccaggattgtctccgtgatgcaagaaataaggatcagaaggatcttcgatttgacttcttgatctgtttgtctgcacattgatttctgcatcagatatttgagtctgattttcgccattgtttatctggatagaagctccgtcttcagttcttgtctcttgatcacttgtcgacatgttgaagttggtgtgacgaggacaggaattcttagaagaacagagaagaaggaattgtcgatgaagagttcaacgaagagatgaacaccttcaatacagacgacgatcgttgccggaggagaaggactaagacacggcgaagacgatcggaagaattaggatcggaaggaagcatatcttccttgctctgataccatattgcggaaaaggaaaagaacagaatatgtttt

SEQ ID NO: 387366 - DNA, 816 bp, Cannabis indica
ttttactctatccagaatcctgtcagcagtcattgctttgactgattgtctagcttggactcaggagcagctttacttagaaacatatcaatgactcagtgagccatcaaatgaaaaccttattttattatattgcaatgacggttttatatactcccacttacactaccaaatttctatcaaaacgtaaataccaaattaatcacttaattttaatctgatggaatcgatatttatcttgcgtctgaaaaataaaaattagaagagagaagtggatggacgagtaagagaatagtgaggagaaaatttgaagttgtaataagaaaaaagaaaaaatacagtgaaaaaatattgatggaatccactaaaaacaattttttttattacccactaacaacaattcaatggagggaatttgtttcatataacttttttttcaaatgtaaagtaatttccattgataaagctttaaaatccaggttacaatcacattaatcaacttagaaagacaccattccaaatgaactctttatctaagcttaatgatttcctaatgaagttatgagctaatataatgtgatttctaagtttctcttttttctcttgaaaaatcgagtttttacaaatgtcaacaatatatacgaaaatataaaactgtaaacgtctgtagaagtagaatgtaattctaatactgcagagaccaattttgcaacgacaaaacagaacagacataatataaaaataattgcagaaaattgaatcacttgacacaagagatttgtacggggtatcagtattctttcgaacactcctagt

SEQ ID NO: 387367 - DNA, 513 bp, Cannabis indica
gggtttgagttcgggtccggagtccgggtcgtggtccaggatccagggtccgggtgtgggttcaggtacgggtttggggaccggtccgaggtttgggtctgggtccgggtttaggatttgggtctaggtctagggtttaggtccagggtctagggctggggttggggttggggttgactcctaaaacatttgtaaatattataatacaaactaatacgggtcatttattatgtatcatataatacgaatcacattgtattaaaatttatggttgtaataattaatacaatataatattttatccaaacatagtattatttgctattaaatacaatacgactcttatacgatctaccaaacaagctcttaaaaattgtcatattattaaattaggaaacacggtattgcccaatttttataattttatatataatatatatttgggaaatcaccatatatacgtacttttaacttttttttttagttttacgatatatttttttttactttttt

SEQ ID NO: 387368 - DNA, 1001 bp, Cannabis indica
atgaaattacttagtattttaatcacctgcttgaagccacaactgcttagatcgctatctccagagtatttcttttatttaaacaaatgagcttgagttttcttatctttcttcacagattcttcttcttgtcggctcttcaagcacttcaaaatcttattacacttgataagacgctccttgaagttgtctgttatatctctcccccattcagctagagaattgctacaacatttaatcttctagcacggatggaccatcatcaccatcataatctaaccaagcactccactcatcgcccccacctggttctaagatagaaaaatcctacacaaatttaaaatcatacattagaatatacaaaactatgaaaattaatagcaaaatgtaaatatatcaaaaagactaaataccaatatgtgtttgatatatgactcgtgtattgatagattcgttcaaccataatccttcaccatcatcgcgagatgatatgatatcatccccaacggtgacatcaacatgtggtggagtgatttgatgaatttggtcactaaacatgagatcatcgccattagactcttgattatcataatctaagccccaagacccaatccttctttgaagtttctctttctcacctcgatctcgttggatctaattctccctctcctacaactcttcgttgataccaccacagttggaaaggttcgttgggttcattgattcatccctgggttcatcatggtctgttgggtttatcgcagaagaagaaaaaggaacaggggaatgggagatctggttgttccagtcgcagagcacttaacagagccttttgaacgaaaggggtaaatagttgacagaagtgagattcggagggttttaccaccaaaaaatcaatttatgtggttaactgtcactaatcatggagttcaagtagttttgccgctaatatccccactaaaaatttgccacgtgtagactcgtgtacactgtggcatgtc

SEQ ID NO: 387369 - DNA, 1498 bp, Cannabis indica
ttcccaaagacacccttcttttccatgtaaagctggaaattcaaaaaatggaaagcttccttccaatcacaggaatcatgtgaaattggtaaaggattcacctttagcctccacctgtccacatatacagactaaaacaagcctttgcaatcatacataccattagagagtagaataaagaaaacaaacaataagaataagaattgtccacactacaaaaaaatcttactgttagtcataacaaaacttgtgactatattagtgaaaagattgtgactaattataaatcacaatttgtgactaaaaaaatcgtgactaaaggtattagtcacaaaaatcacaatttgttgtgactaaatgtatttttagacaaaatgtatttttagacacaatacttgttgtgactaaaataaaattaatgacaacttatatctaaatattatgttttaatcacaactaacctttttgtacgttgtgactaaaagttacatttggttacaaaaaaattatgttgtgactaaaagattgtcactaaaaatacttttttttttgtaatgagacgtcatcgatctttgataattctttttataaaatagtctctagaccaaatgtggagtacgtcaaaaatgctattttacaatgccatattttacaaaattagattaagaaaagtttctacaagtatgtgtggtacactatcttaaagggaatttactatttatctattttgtcattcaggagaggtttttatcagtatagttttttttttttattgattttgtatgttgtagttattttaggttcatctgtatatcttcaaaaaattctaaataatttacagttacaaaaataaaagttcaaatgattgctaaacacgtgtataggaaaaatcaatactcacacgtaatatttgaactttattttatctactataaactaattgaaattttctaaaaatttacaggtgatcttaaataagtacaacatacacatttatgaaaaaaaaaacaattggaatatataactattttggataccgaagcaaataaaagtctaccaaagcaatcttttagagggtgtagtaacatagactaatagccaaagtttcttattagttttgcaaaaaacaaatcgaaaaaatatgtcgcatgcataccatcctttgttttctctaaacgttgtttctcagcatttgccttctcgtattctccattttctacacgtcgttgatccggtctaagcctggaatccgtaggagggagtttctccttaattttgtgataagatagaaaacgattaaagatgcataagagaagatgaaaatttatgtcaaatatttttttttttataatatattatgtgtaaagaccgcttagtttaatttggatattagcaggtaattatgattaattatgaaaattatttatagctatttaaataatttattatactgttatttattgaattcagaaatgcatttttatgtcatgtagtagtt

SEQ ID NO: 387370 - DNA, 1277 bp, Cannabis indica
caaaaataaggggcagactagtataccctatattattagtgcacgattccgactattcattaattacactaataattgactccacaagttttaatatgttgccaaaattagttgagatcttctcttatgccattagatatgagtttaatattagaggacataaaaacgtataaattttatgattcaagtaaataataaattaaagattgtgaattctcacatattattttcttaaaattattcgtctagtgtctaatgatattttattttattttgtagatacttcattatcaactacttcatcatttgaaattgcagactttaaatatagcttgctaaaagttggagttggaagtttgtatttgcttgcatgttagttgtaattttataatattgttgttgaaatttaattagtttcaagtttattattttgttttaattatgttgttgaaactttaaaaagattattgacttattgttgttgttataactttattagtctcaaatttattgtattttcttaagtgttttggaatcattgtatttatgtattgcacctgtgttgagtgatatgaaaatcttgaaatgatgaaagggaacgtaaacataatgaagaagaataaaggctcaaacaaaattgaaatgggatactgtacagttgaaattaaaagttatatttacacttaaaagttaaaaattcaaaatacaaaagtaataaaaagcaaaaaataaatatacgtaaattggaaaaataaatagcaaaagaggctaaaaggggtaatttcccttaaataatttggaaacgtacgataaaaagtagtttttttttttcaatgcaatattaggttttagttttaatatattcctacgtaaaaatacataaatcaacaaatatctgttaaaagtttgaatttatttggctatatatgtaaaataactttttataaaacagaaatatacacgtacgaaagatatttttataattaattctactataatactataggaccgaatcctaaattcctaatcctaatagagtgcacataattgaaccaatttaaatttaaattatacaaaattgtaatatctggaatcattaatttcattttaagttttttttatagatatatctatataaatacgttgcgagacatcaaatgcatcactattttgtaagttcataaactagcttgcataccctaatttggaaacttataaagctaaaattgttcttttttactaattcatcacccaaatctcactactttttcttttca

SEQ ID NO: 387371 - DNA, 777 bp, Cannabis indica
gaaacattacaaagattaaataattgcatttcacaatcctattaaaagactgaattcagaaaacatgtacaattattgttaatagcttgaacaagcacaaggctatccgactccaagatgacattggaccattgatgttcaaaaattcagctaaaaggcttcctttatatccactatctgaccaatttcacgaaggacaacaccttgtctacccttgttaaaaacttccttaaccctcccatatggcctctagccaaacagcccatgccaaatttacccacttaagcaaaaatagttctatcaacattcactttgatcatgttaacatccggtgcagaccaatgcccagatcaacatctaccagttcttattaataacaaagactcacaagtcattgaccgagcgaataaatattgataaaaaaaagtgtgttctgatataacaactgtcgttgttgtagtagttttctgcttccatattaactggtgtctggctctccatatcccccaagcaaccataaaagcttcttctgatacacttgtatgtgatcaacctgctaactcctgaaaccaattgaagaaactaacttcaaactagctgccaacacatacgctagatctgttccagcaagcacgcgcaaaagagcggccaaccaacgcgtgaaaaatagtttcttttcacaaattacataattgacaaactggattcactagtacgtcttttgtacaactgagccactgtaccagtgacaactctccacataaagttactcacctt

SEQ ID NO: 387372 - DNA, 1451 bp, Cannabis indica
ggtatcatataacttggcacaaaaggtctcagaatgtcccctaataccacatataaagcaaaatgtggggactttctcatatttgaaattagcccaaaatgcttcaccatcacgtttccggaacttcattctcctcttcagaggtttgtgtaaagaaatagaaacccgtacccgaaggtaggcatgccaaataccatgaaaattattagaatccgaactaagaaatgtgccaatgtagttcccagctttctgaaccgcttgctctgttttgaatccaaattgtaaatcatggatctgaacccacatgtcaatcgtatccaactcaactattttcggattatcccctgtttttagtctcttcaagatcagatgctttcgatcaaatgtccacgggctaccattgatcacacgctgaatgtcaatctcgtaatagaattgaaacaagaatcgattttgctctagaattttgacagtcattcctttgcctgacttccataaatctgctatcatattttggaagaccttataatctgacattcttcctgttagtagtttccctacaaggctccaccttacatcaaactcaggattgccatctccctcatcctccagtatctcttcactttcttcttcttcttcaagcatattgtactcccatctactgttctagttcttccatcgctcgactacttgacgccatctctgaaaactgaaaaaaccttaactgatcaaatcaacactgtacaaaagagagaaaaaaaaaaacatgtcaaaggacatgactgaggagcatttaatggtgacgtggcattagttatcaactaactagaaaaatttccattgcttaattgtttggaattgtgtacaatatttaatatttgagttaattgcggtataacttttaatatttttattttacttgcacttaattcttaaaatttaaattttaacagtaaaactctcaaaattaggtaaccgttagcaacttataaattctatctattttagatattaaatgtcatactggactattcatgtgtacatcaacgtggacacggtatatattaaaaaaaattctgaaaaatgattaaaccttttggtaaaaataattatcaaaaatcatatatattttttttattctaaattagtattaaaaatatttgaggtcctaaaatatgaattagcattttattttacattagaaatttaatttaataaaatagaaaaaaattagtaaaaaataaaaattagaaaaccctaatttgaaaacctaactcatctctttctcctctcttctacttgtgacggccataccacaaaccaactcttgctggcgccggtggtccaaacggaccacacttccatccttgcagttttcaaaaaaagccataaacccacatatctctctctccccttctcgtcagtttcaccctcgctcaaactctctttct

SEQ ID NO: 387373 - DNA, 1162 bp, Cannabis indica
ttcttaataagcatttgaaccattatcgataactgttttcttaataatgtatgagcaacatcgaaattcatttttttttaaaatgttggtaaaagtttgtaattaaaagtgaatactttgtttggtcaaccagtttctgcagtacccgatggactgaaagcatgtgaggttttaaaggagagggctcgaaacatagatctcatactgactgaaatggagttgccatcaatatcaggattcacacttctttcgttagtcatggagcatgaagtttgcaaaaacatacctgtcataagtatgttttctgtagaaattgctgtatctttctctaacttgtggtcctcaaaattagatgtgaaactaatataatacatattctttcattgtagtgatgtcctctcaagattcagttagcatggttttcaagtgtatgttaaaaggagctgctgactatctaatcaagcctattaggaagaatgagctaaagaatctttggcagcatgtgtggagaaagcgcaccgtatgttccttttctcttcggcgtgtattggattatctttgttgattccatattcctataaccataaatgatatatttttcgttccatggggttttgttttttagttttctaagaacatgacagctgctcaacatggagcggagcttgcttctgaaattaatacagcaagcaatcagtcaagcgattgtgtggtttcaataaagaaaattaaggaatgcagtgagaaggagagtgattcccaagtaagtttatttaatcatccatcaattctttgtcaattgagaaatgatagggtaatctatgttttcttttcccaaccataattgtatgcttcgattacatataatttatgtgcccattgttagagttaattgtatgcccatttctcatatttttgactgtctcctacctgtctatgatgtaagaagggattagaattgttattaacaactaaaacaaataagaagagtttatcaagtttcttcattacattttatttttttttgaaactatgatccccgtctaaccttataaggggaccagaaaactattgaaattgctatgtaggtatttagaacagcctcgaagctcagaccttgtgggagcaaaccacatgtctgaccatttgagttattccactt

SEQ ID NO: 387374 - DNA, 1437 bp, Cannabis indica
gggtattctagtcaagaattctttaggattttttaagaatcaacttaacgataagctcccacactcttttctctttgttttcttaagttttaagttgggtttgttgcttattttttgaattagggctgttgtacaaactggctaggtgtatttgggatttttgaagtttgtgtataatggttttagtgattttaagttaaattgggtgcttgttgttgtgtttgaacaaagtttaagctttagagctcaaattttgatctttcatggtgatttgtatttctaaggttattgttcagttcttttgcatgaaatatgttcctaatgacttgtataggcggtcttgagagttggaaacgaattgggattgaattgagttgtttgtggaatttttgggggttcctacacttaaccggcagaccagtttagttttgcactatagaattggtctaccggttcgctctaggcagaccccatagaatcggttttccagttgggatccagtttatcggttgaggtaattttgggcaccctagattttcatattttagcgatatttagggtatttccatgttatccatcgatagaaaaacttttagttttgattttaagtcctcaaaaagtgatttagcgtatcactcattagttttatgaatattgtgacttaggggcatgtaaatcatcgagtagcaattccgctcaggttgaccagcacacctaaattcaagatcaaggtaagattagtataattatatgcatatgtgattacatgttagtgtgcatgtttatgaattcctgatagattacattggaattgcaatattagtatacatagaattatattggatatcgaggaatgtatgtttggcataggtactgattgacgttatcacgtgggtacgattagagtgctgagtatatgctgatattatggtcaatagtattgtagcacgaacgttctagactcagtatgtgtgggacgcgagatagggttatgattgggtgtatgggcgcctaattgtaattcggtttatatttacgctatgattgtgcttttcttactaagtctgtcgactcacaatcactgtttacatatgtaggtaagggcaaagctaaggctgagcaatagtgagtacgagcagatgaagattgtacatgtcggggtggttagacctagagcgcacgatcttcgagacagtaggctgcattttgaatagtcgctaggcaacaacttttgtattttatattttgtaatacggttgtaaatattttaaatacgggaacccagtttatgcaaaagatatttgttttcaataaaagggtaattcagtaaagttttaattaatcacaattgcaacaaatttgttgattagtaacaaattacacaattaatataaaatcacaataacacacttaaactagtagggtgttacaattttg

SEQ ID NO: 387375 - DNA, 725 bp, Cannabis indica
tctcgattctcagtttttgggcttgtgagtgatttcgttcagttcagatgttgttgaaccggttatccaaaataattctcatacgtgtcattaataagtcgtaattgatttaatgggcatgtcatttcaaatttttgggaaattgcctataccctttcttattatcctgatattttcatttaagtttgttatttgtgttttcagatagagaacacgtggaattctaagacggtttcagttcaattgttccaggtggatccattattagggaagtcaagtctttcggatgcaatgctagacaaacgactcatctagacgagatacatcttcatatagtgtatctctggatagcgttgaataaatttttcagatattaattggcatctaaatatctagttctgtatcatagtaatttattgccaaattccataaaaccaagactttatttctaggatcacatccagaatttttatcttccaaataatgaaataaagtaattgacaatcatgcattaatgtgtctttattatctgtaaaagtaggacacaggttgacaattatcaaagtgatgtagcctccatgtcagtagaagatcggaacctcacggctgggcctcaccaaatcgacccaaatatcattagggctaacatattgactgggtttgaaacggacccggacaacccgcgcggacctgacctggtcaacccaaaaaattaaaaaaaaaat

SEQ ID NO: 387376 - DNA, 1815 bp, Cannabis indica
cctgttcaaattatggaccagtgacctatagatatagatggaaggacgaatttgcctagccttcatctcgctaaagagtctcaacgattcctcaacatttcccgcgcggccagtacaatcaatcaaagcactataagtaagcaaatctggtcggattccattgtcgaccatttccttaaaatatgatgtgcacatgtctactcttcctgccttcttcagattgtttaacaatgtattgtatgaaataacatccgggaagatcccagcttccttcattgaggaaaactcatgaagcattttatcaacatgaccagcacagcccaaaatatgcaaaacaatattgtatgtaatcagatctggtttgtattttgaactctttatctggtcaaatatcagaagagcctgatcactcttcctactttctgcaaaggccgaaatgatactgtttagaacattcatgcttggcaaggtcaactccaagatatctttgataaacctatgcagatctgtgcacccattagtctttgcaaaagactttgcaatataaagataagaagctgaaggcaatgttgtagaagacacaattgcatctgaaaaaacttgagatataaggacagtgtcattcttttcacaggctgctgccaataggacattgtacgttctagagctaatgaagatatgtttatcatgcaaggttttgagaaatctagcagcagcagaaatatttccagacttgcacagcttatcaatatgagcagtacatatttctgaggcagaccttggggcggtttctatggcagcgaaaatttcattaaggactcgctcttcctcttcattatcagatgccttagttgaaaatgactgacaactgccaacgaatttacttgcaataacaaagaaaggtgaggaccaaaagtaaacaactgggatgaatatgatctggttctgtgaacagaagtgattgcgtctagttgggtaaaagtgattagaaacggagtggcagctgagagtgcgagaagttaatcgtcgagttgctttagtgcatgaaagtatctgcctgatgcttcttgagggaataacattttcccgttcagaagctctctagtttggattggccctgcatatatagggtgtcacggttataaaatatatggaatgaacaagaggtttcgggttagctgactagagtgtctagacaaaaataagacaatgcaattaccaaaagatatgtttcatttgacatgtaatgaacaaaccatagtgaaatactaatatatctctttgagtcgattcatattgcttccaagaataaaaatctagtacattcatgtgtggcaaaacctcttgcaacgacttttcatgtgtaatcaggataactggactctccatccaaaatacatacagaaaaaatcaaactagccagatacttagattattatctttcttaattcaacttaattatttggaaaaagtttaggaagataactggatcccttaactaatttaaacaaacccaaccaagttagaaacaaatcatcagacatcaactagtaaaacaatgtatcaaactatcagccttactcgtattaaaagcaaacatcacacacattcattcatatcattaaaacagatcatcaccactaaccttgtccgtgaaacttagctgccgagagcccagaatcaggagagactagacattctgaaaagagaaaaagagcagagcaacaaaaccagcttaaggtcaatcaaacaacacaaaaattattttgctatattccgagtagctgatgttaaagattcaaaactcattaaaat

SEQ ID NO: 387377 - DNA, 1079 bp, Cannabis indica
cctattactttttggcatttctgccgtgtgaacatagacagtaaaataaaagacctttcatctctatcatggtatcaaagctcacaacaaaccctagcccactattcatcatcctccatggctccaagaacaaggaactcttccattgtcgccacctccgttagtgagccatcacctcctccgactgtcgtctccagtcaagacatctcctccattgactccaccacctccgatgtcgtagctctgtcccattctcctttgattgtaccatttctgttggaaacgatcggtgctcatccttccatgtttaatccttccagttctggtgtgtttagcttcggttacgtcgcctatctccccccttgtggaacgattggacaaacctctacagccctcatcgtttccagctccgctccaacatcgttattcatggcttcttaaacacacattccccttctgccatcttccactccaatcttgaccctgacgctcccacaactgacttcgcttccttctggcaccaccacgactccagccaccaccttcgctccaccatctgtccagaactcttcattttttaatggtaacattccttatcttgaacattaagtccaaatgcattttattgataattccttgtttactgctaatcacggcttacctcatgccgttcttgatcgaccttcccatgatgaacgtactcggtatcatctaagaactagagatcacccaaatcacctcatcgcttcatttctcttgactggtcaagaaaatttccagtcatggaagcgtgcagcttccatcaacatcactgccaaatacaaaactccttttattgaacgtaccatacctcatccacctccaaatgacccttcttgctccgcgtgggatatttgcaacaatatggttatgtcatggattattcagtgtgtatctcgcgagatcgctgctagtatcacgttcaaaaccactgctcttgaaatgtggacaaacctccatgatcgctttaatcaaagcaatggcccccatattttacaactcaaaacctctgtcaacaacgttaaacatggtgataactg

SEQ ID NO: 387378 - DNA, 1059 bp, Cannabis indica
aaaaatatgatgcacatcacattagtactctgacatctttcaatttcccctcatcaataccttcaagtatgtttaatagtctatctaatatagtttaaattaaaaagagggtataaaataacaataatatcaataatttcacacatcacgttattattaaaattaaatggacaaacacgtattcacatgtaattttctcttaattatataaagaataaaactatgaatatattataaaagatcttttttccccaccatacaacaaaattgtctttgtttgcaatagctaaattagaatttaaacaagtttagtacactacatatttataatttttttttttataatcatagaaaacaattaaagaaaaataatattaaaactatttataattgaaatatttattttcaaaaaacttattagttatacaataaaatttgcaaaccttactataataaaatatataccttcataatatcaaaattgaaaaaaaataaatattaaaactaccttaattaaacaaatattttttgcatgcccaaccatacatatataatcacttcttattaatattagtggggatattggcgataaaattacttaaattttatattttttaacacttaatcataaaaatttaaattttgaaagtaaaactacttaaactgcacttctattttagtctttacccttctatctaaaaagttctgttaagtgccacagtttacataccacaatatatactgatctacacttgacaagaacttaatagtccacataatattaattctttaaatatttagaatttaaaaaataaaataaattaataaaattataatttttcccaatcctatttttttttctttttcctttctctcatgatgaccagatgactcattcctcttcttctttgaggttccttcttacttcttctttctattattcatcctcactactattgttatcaccaccactgccaccacaaccacacccactactacacccaaaaaaccatatgtcaaaccagtagaaattaaataaaataaaaaaaccttaaataa

SEQ ID NO: 387379 - DNA, 1221 bp, Cannabis indica
atacatattagatgctatcttacttgaatggttgttgagaagaaattgataaaactcaagacaaccattattacaccagcttgcaaaccagcgagtggttgctccgcgatattctcagacatttatatgcagaaattaataatgcaatataatattaatatgaggagaatatatacaatacaaaaaaaacatcttgagttattaagaaaaagtcacacgaatttcattcaacaatcatcacaatagccatatttgttaattttattttacataatcatgctttcctagatgttaatttgtccctttaagaaaaagatatgggaagctccacaaagtcagttccttctgctttagcctcattcatggatcaggccaccatttggtccaaggttccatactatgggtgtgcacaccagaagattccctttttaaattgaaaaaatgccatgacaatttgagaaagagtactgaaaataaagagtttgaaacttattggaagttggaagaacacaataatatatatctatatgcagtgaactatagaatacgacatatataattgaaaaaagtttaaacttgcaagaataaattaatagaaaattaatacatgttctgcattacgagaatctggattaatgctgaggcatcgttcataagcattgacaaccatagaaatatagctttaaatctttagagagcagttatagataaacaaagagaacaattaaataaaatttacagcaaatgaagaaactgggtaggataaaaattgaagcgcccatgttaggataacaataatttagcttccacacaacaatagttattctcaatcaagcagtgtatttacaagaaattgggtctctaacgaggacacctataccgaggacatgtcattattatttgtattttcgcactagcgggaaaattcgcggttattgttggtgttaagtctctgtaccgaggacatttttaattccttttacctttcagctgctttgtcttccccaaacttacataatctaaaatcgccatttcagaccagaaaatccaaaattggagatcgtccacctccctccccggcgttttcttcgttctccagcgtctctctcacctccgtcggcttggtgctcaaagttacaaagtaagtttatcaatatctatatataactgattttttttttttttttactttgagttctactaggcaaaagctacgtgcaa

SEQ ID NO: 387380 - DNA, 1280 bp, Cannabis indica
aaatataaaatcaaaacagatatggattcatcggtgtacccatatatattagaagcacttataaatttatatttatatatatatataaatttattaatatcaactgcctaacctccaacgaatcccttccaaatgcaaaataataattatattatattattattttggatttccatatacatataccaacagagatagaagaacttaataatatgatttgatataagttgtttaattaaaggtgattgcaaccttaagccaactccgattactatcatgagtttagtgatgaaaatggtatagtgtagttttatactagctaattattaatttgatgtatttatttatgacttgattgctaatttgaatgacttgttataaatgaatttaatcaattatataatacgtatttttcgaatttaaggtattttttttcgtgctaacaatagtcattattattattataattattattgctaataataataattaataaaatctgggtcatgatttgaaaacgattttgcaaaacactcgaattgtgtcccacacacaaaacaacgtgcgtgacacttttttttaatttttacagtgaccttgtttggtttacatgacatgaatatacttatatatatacacatatatgtgtttattgtggttgaccaaaaaaatcatatgtgcattaatcccttaaacatgatatgaacatgacaaataaaaatattctctaattcacttttagttaactaaaattatattaggtggtggattagctatgcaataaaaaatttaattcataatatgccaagttccatattgtttttagttggtttctctttggcctatagttttgataattttttgttaattaaattctgatactctagataattaattgaatttcctaattaataattggttaaattttttaaatggattagttttttattttgtaaagaattatcaaaattaagtgaaattgtaaaaataacttaaaaaagaaaaatgacattttaagtaataacgaaaagttttgaatttataaataaaataaatctaacaattacctaatttcgtcaaatagattctattttgaatttatttaaaataagatttgaaagtaattcatactacatgtttctatccacacagggccggccctaggcataggcgggctaggcccgtgcctagggctcactctttttagggccccaaaataataaaaaaaaatggggtaaagttgaaaaatacaacttattaatcaaatttacctctatttt

SEQ ID NO: 387381 - DNA, 944 bp, Cannabis indica
ctgaattgggggtttattaaaagttagggaatctccgacagttagaaaccgtcggccacaagtatacccaacggtttccaaaccgtcgggggttccctacattctaatttttaaatttaattttatggcgttttataaaattgtcgagaaaagtacatgattgtttaaaatcgtagcgacgattctagtattaccgacggtttaaaatagtcacataaatttattagcgacaatcctcaaaaaaattaatttaaagactaacatgaataagctttattttgtacactactacaaaagttagaatttgcgacgatcctaaaaacgctttttttttgggaccatcgctaaaaaaattaagtaactatttaaaaccctcaagaaaaattagtattcccgacggtttataacagtaattacaggaataggcgaccgttttaattggaatttgtaaaatttattaggcccttataggcaacagtttaaaacgatcgcctatagtataggcgacgattttaaaccgtcgggtataagagcccaataaaaaattattatctagttctcggcatatttcccacgtgcccacctactttttttctatttcccacatgtccacctatttcttctcacctattttttctccatttcccacaccctaaaacgaaaattttaactctccaaaatcccacaaacgcatccgcaccaccgccctcctctcttgccgtcttcctccctctctcgatctccctttcttctcgtctctctcgtccatcgatctccacccaccccttctcccgtcggtctccctctcctctctatcgcatacgtcggaccaccactacctcacgtcggtgtgtccctctcatctctgtctcatacgtcggactaccaccacctcccgtccgtctccctctctctctttttctctctttgagctcgctataaat

SEQ ID NO: 387382 - DNA, 1135 bp, Cannabis indica
atggtcgtaataattaatactatgcaatattttatctaaacgtaatgttacttattatttaatacaatacgattcttacaagacctaccaaacgagccctaactccacaatctagagtatacttagccaaacaatgagctaacttatagtctctttgaaattaaacaaaaaaacctttgaagctttagagagaaagagacaaagttttaatgctttcaatgattccatctaagtgaccagtgtagcttgaagcttttgacaacaaagaaattgcactagagcagttagaggaacccattgatcttgaactctccaagcttgggaggaacccatttgacagccgctcgcacctgactttttggtccttctctcattgttgcttttgaaagttcgccagaaattaaagcatcactccaccaaatctctaggcttcggacttgactccccactctagacttgttcctcaaataccaaatttgtgaagataaaataaaagaaatatcaaaatcatcatttgacagcgaagcacggacatgagaaacaatgagctataaaaaaacaacactcttgcctgatggggaccaaaaaaaagtgctccattattttttttgtgcccatatatatatttttgtaagaataatttttcttttaattttcaaagaaaaaagaaaaagaatttttacttttaaaacttgaaaaatattttatgctttgttttatctcgtttgtacaaacattatcaatccacatatatttatgtttcttcacttaaatatttttgtctctttggctaaacgactagccgttccgttggtggcttgattgcatataagctatgtgaaggggaaaaaacaatatatatttttttctaaaaaaatattacatttcattaattgtcactctaagaatattctaaattattttattaaaatgaaacagtatcaaattaatatttgactcggcagcaattacatataaaaacacactcaacagtccaaatccatgccaagttgccaactaaagcctgccctgccctcatcagcaattatagagttgaattttagcagtgagattgacatatatatatatattaaaaaaaaattgaattaattggtatcataaacaaatataaaaa

SEQ ID NO: 387383 - DNA, 1812 bp, Cannabis indica
tctgcgtgtaagatatccagcattcgatgttcgtacaacagtatgcacgaatggcacagtcaatctgactatgtcatgcattttgcaagattccaccagggcatatggtttttgtttaaatttttttaatttaattaattacctcatatataatattttatcatctttttaaggaaaagataataactaattttcattttaagttctaaatttaaaattaaattgatgagcatctttaacatcattatatttaaatagataaaacaaaactaatttcaatttttttacttgatttttcaaactcaaataaattaattgttaatcctaagatttcatgaaatataatctcatagttataattaaaatacgaagtaaaatagcatgtcaactaaggtgggtcccaagagacaaccaccctatccctatctcccattggcgcaatccaccaacccctctcttctcttctcttctcttctctctttatttttcattggtgctatctagctactcgactctcttttattctgttctctttctctttccttggtcccatctagcctcctctcttttcttcccttctctctttctttttccttagcaccatctaccctcctctcttctattaccttctttttctttttccttggcaccatctaccctcttctcttctctttttatattttcccactttctctctccttggtgccaaggagacttgtgttggttttattgtgttactaaatcaagtgtacagtgaaagcatttcaaataattatcattgtacaacactcagaatctctatatgtatatatattaaatcaaaaataaaagatgaataaaaaatatttgcctatacaagcctttcaagtaggattttacataaacaccatggggacggggactcgtaagaatccacccttaatggagctggagttccctgatttagcaaggattagaggtagggcggagtcaggaaaagtactatctaccttgatatatccctgattatctatatgaatatgtataataattaaatacgtataataagtatataacttggacttttctcatctcaacatatcaatttggtttaatacatatattaatacatgacacatagtatttcttcttctcaacatattaatttagtttacaaaaatttaatgacaggacttttcaatttttacaccatcaataatgtactgtatttaattacattaaatattttaaaagttggctgattggttatttctttagaaaagtcactaacactactcaacttaaatcacaactaaatggctaattgatatcaaatttaaaaaattacttattaattaaaaagattttagtgatattatatattagttatacaataattttacatatgtacagaaacagttttatatcctatagtattttaacttttttcagtttctctcttttgtttaaactgaaatttctctcttataggcattttttgtgattgtgacagtgactctgaaattagaaggaaatttaaaattagcattctatttatttgtcttgtatgtatactatacatatatattactgagatttaagaaattttatcttatatatatttatatgtgatatgtgtgtgactgtgcatgactatgtttaatgtttgctagtggtagctgatgagcattatagatttggatatacatacgaatatagatagatgagattataacagtaaaataaaaagttattttgtatttttattcttaatgtataaaatgcatataaatatatattgtaattatattgtattgttaataacaagaagaa

SEQ ID NO: 387384 - DNA, 1265 bp, Cannabis indica
agaaggagatactatatatatatatatatatatatatatacatattagaacatttttttaatatgtaaatatatattatatctatttatagcaaggtgggatattattattaatatcatcaatattatctacttttatgatatggtttttcacttggcagaatgatgatgaaaataacaataacagtactaattataaagcattgtctatctttgtgaatatgcacatgcatctagtttctaaaaaaaaaaaaaaaaaaaataatgcacagacatcagtgtgggtttgttattaaatattttggtgttaaagacatcaaatattaaatcgaaagatctagatgatcaaactctttgtcatatacacaaacacacacatatatatatttatgtaataaaataaatcaaaataaataaattttgagcttcaaattacagggcaaagcatggtgatggtgatggtatgtctcacgaagatattgaagaagaaacgaaataattagatagagaatgggtcaattgatatcattgttcttgttgtagatttttatttaaatatatattgcttttaaaaaccatgcatgaatctgagggtacgtacatggactcttaacttagctttcaatatcaaaaaattattattgtatagagacatctattagatgtggaccctatcctcatatatctcctaaccctagtattgtatgaatatatattatttttttaaaaaaatatttaatataatataacaataaattataaaattgaaaaaaaaaatgtggctagttgattgattgagtcttatgtgggcaaaaaaatacattataatataaggaggaattgactttgagatcctctaagggaggaatattatgaccaaattccttgcacaaaattcttgttatttgtcatccatcacttttggcttttatgccattcaatttcgttctacaattttttattttttttcttggaaagtggcatggggaagggaatgggtggtggtggctcaataaaaatcaataaagtttttcgtcatcttgtcaacattacatgattatataattaaacatggttaattcattctcattagcctactactttagttttgagccaaattatgcgttcaaaagagcaatttggctgtaatgtaacttccattagtatagagccgatgactacaattacatataataatagggttaagataaaaaataactttaaatttagaaaccaagtccgtaattgtttattttttaagaaaat

SEQ ID NO: 387385 - DNA, 1063 bp, Cannabis indica
aattctatcaagaactatgataatttattttagcaacaacctatatgcatctataataaaattaaacacataggctcacacaggcacactttggatgggtcctatcatgttgctaggtcatacacagatgaaagaagattgtaaatatacctgttacaaattattatcttgaccaagggagccatcagatcattagatctggcaaaaagtaaccatggctatttgcaatcaagtaataataggttttgaaaacttacacacaagctaaaacacatactcctgcaacaaggttagctggatagttggatgtaggatttatttaattttaaattaaataattaatttcgaaaataattaattaaataaaaaataaattttcgaaaatttaaaaaaaaaatttaaaaaattggaaaattattttctcttttcttcttttttaatcttaaggagcattatctctacatcatcagaaagttatagtcctttcttcaatttttgtataagcgtttgataaaaaagaagctataatatgtgttttacttttgttgtcattttaatgatatctttgatgtttcttcaaaggatataatacctgaattattatttctatttagtaattctacattattttttatgttaatttcatgtacgtgtagctttagagtttctcttttaaatagtgttatatttaaatattttgtaattatgatatttttatttaaagattaatttacttatattctttttaaaaaaagaattgtgttgcaaatgtatatgtatcaactcaagttgtaagtcttccttttttacatattattattttcaatcaaaataaacaaatataattagaataatttgttgtcatttatattatattatatgatatatgtgagaacataattgtggagaaagagaagaacaacaaagttatcagaaacaatattgatcaatcacggatttaaatatattgtagggtgtaacggtaatctaatccatttacagtgtagatcattcatatagaggatcattgatcaaattaggcttataacaatggataactaat

SEQ ID NO: 387386 - DNA, 681 bp, Cannabis indica
aaaagaggtctttttttttttcttgatattggtggcattactattaaagtattcattttgttacacttgactctattatgctattcactatttcattcaaaaatactgataaatatcaacttgtataattgatgggtatacagtggtacacgtacacatgacaacttttcgatggtacacgtacttttaaggagttttttttcaaataactttattacatctaaaatttactttttttatagtaaaaaaaagcaaaaataaacaaaaatagaaaattaaactttcttttttaaaaatacagtctgtacatgagactttcccaatatagtttctcctaaaaattttagatttgaaattaacatgaacatcgatcacctctagaaaatcttagaactcctccacaatcgacgtatcctctccaaataataccaccaacgatatagaagtttttgtcgaacaccatgaatgccgacagaaagctttttatcaatcaccatgaatgccgtcaagaaactttgattcgatattcagttatggtagcgcaaccaccgattagagatctccataaaaagccaacaaaagaagatcaacaactaagaggagatgtccatgaacgtttacccaaaaaaaattgggtttttttttttattttttttattctttttacaaaaataacaaatt

SEQ ID NO: 387387 - DNA, 986 bp, Cannabis indica
gattatgtataatctagtgatttgacaaagttgaagtgacactagtgttgtaatttgcaagttagatggtttgacatgacacgaaaatagtgcgagtctattaatggtacaagtaccatctaatatgaaaaaatataaatttagacacgacatggtatgtttaaaattagcataatatgatacggaaaatatgggtataaacacgatgcaacaaaacaagtttaaaaaaatgcataaacttaaataaactaactcgaaaacacgataaattaaaaaatcttataatctcatgataatgataataataactaatatttacttatcaatttatataatttaaaatgataataaaattcaaatataataccaagtattaaaattctttgaccaaaaactatcagaaaatgtaacactaacactaaaactaaaattatagattaatttattttaaaatttgtgagtaataaatatgagtatttattagtaaatattgaaattataaaaaatatttttacttaagtaattaccgtgccaaatttaccttttaaaatattaatatacctcaaaatgatataatttatgtatatatttttgtaaatttttcaaaactctaactaaatcactatagaaagttaaaattgagatgcaaagttcacttataagttcgatgttcatttaatacattttttgttatttgaaaaggaaaagttaaatttccatgcttaataaacctataaattagtcccctaaattaatactatgcataattagttatatatgacactttttgtattttccccataataccctccccacctacatctacccactccaaccatttttctcatcaatttcacataagaattccctacccgaaagcctatctttcacaaccaccaatattttttttcttctcttcactcatcactagaagctacaacattccacactacaagccaccatactaatccaccacattagaagct

SEQ ID NO: 387388 - DNA, 1768 bp, Cannabis indica
  modified_base (65)..(65): a, c, t, g, unknown or other
ttatatatatatatatagacaaaggaataagagttagaatacaaagttagttttttttttttaanagaagaatattaatagttttaataattaattgtagatttaatacataaacataaatcttatacaaagaatacgaatagtttttttgttataaaattttgttttaaataacaataaaaactctaaatatataagagaaattaaaaaatttgaaaaagttaaaaaataaaaaactctcatatatgatgccacataactttatctaaaattcacattattaatttggcaaatgtgaaaaggatagaatatgtaacgttggaacgtttggattttatgatatattaaaggaaaatatgaataaagatggaatatgtttgagtgattatagataagtatgtaaattaaaatgctatcatcaaaagccatctcattaaagttaattaatgagtttaaacaaataaatcaaaaaaataagaataaatcaaaaaattaggagataagagattacaaaataatcgcaattagactgccacatcaactcttaaaaacactcatttatatatatatatattgattcttcgtaagattcatagttttacttttttgttaataaagagaatgagaagaaaacaaaatatttagatttttcttagtattttttttatgacaatataaaaaagataaaaatacttgtattattgtaatatcgtatcattttcaaatttaataaataagaaatgtattgatacaaaaatgagaagagtttttcatgtatatacaaaaagacaataaaattataacaacttatggctaaaggtgtacaccgattaatcgttgcggtaggttttataagaacctgaagtattaggccgaccactcaagtgaaccactaagactcatccaatgtaaggccacctgtcaaccaagcatgagcaatagaggccaagctcttgccaacttcatggctaattataaaataataactccccaaatctcttaaagtttgggtgaaaagcggaggccagagaagaagcaagagcaagacaactcaacccaagaggtgcattgaccacctacccgatgcaggtatggcccccaggggacttggggggaaattgatgcacgaggtaacaaggctagtttcaaagcttctaacagggtgtatctggaagtatgaccttagatttctagaagccaagagcaagttgtgggtcggcttctccatgagtgagtaccgacttttagcgtcgatcagtctcttacggatgtagtatacagggtgttgtactttgccttcttctcttatggggacaacactcacagcattatctgtgactgctaagtacacacctaactcttctttatctaggggtttgagcaacacaagtgactgcgccaattgtttcttctactcctggaatgtggtttcacattcttttgtccatgcaaatttttcgatgccactgagaatgttgaagaagggtacacatttgtctgtagacttggacacaaattagtgtagcaatgtgcactgtttggctttgtacttccttgatagttgtgggtgacttcatgtcaaaaagggcttggatcttatctaggcttgagcttcatgttatagctgcggagcattttgaagcttttgtctaggtcctccatatgcccgtagcctttttggacttgacaagtatgttgtccacacacacctccatgttgcagccgataggatcattgaacatcttgttcacaagcctctaatatgtgg

SEQ ID NO: 387389 - DNA, 661 bp, Cannabis indica
tagattaaaatttattttattttactacttcaaatatataatatatgcttttgatgtgtttgtgaaatttgagggcaaagtgaagtaaatggactacatctttatcaagatgatctctttatattttaaaaaaatctctaaattaattaataataaatcatatcgataattaaatatagagaaatgttaaaaggtactattagtgcctaatacctttctcggtgtcatactgctattaatgtaattaagtatcaggtttcatataatttaaaaaaataacttttaaagaatattgcttaccaatcatacgacgctatctacagaagatattgatgactattaatgtccaataacaatacttttaaatatatgtatatgcataaataatttatattgaaatattatacatactatttagtaagtattttcaatttaggcaatttttaatgacacactaaaaaactatataataatttttcctacaaaatgcttcatattttaatagtaatctacagtgtcccactaataatagtagacactataaattatgatatattttttaaggctaattaggatttttgctccctgaactttgacatgtaccaaattatgccccctgaacttttaaggtcgttaaaaatgtccctgaactattgagatt

SEQ ID NO: 387390 - DNA, 883 bp, Cannabis indica
ctcgaggtatgttattgcattcgttagagtcttgctggtatggttttctcattattattcatttgataacgttgtagattacataatgtagcgtgaaattgaagaaaacaaattggcacaaacgactttatactcgttagagtctacaatttccctgcggaaagaagaattagaagtgccacaaagtggtaaaccatcatggactagacgattattacttgataacaaattgttgtgctcaaaaatcaggtaactttcactggcgaattagttattgtttcgtaaagactatagttttctgatgggtatgagtaatttataatttagggaggaggcgaacgagttgtgtcaaacactcgaggaaaatgaagaaaagtcgcgaactgcttcagagatggcagatgtgctttatcatgccatggttcttcttgcggtgaaagatgtgaaaatggaagaagttctacaagttcttagggagagattctctcagtcaggaattgaggagaagcgaaggcgggcttcttcttcgaagtgattaggatgaactgtgtcagttgcaagttcaagtggtataattggggatgtaataatttattattcatgtcacataatccttccctaatatcctaaatttaattgaaacaagacttgaaaaataagttcaagcagaaaagagtgtaaaatatgagttgaatccagaataatacagaaaagaaattcgattttgtgaaaatttgacaaattagcttcccctcatcagaatttttatgtttacggtttttatggtaaaaatctgtggaagtatgttttttttgtttgttgtaagaaacaattagttaaaaaatatgagaaaaacatgattaaaaaaaatataattttatga

SEQ ID NO: 387391 - DNA, 1475 bp, Cannabis indica
ttgaaatgggattgtgttcaaacgcccaaaatgtagtctaagcagcgggccatcctttttttgactggactgactcggggaagggtcaatctcctccggagcatgctgcacaaccactcattcatcttgactaaaatccatctttcagtgattcttttctctactaatcaccccttcccaaccaacccgcccgattgattttgtaagatcaattaaataaaaaaaggttaatctagtccaaagttatccaacgtttgctttatcgaacaaagctttattaggggtcttggttgaccccctattttcaacaattacagctggcatcgaccatctttgcgatacgaacggacacaaagaagaacccaggcaacatgtagagaacaaagattcctgacccagagcatgttattgactcaaccacaaatttgttgagtggacataccacaaatcttacttatatttttctgagtgaacaacattgtggatggggtgcgacaactataaagctttcttcagctctcaatgaaagcaccaaaaatatttaccgagatagataaatagagcttcaaaaataaataaataataaacagtggacaagtgatttttacttggtttgaccgttaacaattcctagtccacgagtcagttgtattggtcccttagggaagtattttgataatatagtatgtgtttacagtataaaccctgtctctacaagtttgtaggaatttttgtagatgttcggccagtacaagttttgttcaccctttttttcataaaaaataggggtatttataggcttacgtgtggggtaagggcattccttttacccacctagggctttgtaccacagtccattataagggcaggaaaatacaacatcaaatctgatcgtcaagccttgaagaacctttttgatcgtgcggtgtgcatggatggtgagtagtaccgtctggatcaagaacacgtgagaggtacgtacgcgcactaccatggcctgacacaggtgacaaaatctaattctgtgtcagaaaaagacgtaaccatcagttggtcgatttccatataaatctgaggtggcaatccgtattcccatagtagtcgccgtccgcgatcagttcagagagtccttatctggatgtcaagtagtcagatcgtttttctaggacttcttggggtctggcgacgagtataatcctttcacgtctcgaagatgctaattgggtggcaatagctctcagtatcaagcttcattaagccctccctggattaacgggacatctccgcgtggaattgtgatggtcatcatcgttaatccgagaggttaacaaatttttgcttctaattataccacgtgtctccttcttaaaacacaaataacaatattattttaaatttcattataaattttaattagcccaccctaaaatgatatctaaggtatatatatatatataagaataactaggtatttt

SEQ ID NO: 387392 - DNA, 1206 bp, Cannabis indica
gtatattattgattgttgagttagtttttccatgcaggttgactggtatacctgattacagaattaagtaagattagtataacagatgcacgtatactcatgtttggcatgcatgtttcaattttcattaaatttacatatcagggtataggtatggtgtacacagagttgcatcgagataccaataaatatatgttaggtaaaatagaaggtccgaactaatgctaccaacactagtacgcctagctagagtactgagcgcatgtggtattatagttagttgtacttatagtatggatcgatgctaccaacactagtacacctagattactgagtgcatatggtattatggtcaatcgtactatagttaagaatgtttgagactcagtcatacgcattggatatgggtagctaactaataataattaggtgtatggaagcctaattacatgtcaaatatatgtttatgttttatagttttcttactgagtctattgactcacatgtatgtttttatgtgttggtaaaggcaagctcaaagcttaacaatagcgagtctgcagcttagtaaaaattgtacatatatgaatggttacacctaaagtgttcagatctttgggacgacatgggctcagtttttgttagtcgcagaatgacactttctgatatattgtatttttcatgtgtttgaaaaataaattgggatcccgagatttgtaaactttgtatatttgtaatgtatatttagtaaattttttatatattatgattatttttataaattacaattgtatattaaatccctttgattagcaaatgttagcacagtgataaaaaaaatacaataatgtgcctaaactaatagggcgttacaatttatgtgacatagataagatcatattcttaggaacgtgtgattgttgataatgaagtgatttaatttttatctcaatcctttatttgattgcatcttaaaatactaaaatatcattttaatagaatgattttattatatgttggtggcactataaaaaaatacgtttaatcataataaaatttatgactgaaagtgtaaaagtgaaaaaattatgactaaatataatcatcattcctatcttattacttttttttttgtactcaaattggtatcttattattaattaatcaaatcgttaaaaataacagaacgtgcttcagatgaacaat

SEQ ID NO: 387393 - DNA, 812 bp, Cannabis indica
gcaattggaacactgttggatcggatgtagtgaagctggtgagaaatttcttttgtactagattgttgcctttaggtttaaatcacacaaatatggtcttaattcctaagaagaagaatccaatgactatgggtgatctaagaccaatctccttatgcaatgtcttgtacaaaacatttctaaagtgatggctaatcgacttaaagagctattgccgcaacttaatttagaatatcaaagtgcttttatactagggcgactaatctcagataatagcatgatctcgtatgaggttatgcattatttaaaacggaaaagaaatggtaaggaaggttttatggctttgaagctcgattttagcaaagcttacgatcgtgtagaatggacgtttatcgaagcaatgatgaagaagatgggctttcatgaacactttgtgcaactggttttacaatgtgtatccaccgtgcaatatacaaaatagtggtaaagaaattggctctatcgttccttgtcgaggcatctgccaaggagatcctctgtcctcgtatttattcttaatttgtgcagagggattctcttctctcatcaggcggttcgaatcaaataagcttttaagatgctgtagagtggcttatggggctcctactacctcctaaatgctctttgtcgatgaaagctacgtctattgtagagccaattacagagaagcctctaatgtcctcaacatgctccatacttttcaacttgcttcaggccaaatggttaatttaacaaaatcttctgtcttttttagttctaatactacaaggact

SEQ ID NO: 387394 - DNA, 776 bp, Cannabis indica
gttacagttttaattcaatcacgcttacatggttgcttttagttgggtatgtcactcttttaataaataataacaatgacgagttatggttatagaattatgagattaataattcgatttaaaatgtgataagtagagtgaaagtggatagaatttttttttgtaaaaatttaatccaatttttttcataatcgcatatgttgtagcaatttaagattacttataaattttaagaaaattatgaatagtttacaatgctaaaactaaagttcaaatagttacataccacgcgtataaaaaaaacgtgtgtgtaacaaaatattcaaatttggtgttgtaaactactcagggtggtcctaaataacttttatgtacaccatcatgaaaaaatagaataaaaaactctcttgattcctaaaacaaataaaaagtgtaacaaagtacctatttaagggtgtaatatagacttacccaaaagtataatttcattcgggagaatgaatacaaaaaaggatcaatatattaatatttaatgaaaaataatgatacattaatccttcaaaaactcaaattatacattgataaaaatatatacaatagaacaagagattgtaacgtctctacttcaagctttcattgggtccttacacccacagaatgaatggctcttatacacgagtacgctactctagctgcttcttggattgacgactgaccttaccaaccaacacgagtatttctagcatgctttgtcctcactcgcacgcttcctggga

SEQ ID NO: 387395 - DNA, 1091 bp, Cannabis indica
aatagtttttaaaaataccatttgtctttcccgtccatgtctcctaagttgaggtacccctcgagcatggttgtctctctagtcctctcgcccgtttgagggggctgaggcaagtcttgacttgcaaggcgactgggaggtgcctcccctttgtcgtgacctctctcgtctgggttggttgatgtggtgctggtgcattagtacgtggaggctcaagatgccttattggtggtgggagaacctaattagtggaggagggtctcgagcatggtctcttcccccctcatcaacaccaatatccctaggagctagagatggttgagatggcgagactccattattgcgtgttgtgcccatctcctcacgggagcctcctcataggggatgtgtagcattatcttgtgggacagtaggtccttgtgcgtccctcctagtttgttgctgtgtaggagggggtgcatcgttcctcctattctcacgacccgaggttgttactcgttgtcgttgttgtgatggaggacgctcactcctcctgccatggttgtcattctcacgacaaggtcgttgttgtatggcattacgattagcatcacgactttgggttgtttgtgacctaaatctctcctcaccttcgagagggtaacatgtcgaacaactcccatggggtcgttcccttcttgccgtaccagaacgccagcgggttcctcttcgttgtggccttgtggcctattgggctccatacctctcttgccactctctgttgagcctgagagtttcatataaacgttggcaaaatgcctcattttccatgaacacctgatggacattagtagtccgtcgtacaccatgtgatggtgatgatgagcttctcatatcttgaactcgaccttcgtcttcaggcataggttgtttgcctggacgtcgagaggtcccttcaccagtgggctcagcaggttgatactcttcatggtgttccatggtgttttcttcattcatggggtcattatggtcttcctccttatagttcgtccgtcttgtactcaccatgatggtaaggggtgattaacacttgtgttcactgctctcaatga

SEQ ID NO: 387396 - DNA, 947 bp, Cannabis indica
cacagcaactgaagaggcagacaagaataaggggtgtggatccttaacttcttcttctcctctttctcatactcatccactctcattcttcttacgctactttttgcctttaccacatctcatctcttattttcttttaccttttccatctcaactttaccttaatatatattattagttcagagtgctcttctagttttggaagtttggggtttaggtttttgcttcaagttgtattagagattattttctggttatgttgtggtttttagcttcttttaccgactaataaagctactaactttatactacttttttggatttgtcttggtggtttctgtctgttggaacattatctctatttctcattcatgggttggtttctatttctgtcttaatgtgtttttctttcctgctaaaccatctaaaggcttctctttttttgctgttctttgcttcttcacactcctgctgacttactcagttggggaaaaaagcttctacgtacgttataatttgtgatttgggagatggggtggggctcttctttgggtgtggtattattgtgtttagtctcagtttctatggtgtggagtagtgtgaatggcataggtgctaactggggtacacaagccagtcaccgtctgtctccagatattgtagtgaagcttctgaggcagaatgggattcaaaaggttaagctttttgatgctgagtacgacactcttagggctctgggtagatctggtattgaggtcatggtgggtattccaaacgacatgcttttgacaatcgccaccagtgtcaaggctgctgagaaatgggttgccaagaatgtttcaactcatatctccaacaacaatgtaaacatcaggttacctcgctcatttgactacttaaatttctttgcttttttgttttttccttctttaatgtttttatgttta

SEQ ID NO: 387397 - DNA, 2129 bp, Cannabis indica
caaaaaaactaatgtgggacttgattttggcactatatattgtgctattaaactaatagtaacaacaattcaataagtattgtgtttatttatattgtatataaatttgggtttatttatcctatattaaaatttaggatagaaagtattgtgctatcgagcatatacatttatactttagtttctcgttttttttttttttttttgtttatttttgttcaacactccttaaatctcaaatgaagaaacaattaataatataatttttaaatttagatttaatttcgatttataataattttgatcattttatgttttttcttaaagatttttatagttattgccattgaagaattcaatatttatataatgttaatttgtatcatatgactcagaatgagtgtagaatgaagttgttgcaatgatttgttggtctttagattttgctcaaaaatacaaaaataattctttactaagttttagtaattagtttaatgttgatgctcttatgtttcaagataagagtaagtttggggttgggtgtgttgctcaagatcacattggggttgttttgggtgttatgtggttgacccgattatggctgagagaatgggaattaaggaaccattgagttggatcatgggtcgtggctggtgcaatgtgattgtagagttcgatagtcttgtgagttttcaagcgatatcgagaacaatttgtatggtctctcaatttagtttttaggttgaagatcatcgtttatttttatctgagttgtttattatttctttacgttttgttaaacgctctattaatggtgttgcttattatattgcaaaaatatctcattatcattcccggtgtaatttggatttagatgatatcatgtaatttaattttttaaaaaagtacacaaaattaaaaatggtatatctagatataaaaagtagcaattatatataaatttcaattgttttattttacataattacataaaaaaatattattatatagtaaccaaaatttatattctttggtaaatagaattatacattcatatttttgtgtgaactataatatgatattacgtttaaaattaatgtgttcatcatactaattaatctgatttggaatttgacaaatttttcttcatggattaaatgatgatataaattatacattactctaaataatatagtacactgataatatatttttacttcattgattaattattgttgttatatatgtttatttattatatcttattataattttgttatatttgtaataattttaactgggatattttgtaactgaatagttaatctcttataattctttttttttattctgtaattggtactatgtttattttttttttaattatttcagaaaaggtaactatatatattaattatatagtgaacccgtttaaagttgtttttatttttatttattttttaattaaatatatatacgtatattatagttttcaatttatatatattcttcagtaaatgaaacttattaatgttgttatatattcatattgtgtgtgaattataatatgatataaggcttattcttcataataattttttttcgaatgttataatttttttggccatctttcaacataatatgagtcttattttacattttttttataatattttttcaggcagttttattattattatttttttttttgaaaagaatgtattttattcaaaaacaaacactacacaaggtcaggcttctctgcatttaaaatggcagcagcacaagagggtaaaacctctgaccaaaaagaattacttttgagcttataagcccacctagctaaggaatgagcaactctattgctatctctattaacatatctaatttcaatacagtcatctaacaaatgagaaccgagtatatccttcaattgcatcccccaatccgttcgagactgcttcctggaaagcagatggttgatagcagtttgattgtcagaagtgaggtaaaatggagttgtgttcatcgtgtggctcagatgaaggcccattctaagagccatacattcagccataagaatcgacacaaacccgtgatggtatttaacctcagccgcaaccaaattg

SEQ ID NO: 387398 - DNA, 1197 bp, Cannabis indica
attatatatatatattagtttttcctctgttttgtaattcaattcaacatttcacaaaataaaacattttctctctttatctcagttccgtaatatggtatcagagcgggaaaggaatgctttcccataatcttgatcttgcttcgtctctgtcgtgtcttcttctccggcatcagtcactggagctggtatttcgccagtctctgcatttctttgcgaactctattttgcacagatctttctcctgatgtgattcaaccttcaccatgtcttctaacgatcaagacagtccaacaaatcctagagacggttctccccacgtattgatcggagaaaccataaatcccttgattcaaaatcaacaagcgattcaacagagaaatcgacttgaagacccttctgatccatactacttgcatcatgctgataatcttggtaatgttctcgtttctcaactccttactggacaagataattatatgtcatggagtagagcaatgcaattagccatttctgtcaagaacaagctaggattcttggatggttcgatttctaaacccctgccttctgaaactactttgtataatgcttggattaggaataataacattgttatttcttggatactcaattttgtctctaaagaaatttcctctagtatattgtaggatgaatttgcagctgctatatgggaagatttaaaggttcgattccatcaaaaaaatggaccacacatatacaatttgagaaaaggtttgatgaacctaaaacaagataaccaaggaataagcatgtatttcactaagctgaaaactatctgggaacaattgtctaactatcgtcctacatgtgtctgtaataaatgtacctgtggtggtgttaagaaaattcaagaacaccatcacatggaatatataatgtcttttttgatgggtcttgtagattcttattctcaggtgagaagtagtatactgcttatggatccattacctgatgtaaattgtgtgttccacctgatcacacaagaagagaatcaaagaggcaattcgaacactgcaacagaacaaaatcctggtatggcatttgccctttaaggagataaaataaaccccacaagcaggattcgaatgccagaaacccaatctcaaacgaagaaatcaatccaatttgcacgcattgcaacatacttggacatac

SEQ ID NO: 387399 - DNA, 1314 bp, Cannabis indica
tatatatatatatacaatattatgattaggtatataatgtatacatattataaacaaacatatataatatatgatctagtaaatatcaataaattacctgataaacactagatttttcttaatgccgcattcatagttggccaactcggaaaattgttcttcggccattatattcagtttgctagctagttttcctttctgcaaatttaagtaaattaatatcaacgaactattattattttcagcaaataaaaaatacaaaagaagaaactattattattattattattattattattattattattattaagtattgtcatgatgatttcccacatatgtaaatactaaataatgtttcgtgtgccatacaacgacatgtttagttttatattatataagttatatatatattttttcaaatattacaataattaaaataaaatacaatatattaagatttataaaatactaacatcactttataaatattattattatttggacacaaatcaatttaccttttaatggtaaaaaataataaatttattaaagaacaaggaactccaaactatatttatttagttatgtataataaaatcgaattaaaatattgatattatataattcatatatatcgtaaaggcaaattcaaaaaatttaaataaaataaaattaatatttacatatttataaataaatagtattatcaacattcattaaatttaatgaaatatttttatatttttacattatattctgtttttttttttttttagaattaaattatattctgttaagcgaacaaaaatagttaaataaccactttttatatataaaaaaattatataacttttttaaaaataaattatttatctttctgagttaggcataaaagaggatcaattgaaatttgaaacaaattaattatagaaagtttaagaaaatataattcttggtaatataaataaaagtagatacacagcaacgtacgtagattagacttatgcagttatagttacatatacgtatacatatatttataaactaacccttttcgagaattgataatattcttctgctctaaaatatagatttgtagagtatagaaaaaaaaaactgatggaattgaagcaacaacaatagacgatatatatagttttgtaagccaaatagaattaggtgagatatatattcgaggacgcataatctcttctatttattaagcttagatgtctatatatatattttaattaaatatgcaccacgtttgttttttaattacttttatttcttgtattaaaaagtaatata

SEQ ID NO: 387400 - DNA, 654 bp, Cannabis indica
ttttttgggccctatacagtagcccaacttgccctaactccggtgtccttgatgagactgacgaactcccgttggatcctcttacctcagccatgtttgatcctcactgaaaagagcatacatccgatcgaaagctcggtgtcttgtgcttctgccttttttatttatttattttttttcattttagggttggggtgagctttgattgagtttctgtggtggtggttttggtgaagtgatggtggttttggggcgagagaaagagggagttaaggttaggagagagagtgttgtaaatgagaaaaaaaatagaaaagaacaaaggaaaaaaaatatttttttttaattttaaattaattaatttatttttaatatttatttacattggctaataatattgtgctatgtgtacactggacaatatcctatgtacacatggacaaccaatttggcagttaactagcaaaaatagatagaaatgactaaatgctaaccgaacgcgaattttaggagttttgctattaaaatttaagttttgagtattagttactagcgaaataaaaatattgggagttatttcataatttactctatttaaaacctcaaaaacttataagtgtactctattttaataatttttattttacattaaga

SEQ ID NO: 387401 - DNA, 737 bp, Cannabis indica
gataacaagggctaactccacttacgtgataggctaaggatccaacatattatagatgaaagaaatgaaattagtacaaatgaccaaaggatctcaaaggctaaactcacaaaggtttcgacaatgggatagagaagagcatccccacaaagcatgatgagtggtctcctcctgggcatcgcacaaggggcaaatactatcagtaagcataccatgcgtattattcaaattaaacttggatgggatctaattgtgtaaaacttgccaagtaaaaattttgactttggggggatatgaagactccaaaatttcttccaccatcccgaagacccatgagaagtagaaggtatattgcgctccaataatctcttagcaaaccaataaccactttttacataatagaatccattgggattgtgtccccaaatcagtttaagaattgaccaatggatcaaaagaatagcagaagcttcatcgtgcaaaaaagaccctaaaccagatcaacatcccaaccaccaagatcagactgcaaacaatccatcgtactaccagccccgagtaaatttggagacaaaatagagaagcctatagttaaaggtatccagatatcttcataaatgacattttctctaccatccctaactcttcgaatagccctagcatcatataattgttggaaattattttcccaggatcttagatctactcacaagtatgatgattaacaccctaaatat

SEQ ID NO: 387402 - DNA, 1364 bp, Cannabis indica
aaaaatttgttactcattcatgaatgggaaatgtgacaacttgcacaggttgaggtttggtaaggaacatgcactttatagcttttggttgaagctaatcctgtctaacatggacataagctatgcaaccaaaaactcttaaatatttaacacttggtgtatctttgaatcaatttctattgaagggaatctgttgatcaagtaggaagttgtcttcacagtttatccccaaaactttttatttaagccaattcgtgtaactctctccaaaatgatcttattcattatgtgttataagtttcttaatcttccttccagttgccaacaagattcttccctttaataaatattttgaatgcttcatcttttgatttaagtaagggcacccaaacttttcttgagtagttatcaatgatactcaaaaagtaatctatacctcctagagttgagacctttgaaggtccccatagatttaaatagatataccgcaattgctcctttgttgtgtgcataccattactaaatttcaatttatagctcttaccatagatgcactcttcatacaatcccaatcctctatttaagtttcttcttaaaattccttatttctcgagttctttaagccctctcttagcctcaagaggcatagctttgtttcatgtgagtcttgcttacacgtaactgcattcacatcacttattacaatttcaccttttaagaagaacaaacaatttgttaattatcctttcataacaactaaagaacctttcacaactttaagagaattttcatcaattttgcataacccttctcagctagaactcaaatttaaaatatatttctcataaaattaggtacatacttaacattaagtactttttctttgactccatcacgcaacttgaagatcactgaaccaacttcctgaatcatatatgccttgttattactaataataactataccacttagttttccctcaagatcacataataggtccttattaggacacatatggaacgagcatccaaaattgaacaaccatttttacagtgaatccatatttgaaacccctaaaacatcatcagtttcataaccatctacaggtaatctttacctctatctcttcctttgttgttgttttctctactgagtttggccttcaaattcaagcactcatctttgaattatctctcttttttgcaacagtaacatttattcataataaagcctataaattttgatcttgatctgtgatttctattgttggaatatttattttaccaggatcttagatctactcacaagtatgttgtttaaacaccctaaatatgaactttcaaaaacgataaattaaacacata

SEQ ID NO: 387403 - DNA, 2281 bp, Cannabis indica
attaatgtgccgcctattggtattgttggggggattatcttggcgtggaaagttggctttgattttgagtgtatctcttgttctcataaccttatctctggtcttgtttattcagatcctccttcacacccttggctccgctcgtgtgtgtatggacctccttaccttaatgctaagaaaaagttttgggctgagttaatggacatttgggatagttttggtgggccctggttgattttgggtgatacaaattttgttttaagtgactcggaatgagaagggtcctccagaagggacccctttatcccttttatttctaaccttgttgattctcgaggccttattaatatgcctatacaaggtgataagatgacttgggataatcactgttctggtaggagccatgtgaaatctactctcgacaaaggattaattaatggagcttggccgaatctgtttcctaaagttattctatgctcttcccagacgtgtaattcagaccatagacctttatgtcttcttttgagtggtttggagcataaatttaaaagatgcttcaaatttgaagaaggatggacgagagatgaaatgagcaaattggtggttgccaatgtgtgggtttcggttgatcacccttgggccccagctcgagtctacaagaaacttggagcgactcgtgttgctctacttagctgaaattgtatgcaatatggtaagatagactcgatcataaaagatttggaacaaaagcttgattggttgcagagattaccgacaagagcccgagattggaacatggaacgtgatattcggagctccctgaatgagactttggcaagaaaagtgatctattggaaacaacgggtcgatatctcttggctcaaggaaggtgataagtgttctaaattctttttccttttgactgctattaaaggaagaggaaatgccattgagagtattttggatcagaacaatgtctggattactagccgagagttaattggtcgtgaattcataaatttcttcacaaggatttttatggggtctgatgatggccaggcgattaattgcagtcagttgttccaagagaggatctctcaagcgaaccaggaagagcttatcctgacccgtttgcgtgatgaatttacaagaactctcttttatatgagcaatcataaggcgccgaggccggatagaatgtcagtgctttttttcaagcattattgggagtctattggtgatgatttttgtgaagcagtttccgatttctttctgaatggcaatatgcataagggcataaacgctacaaatgttgttcttatccctaagatccagaacctgaagagacctaatcactttaggcctgtatccctttgtaatgtgttgtacaaggttatatagaattaaacctatcttacccaacctcatatgccccacttaagttgcttttgtctcgggtatgaatatacaagataataatgtaattgtgtaagaaatcatccactcatttaacaagaaacgaggcaaagaggggttttttgctataaaaattgatcttatcaaagcctatgatagattaagctggagatttattgatcatgtcctcactagctatggctttcctcaaaagttctacagttgggtgtctcagtgtatatctaccactactctcaatatctgccttaatgggggtcaggtcggcaaaattaatccatcatgtgatcttcggcagggtgacccgctctcaccctatccttttatctgtggtgttgaaattttatcgaggcttttggaagaggctcttagtaagggcactatagaggatactatattgagtagaggtggtccggtcctctcccatattttctttagagatgacctaatcctggttggtagggccaatctgaatgaagtaaagggttattaggattggctagaaaagttttgatcttagtccagacaacaagttaataagatcaaaacgtcaatcttttttagcaaaaatactcccaatggtataagaagaggtatcaaggatgcttgggggattgattctccggagggtgttatcaaatatttgggcctgcccctgttcaaatcaagacaaaagaatgttgacttcaagttcatccttgacaacctcacttcaaagttgcagggctggaaggcaaagacgttatgcaaggcgggtcatgcaacacttatcaaatttgtgggtttgtctttgcctatttataccatgaaaactaccaaactctctaatcgccttgtcagtaggatt

SEQ ID NO: 387404 - DNA, 524 bp, Cannabis indica
gaacaatgacgtaccgattcagaggagaaatcgcaacagagagagagacaacgagttgccctttggtgatggatgaggctgacgagaaattgtggcagaggacttcgacttggcctcattttctagttgtggagatagagagagacaacgagtttggattttttttttctatttattgaagaaaaatgattgatgcatttagatctcgagtatatttagatctatcatttttgagaggaactttatttgttacatacagatatagaactaaattacattggttcttcttcaatattattaatatgtttttttgatctttaatgttccatttacagaatatttgattaatacttgccacttttcagaatacttagtgcatgtttgacatcataactaaaaatctgttttttgtttttaaaaacagaaaattgtttttaaaaataatttggcttgtttggccttgttttttaaaaacagttttcagaaaacaaagtgacaaaaaacaagaattttgaaaacaacaa

SEQ ID NO: 387405 - DNA, 1238 bp, Cannabis indica
aatatataaagatataaaaaaatttaagtgatttattagaaattaatttattggatttatatcttgttataaagatctacataaaactttattgatgtgaatttatcactatattagtgttagatgcttaatacaggcatcccatgataatgatttttttttttatccttctatgtagtttattaacccaccataacaagctcgtacataatatacattaaaaaataaaaaaaaatgtactattttatatgtttaaatttttaattagcatacatatatataatatcaaaagaaaaatggatccatataactttggcatattcttccatgcctcttttccgaaagagtatattcttcactccattaacattttgttatattgtcacctaataataataataataataatacattttgttatattgtgttttgtctaagtgtagtaatattggcaattccccagattgttaaaaagtaaaattataatattaagtcaattagtaagggtgataatattttttaatcagttttttatttttaaaattttaaaaataaaaatatttttcaaaattatattctataaatctgtttacacatttggtatcctgtgttttatctaaatacaagtttggtaccctgtatttttaataatgcttatttcgtaccctgtattttaaaatcatacctatttggtaccctaaattcaaaattttttgataaaatttaatcaatactatcaatagtctgaaattttatgaattctgaattcaaatttatttatttgattacatataactgaaaactgtttggttaaattgatataactgtattgattaaattttattttagggtaccaaatatgtacaatttaaaaatatgaggtaccgattaagtattattgaaaacatagggtaccaaatattattttcataaaaacacaaagtactaaatgagtatatattaagaatcttaaaattttaaaaattaaaaaaaaaaaaaaatcactttcaaaattttttaattaatattttgaactccgacaccaacttagactttagatatcaaacctcgactcgaccccagatttggacccacctgcagtctcgacctcaagcccagcccagacccgacttaaataaaatcaacaaataaaaattgttaattctatttttggcatatttaattaacaaatattttcggctggagtatttaaaatggtttccttattgtgtgtatcc

SEQ ID NO: 387406 - DNA, 590 bp, Cannabis indica
tggagtcaaagaggcattgagttggatcaaaagaggcaatggtttaatgtggtaattaaaaatgatgctttggtggtggttcaagccatcaaaagtaatattcaaatgccctctcaatttagattacttgcatatgattgtcgagttttactgtcttctttgatgaatgtgtctttagtttttgttaaacggactgcaaataaagctgctcattgtgtggctagaaggtcttattttttgtcagattgtacttttagtgagctagatgctctttttgctttgaagtctattgtacttgatgaaagtctatggataaacatcatatttgattcaaaaatatatatatatatataacgtgcataattataaaaaataaaattaaactgaaaagttttcttaatgccaaaataaatagaaacgtgctttacagaggtatttcataaaagggtgttacaaatttttcttaatatatattggaaactttatttcgtaagcctatcatgtttgtttcattctataagtttttatttttagcacctatgaaaattatatcttaattttttttatagttgttttcgtgttattttttg

SEQ ID NO: 387407 - DNA, 1582 bp, Cannabis indica
ctcaactacaaacatattagaagccaacatatatctcgtaagattaaaatattattatttatctaaaagttgctctcataacataatatattaataaatacaatatatactgaatagatcaatatatatttacttaaaaaataattattaatctatgatgatatatatgataaattatgttggttaaaattctaaacacaataccatttttctgcgtacaataaaacacaaaaataaatccaaattaaagaataaataaataaaataattaagttaggtaagtcccaccaacacaccacaccacaccaaaaataataataagtgaaaaccctaattagaatattcatataccacagccgcctctttctcctctacaaatctcaaacttcttctctctctttctctcaatcgcaggaggcatggttcgacgggacaaggacgtctagggaatgagatttttccaccatcgccaccactacttggttcgacggggcaagggcggtatgtgaacaacaaggacaggatcgccatggcaggaacagaacttcatggcctgaacttaacgccaaagacaaagagagggaccaagactagccgaagacgaacctaggtaaaaggcgattagggttcaaagtcatgcgaggcatttccaagatctgataatgcctctgcgtcttcttcttcttcagagagagagacagaaatctgatgatgatgaagacgggatttgcagagatttttgtttgaagaagagagaaaaagtttggaagatctgatgatgatcaagcgaaccaattgatttgggctgccatattagtaatagatgttgcaagatctgttgatgatgatgaagacgacattgtagagattttgtaaaataattataaataaaataaataaaaattataattataaaaataaatataaatataaaaaattataatattaaaaaaaatcagcccaacagacgtataaaaaagaaatagactcaaaaaaaataattagaatataaaaaaaaacaaataaaatatatattaaaaaataattgaatttaatctatataatacttttggccacaattgtaaacagtcatttaaagtaattttttacaacagttgtaaactgtcatgtaaactaacttttcccaacagttatataggcccatagtcttgtaacactcagttaattaattttaattaatcaattataattctaaatatagactatgtctagtttatgaatttttcaccaagcaagggcaaaattgtgaagaaaagagattctaggttttatttgttaattaagagactttagatgtctaattaataaatatattaaatgacaatattatttaataattaatttttagttattaaataattgaaattggcatttaagtggttaaattggaaaattgacgtttttgagaaaatgggatggaaaaatgacaaaatggcaaaattgtaaagtgaggcccattatccatatcatggtcggccactatgcaaggaatttaccatttatttttttattattttaattgccaaataaatctaacctaaacctaggtggttacctataa

SEQ ID NO: 387408 - DNA, 593 bp, Cannabis indica
ggttggtgtcggatgtctatgtcaaggtttgtgtccagtgtttgggtccgaggtttgggtctaggttggggtttgggtcctgggtagggtgtcaggttgggatttaggtcggagttcaagtttggttccgggtcggggtcaggtgcgtgtccaagttctaaggtctaggttgggatcggagtctaaaatattgattaaaaagtgaaaacagttttataaaacataattttaaaaaatatttcacttttctaatttaaaaaacaaaatattaattaatttttttttaccaatcgtacttgaaatatatcaaaattttaaatacaaatataaaatgatctttttaataggttacataacgcaacacaacatgtacatatttaatagacgtgtcatgtgacctaaactcaatactatcacgattaatggattatgatacaatataaaattgacataatcaaacataactacataaaaaaattatgaaattatctacacaaacagacataataaatagttttaatctagatcatggtaagttaaaaaatttagtacaagttgattcaattttgtttttgaaagaagttgattcaatt

SEQ ID NO: 387409 - DNA, 1345 bp, Cannabis indica
gctaactcgagatcttcttccaagttcacatgtggctcgccaatagtaggctcactaattcctggtcacgtctcttttgcatagtactggagacgaggtccaattgttgttcctgggggctgctcccaagggtccttccttttgtgagaggtgcctatggagggccctcccttagagacaggggccgattgttcagatccactgggatgtttgtgccatcctggccagccgtagtggtcagatccgtggtgcctgtcgagatggcaagattgaccacatctgtagtgttcaagagagttctagtcatggctagaacatggacatcatgatctgcagtaagaggatcttgaagaagacctgatcatgtagatggtgcaactagagttctcctcgtgttaaccatggcattcgattagatatgatatcaacacactctcaatgaaaacaccaaactattgacctcgaaaagtggcaaccgttaccgggggcgtattaatctgatgattgccacgttttacataattagaactcaaaagtaaagaacacaaatattttttatagaggttttctcccttagtgagcgggtaatgacctattccctttttagttgtattgatatcgagagataaaactattcaaatttctataggcgagatatgatatagctctcttgaggtaacaaagtagcaatcggtaggaagatcttttaataagagagagatcaagccttggaggcgtgcgagagaaagaggtagagaggactagggtttcagacttacagcttcatggcctaaatgagatttagaatgacttagccttctagggttgagttaaggctcactatataagagagcataaaccctagatatttacattttaaattaataaaaacaaatgaccgaattgcccttaacaatagaaatttttgtagcatcttagtgagctatcatggccaaacttgtagcttggcttgctgtccacggatgaaggccacgcatccatgtcctgccagggagaagctggccgaccatacatctgcatgatgaggtttggcaagaagtgctatgtgtacaggttgaggtctggtcggccatgcttctgccaagatctgacagctcatgtgaaagccagaatcctgcaggacatgttcctgtcagaaataacaaggggagaccagcctttggatgtggaggctagctgtaaagcccgcttagtttaatttggaaattagcagttaattatgattatttatgaaaattatttatagctatttaaataatttattatactgttatttttggaattcagaaatgcatggttatgttattcagtagttttcatattt

SEQ ID NO: 387410 - DNA, 1419 bp, Cannabis indica
tgggtgacgcgtgtcctaggtgtcgaacgacgaatcgacgtgaccctgactagaggtctcttcaatttctgcccatttaatgctaattgatagttctgcctcaactcacggttcaatgcttgcgcgtgtttggcggttacactccctataatgagtacataacgtacacttttagggggaattcgagaaatttgaaattttaaaatgattaattcccttcttaaattgcttataaataggactaggaacctttgatgatccttttagtcattctaactcttgaagaaccagagcaaaaaatttccagacgagtcttctcttaaattcttcgaaggatacacaagaaaactcttgacgacatcatctgagcaaaacaagaagcttcaaaccaatgagtaagttcttcaattcttttcttttgcttatttgcaatgaaatgcatgcttaatttttggatttcttactatgcatctcgcctattcttgaaccattttaggtttaccatagaatacctaagtttaaggcttagaaatcttgattatatttaaccacacgtctgattatctaactgggcttcaaattttaaccttacaatatccactttcattcgtccattagcgtttaagtgaaaatcagattccaacttgaagttttgaaattctacggttgaaaattctatttcttggtgaaacttctacttttgattcctcaatcgaacttggtcggtatattcaacctatttttcattcgttgctccaaccaactctcactttcttgtctcctacctttagtagatgaacactggtgagtttttcagaatcaaacatcatatggaccaggatttgcttcagcttctatacgaggatcatcctcgtctcgatgctagcccatctttatccagtgacgatctttcaaattctagctttgacaatcgggaagtaagtggcgaacataccccttcctcggagcccgaggtgcaacatcatttctatcctaaccaaattcaaggtgaaggatacggtcgtttcatctgggaactcaagaaagggtggaggtgttaccttcctactaactggacgtatatagtccatccgaacgtactctgtatatagaaatgaaaaaaacactttactttgacaataaaaaaatactttcgatccaaaacactttgacaataaaaaaacacacaaaaagggtaaacacatggatcgaatgaggctcttcacacaaaatatcaagtaaaagtgatatttataaacaactattttctagtactttgtatatagaaatggagaacattaaacgtacctttgatttagagcaatctgtgaatcaaaacttgatgacgaagaagatttaaggcctgtaaaaaggattaaaactactcaataaactaaaaattggaacagacaaaaaaaa

SEQ ID NO: 387411 - DNA, 974 bp, Cannabis indica
tgattttactaattttatttagagcttgtgtggtttgcattaaggaaaagtataccaattgttagactattatataatatgaacaataaaacgtatatgaacgatatgtaatgcaaaaaaaactacaaacatatcacaatcatatatgcgatgaaaggatcgaaatacctccagtcattgatgtttgagcttcagtccctgtgatagcttcgatatgagaatttgggcttcctcgctctcttaactatctttagatagaattttgctatttgcacagaatgcatggtgagctcagggactgagacgctatatttatatatgtgagaccttccattaaggtccctgccataattaattgttagaatattttgataatcaattttggaaattaaattgggtaactaaaatatttggtagttaaatctgaccataattagaatattttaattgattagtaaataattaattatattttataaatcaaatcaaataaaatatttgatttattaccatataaaaattattctaataacaactgattagtaatttttatattatttattaatttaaaatatataacacacaatattataatgtaaaaattacaactaatagtacaaaatcaaatcaactaaattttaaacaatcaaacaattaacaatggaaaaattaacaaatacaagcagtaatcggaggaaaaatagggatgaacaaagtatgaacaaccaaaagcaactaaagcagtaaaacaataaaatcaacagcaagatatatactggttcaagtccaatagatcgatatgatctatgactctactccagttttggaacaccaccaaattctctttattgattgagcaagaacatgtacaatacagtcgagatcgattctctgatgagttctctcaaagtgtgtaatacgctagaattaagaaatagattagcgaaaccctaattagataattatgaataatt

SEQ ID NO: 387412 - DNA, 524 bp, Cannabis indica
tttttaatttcttttttaatgttgaaaattatgaataatatttatcatactactaaaaaaataatttaatcatttttagatagaatgagtcaagatgttgttgatactataatattgtttttctcgtagtcaatataattatctctttatttcattatttgttattcttagtgaaagagacatattcgtcatgacatttgtgttgttattacattttttgtacagtttttattttaagatcatggacaacaacaaaaaagaaacatgacaacaacgtcaaaacaacacaattttattttacaaatttaacacatatttattgtaattattacactattcaaaaaattcataaactggttttcatttgcgatttttgaaaagcaccaaaatacactttaaatgaacaaaaactacatatatatatgtgtgaatcaaccatatataaacaaggggtttttttatttttacactttaaaaaaattttttttttttgaatttttacggaattctacatagaaacccct

SEQ ID NO: 387413 - DNA, 780 bp, Cannabis indica
caattttcttttgaaaatggtttgggacgttgatgggtgaggatgaatggaatgggaatgggaaatggtgtggcctgcttttgtgtggtttgcgggggaggtggattctacattttcttgaaaatataaatatataattaaacgtacacaccaaaaataattaaatcaaataataaaagaaattaataaaatagtgggggaagttccaagcttgagggagattgtgccatgtatgaaatctcacatcatattttctatacatggccttggaagttttctaattatgaaggggagttcagtttagttactttcattgaaaaataataaagttaggctgagacttgagagttgagggtcagaccctcactcgcttttatgtatttattttcaatcaaatcttagctgggaatattatgaagcttttatcttcttttttttttctttctgaacaatgaagaaaaatttcattgaaaaataaaggcttataccattttagttaattatttatttggaacctacacgttagtattttcacatttaagtgtcattttcatgtcttattctgaattttacttaattagaattagcaatattagaaaatgaattaattaaagtgacttaccaaaaaagaaaaaattaaagcggaaaggttttttttttttttttttttttgttacgcggtgatcaaaaatcacacatgattaaacaaagcagcaatccacaatcggcggagacacctcctcgaaccaggatagctcatcgtctaaccgaagggcatgc

SEQ ID NO: 387414 - DNA, 1770 bp, Cannabis indica
aaaaaaaaaaaggaaaaagaaagggaaaatagtatgattatgagagagacgcctctctaaaaagaatacctattttctcgcattcaaaacgcactttaagtgccacgaatgcattgtaagaggtcgagcaccacctaagggctaaaactccctcaagaaaatctgataacttgagaaaggctgagcgcgacccaagaggctaaaaagctcccttaacatccaataagtagccgataagaggtcgagactgctcaaagagtcgatactccctttataataaggttacatcaaaaaagaggtggagagagcccaaacgaaaaaaaactccctcaaaccaaagagtaacactaagagtcactcagccaaagagtaaccctaagagtcactcagtcaagatcagttttaaaatttactcttgagtgactaaaagtcactcagtcatgtttgtaaatgttcggccgaagagtaaccctaagagtcactcgaccatgagtgtttataaatgtcactcaacctaagactaaccctaagagtcactcagccaagatcaattttaaaattcacttggtctaatgactaaaagtcattcagccatgcacaatttcaaatgtcactcgctccccccccctaaaatatatatttgcatttgaacttaagatctcttgaaaataaggcttgaagttcaccacaaagtcaaggaggaaattgtgaagagaagttgaaagaaagaggcctcctatatatactagtattttttttgaatgcctgccaagggaaaagcttacaattcatttaaaggacatcagagtaactagtccgcaagaacacttaaaaaatttcttacagactagggggcaagtgttaaccccgaaaattagcgttgctaatcttgaggttagatggttaataatcgagggattaacaagagcgtactcgacaaggtcacttggcataaacgtcgagaaggtcacttggcgtggacctcaagcatgtcactcagcatgcaccatgccaaagtcacctgacatggacattggcgagttactcggtatgcaccgtgtcaaagtcactcggcatgcatattgtcgagtcacttaattagcatgcaccatgccaaagtcactcagcatgcacattgtcgagtcactaggcatggacctctcttggatcactcgacatgcactcctctagggtcactcgacatgtacattatagtagtggtgattccctctcatctggcaccaagttactggtggatggtcttttctacgatggtaacatgtgtgcaaccaacttagtggacaacaatatgtgaactgaaaatatgtacaaaaatattacacatagtgatgcgtggtacttagtttaggtaaataatagttgttaaaaaaattaacattatgtccttgtgtgtaattttttggtgcacaatattatttttgataatatagattattaaatttgaattatattattatttatattgtgttttagaaaagaaaaaaaatattcatttccaaccataaaatataataatgttaaattattacacttcatgtccaacaatatgaaaaaatttcgattgtgcgatccttaaaaccggacatgattgtggaactttttcatgtctccgtatatcatgttcaacacaaaagggacatggtagacttaccatgtccaactttgatagcaatgaaaggagttttgttgtgaaaattatatacgcaagtatacgcagtcaaacaagtaataaagtgataagtaagatcg

SEQ ID NO: 387415 - DNA, 795 bp, Cannabis indica
atatataactaaatagttaataataattagaaaataatgaagagaaactagaatgaaactttacaaaaaaaaaacaaagaaaaataaaaaaatatagggcagcctttacacctacctagaccattatacctaacaagaaagatttattaattctctattttcttgcctgtttttttcatataagtttttcctaaatataaccaataatagtataaacaaaagataatttcaattataaaatcaaatctaatcaacaattaattaattgtacaataagtcccaaccctaccctatactttttaacattgaaagatcttatctaatcactaatattattgttgccaaattaaaccaataaaataatatttcaaaaggatgaacagttatttatgccgactttagccaaaataatattgattaccttagtttattaagtcaaacagttagccaaaaaataaaataaaaaatggagtggacccctcctaataacttgagccaattctatccaataatattaattagttaattaataatatatgtgcattaattatattatattatttatatatatatatatattaataattatatgttatttttcaaagtggtacgtacactgtacacaatgagattttatttgagctagctaagcttccacgtaacaaataaacaaacaaagaaccctaaaaaaaaataaaaaaaacttttgaatgataattaattaatgacaataataaaagaaaaattctgttgtagacggttgttttgtagtttttttttaattgatagctgtaa

SEQ ID NO: 387416 - DNA, 689 bp, Cannabis indica
ttttttttcttaataaatatgatgcttttcagaataaattaggtaaaatgcacgttttaatgtcatctaaactataaagtagttgttatgcaatatgcatatataatcgtttggtaaaaattagtaaagtcttcgtttatttgaaaacaaagtaaaataattagattaattggagtttattatttggagggtttaccacattggtgttgcattaatttgataattaaggcttattcttgttagggaatggaattatttttttgtttttcaaaatcaattgtaggttcaaactttgactattcgatttgaaagatcataataactcctttaaagggaagcttatctaccttgatctgatatattcagagaacaatgatttggtgtgtaataagtaaatctctgtagaacaatttagttgtttttgttttctattgctgtgaaagtgacatatgagagaagagttccagcaaaagcatgcctctcttggttgagatgtggtcacaagaaatagaaattacatacaactgttttttttatcaaaaagaagcacattaataagtagcataaaaactttggattgggttagttgtaggggtgttcaacaaatttacaaaccgctcagaataaaccgtcttaatcaaactgaataaatcgacaaaaaatacaacccgaaataatataatgaaaat

SEQ ID NO: 387417 - DNA, 2826 bp, Cannabis indica
tggagaatgcaaatgcagaatatcatcattgcaaatggacttgaaggctacatcgacggaaccatggcatgttcgacacaattttccgatcccacctcgaactaagtcgatccagccttcacaacatggcacaggtacaatcggttactcatgagctggctgtacgcctctctctccgactccatgctcagccaaatcgtggctttcactactgcagcagagatttgggtctcccttgaacgcacttactcaaccgcctcatttgcacggagctccgactatcgcacgaccttgcaaaatttgaagaaagatggtttgaatgcttcggcatatcttcaaaaattaaaatctctgtgcaatacccttgcctctgttggggaaccgatttcttctcaagagcatttaacttatctcttgaatggtctcggaccggagtacaacgcctttgtcactccaatcttagctcgatctgtcaaacccaccattgaagaggtcaattcccttcttctcagttatgaaacatgcctggaacgacaaaatgatgctgcctctttgagctcccttcaagccaactttgcaaatctctcatttcccaaacagagacccaaatcgtcctctcaacaaactgcctctcaacctcgcttcccgtcccatacacagccaaatcgcccacctatgatacccctttttcatcaaccacgcagcccctatcagtcttctcctcgatcacctatgccatggcttccatctggtccgaaccgccctccttttagacctccaaaatgccagatttgctttaaaacagggcataccgctctcatgtgctatcatcgcaccaacctcagtttccagccaccacctccacgcccatttaacgtatatttcactcgacaacaaccccagaccaccccaccaccattacagccttcaccaacaaccaatccacccctacttcccactcctccaaccatgggtacacttacagacccagcttggtacttggactctggtgcatctcatcatttcacacctgatctgaacctccttgactccgcagctccgtatcatggtaatgatcacattactatgggcaatggtatgttctctcctatttctagtgtgggcactgcatatctaccatcttcatcttttcctatcattaaatgaatcgcatttaccattctcctctttgtctaaaaacttactcagtgtttctcaactttgtttggataataattcttatgttgagtttcatcctacttacttccttgtcaaaactaagggcactcatcaaatacttctcaaaggccatcttgatcaaggaatataccgagtcactccctcccctgccacacctcttactgtcgcacctcaacttctctacacctcaaagtcttccgttgatctatggcactctcgcttgggtcacccggcctcggatattatttctcgtatttcatctacttgtaatttttcatttccaaaaagagattgcctaaccttttgtactgctatcaattaggcaaatctcatagattaagtttttccaactttgtatctcgggcctcaaaaccctttgaattaatacattctgatatttggggaccggctcccgttactttaatcactggtgttaaatactttctcttgtttattgatgattatacacgtttctcttggttttaccttctaatacaaaagatgaagcattcaacacatttcttatctttaaaaatcttgtttcaactcaacttcagagcaccattcaatcggttcgaaccgattggggtggtgaataccgttccttgtcttggttcttcactcaacatggcattcgccatgatctctcgtgtccacacactcctcaacaaaatggtcgtgttgaaaggaaaaatcgacatgttgtcaaaaccagcctcaccttgttagctcatgcccaccttcctcttcatttttggccttacgctttctctacaactgtgtatttaatcaatcgcctccctactcgtgttctcaactatagcagcccctatcacttactctacaacaaagctcccaactattccttgcttcgagtgttcggttgccaatgttttccttttcttcggccttataactctcataaacttgaatttcgctcctctccttgtacctttcttggttatagcagcaagcataaaggctacctttgtcttcatcccacttctgggcgtcttttcaccaatcgtcatgtcattttcaatgaatcttgttttcccttcgctactccttcggcctcttcaccaccccctcattcacctaactccattatcacagcccttcccctctcggttcctacatcaacaaacgttcctactgtttttcctactcatacaccttcccacacttcccctccacacaatgcatctcctcccactccttctccacatgcctcggctaacagtgaacccttttatcaaatcacacatcgcagtataccaggccttctaattctttaagcggcttatctaaaagatttgcgatataactaggaagacgtttcaaataccacacatgggttactgggcatgccaatttgatgtaacccatttgatatcttcgtattcaagaatcaacaaactcgactccgcattgttcacaaaatttcgggtcttctttgtcatttccaattactcgataatttccacaagcacaaatcccactttttataggcccaaaaattctttcacaaaataagccatctttttcaggtttattggttttgtaatgaaaagtgtagggttttgtcacctctccaattatttctccattaggtaggattttttt

SEQ ID NO: 387418 - DNA, 869 bp, Cannabis indica
atttttatatttttattcctctttaacaaaatcacaccaaatagtttattttgttccatatctcttgaagtctctgtggttaatgaggctaatgatctgccacattcgacgttagctcatttggcataaccatcgcgtatgacagacatacaaaaagctaaaaagctgttaaataaacaacaccccccactatatatactctttactatataggactcggttgtatctttttttagttcctctctggctacgtttgcaaaaatggttgatgcataccgcgcatcgcgcatgcgcatcgcgtatcgcgtaccgcatacgtcttgaggagaggtagtgaaaaaatatattatttatgcaatggttattatttaccgggtttgtagtttgcttctttatttattttaattgttttcatttattagaattgaccttttattttctctgcttgtaatttttttttttaacttattatctgcttgttggttgttgtagggaacttcttagtcatactagcagtagctgtagcattaatggttgcattggattggtctctcaccaggggcggagccagaacttacttactaggggggcaactattaatttttttttcatctcttcacttaaaaatcttttcaatgtatttcctatcaattttgacaaaaaaaagcttttcagtccaatattttttattatcgtgtacatgacaattttcacaggccacttgtaactttttaaaaaaatctaaatagtttataatgctaaaaataaagttcacaaaattacttatcacgcatataaaaaaaataaatcacgcatacaattaaattttttaaccttatttttagtcattataaacaaattagattttt

SEQ ID NO: 387419 - DNA, 1483 bp, Cannabis indica
gcaattttgggttcatggaaatgaattttctagttttctctcccatgaacccgaacccctctctctctctaaccccatttcaaactttgtgatttgggtggaaaattgtttgaagcttggtgttggattgaagctttgtattgaggaactttgagcttggagttgaggtagttctttttactgattttattagaaattcctgttgaattttattatggaaaagcatgttatgggttgtgttgttcctaattttgcatgtaagaagaaatggtgttagtcttgataggttttggtgtaaataccatgatcttgttctgatttatatttgttgagctatggatgtaattttagggtgtttctcatgcttcaaaacctagttttacttgttaattgtattgctgacgttggtggttgagtatgcttgagaatttaaggctttgatagtggaaatttgttaagttattgtcaagtttactttgaatatgaattttgggggtttttatggttgggttttaatgcatgaattgtatattaaactctctatatgattattatgaaatattttcggaggtttgaagttttaattatgatttcgatggttttgagtgaatttgggacatgaaattcgtgttgaaacttgttggtttctaggtttggaacccaggtgccgcagcatggctttttcatgccattgcccgcccctgttggtgagacgtgggaattggtcccaggtgtcgtggcatggcttttgcatgccgcggcccgccctcttgtttctgggcagattcatgtgcaaactttgaaaatgcataactttgtaattcgaactccgtttggagagttctatatatcgttggaaagctcgttatgagctctatgtgataatttgtattttaaatgccatgtatgtattttgtgaatgtggaattaggggttaaccctatttgtgtaaatccaagaattgtgactaggagtactgacacctggtcaggagcacccagggatttggaatctctattattgtgggatatcaagtaagacagtagttagcacgtagagttatgcgcggtgacacttatattggaaatgatatatgtgaataattagtaatcgggattagggttatcaccctaacatgagcggtttaatagcctagggttattaccctagtgatatatgttgtgtaaatactatgccatgctgagtatatgagtatattgagattttgggttatgcgtccagggcataaccaggttggactcgataactagaaccgagatgaaccattctaaggccttattgtatttaggcgtgtaagcgcaacacgtaggtcgacgttacgtagacataaataggcatgtgagcgtaacatgcaggtctgtgtcatacatgtatatgagaatggcattaatgtttatgaagtgcgataaacatgttattgatattttgtacggtcttgctgggcttggctcacgggtgctct

SEQ ID NO: 387420 - DNA, 560 bp, Cannabis indica
tattgtttgatttgctgaaagtgatccatttgttgagggatctagaccttgaattatgctaccaaatctagagtaacacttgaaatcaagatgtcccaatttttcacaaatttgacatataggcctgttgcctcaacctctaccattcgagtaaccacgatcaccattcatgttgtagtttccacgatttctggcatttctatgatcttgacttctgcttgaattagagtcattcctcatgttgagttgaatgaaattttcctgaactatgtcaagattagaagtcgtgttctgttaaaggtgcatttcttaattttgtagcataaataaaacctcatggagggtgagagaatcaacacaagaggtcaagaacacaattatggattcatatttcgtgtcaaggccttcaagaatgtacattacaagatcttgatctattagagtgtggccagtagttgtgtaacgtccccgcttcaagcctccattgggcccttacacccacggactaatggcttttatacacgagtacggcactctggctgcttcatggactgatgact

SEQ ID NO: 387421 - DNA, 987 bp, Cannabis indica
tttgttatctgtatgttattttctattcttattctgatgttattcggatgttatttttctattacttttatgtaatttttttgttgttttcgtgctgcttttataaaaaactgtaaaaatataaaaaaattctttaaacttaaaaatttaattcttttataaaaatggtgtcatgtataattatcataaggatgttcttgttaaagatgctcttatactacatactatttttatcactattgtttggagtgcatctaaaagcacataaagaaattatcactattctttcaaaaatattgtagttagaacaaatattctagtctttttttttttttaaaaaaaaaaaaaattactgtgcaaacaataaagtttaaaataaggagattttataaaaaatattgaattttaggggtagttttataatttactgctacacagaaatttttacaaaatattgtctacattttaatttttttttcttttatactatacacactccaaaatacatacgaagcctccatcttcaacaattacggaccgaaccaccaaagcaacaccaacacagccagaaaacaactatttttccagtcaaaacgtaagtatttaaaattccaatcctaaaaaaataatataaaaaatcactaaaacaatagtaaaactacaaaataaaataaccaaataaaatcacaaaaaaatatacctcaataactctttttccagtggagactactataacatcaagaaagggaaccttcacctaggaaaatttctccttataccctgaatacattaaaaaaaatattcataacaaccaaaaacaaccgttaaaaaaaaaatcaagtatataatactaaatatcgaacagcacatacagaacaataaaacatacatttaataaaatcataaagtgatgaacaaaatcctaaattgatatctgagactgaacatgtacaaaaaaaactaaaaaagaagcttaagaagctgaag

SEQ ID NO: 387422 - DNA, 2459 bp, Cannabis indica
aaaactggagctccccaaggcaacatactaggttaggtaagccctagatccagcatcccttaaagttgtatttttagctacttcagttctgtcggagccatatgagaaggtgcctttgaaacagtctctactccaggtgccaagtcaatgatgaaatctatttgtcgttttggcagtaatcctagtaactcctcaagaaataaatccaggaattcttttacaactctgacatactcaagccaaattttttggggtctactagagtcaatcacaactgctaaaaatcctacaatccgctgtatagtaaatccttagaccttaaaactcaaaagatcagaattcgaggaccctgaacgaagccaacataaaaaatggtacctcaccctctggctgaaaagttaccatcttctgttcgcaatcatgttggtcaaatacttggacaagaattccatcccaattataatatcaaactcagttaattccaactccactagatcaacgcttaactccatattctcaattctaataggcatagaccaaacctgcctttttgagataactaattctccactaggtaataaggttccaaatcctatctcaacaaaatcacaggacctatctaatttattaattacccttgatgccacatataaatatgtagccccagagtcaaacaacatagtataataggagtccttgacaagaatctaacatgttacaaccaaaggactagctgcaacatctgcttgtgtaatggcaaacacccaagtaggtacaggttttgcctcttatttttgctcttcctttttcatctgagggtagtatttcttaaaatgcccgaccatgtctcacagaaagcatgtcttctggttacattctcttagatgatgtttcctacaatgagggcactcaggataagaatagccctaatgtccacctctaccttggttctcatagaatctcttactttgtcatgaaccacccaatattggaaaattcttcctcttctgataaaaaattgtatcaccatcatccctaccataaccagaagtaggaaggatggtggtcccaccaacacttggggtccctcggggctcttgaagaaattccattgtgccctcggctcggagatccttttgaaccatctcagtgtaggttgttgtgtcatttgttgtaataactagatcgtgtctaatcttggcattcaaacccgccaagtatttttcctccttgttgaagtctgtgggcacaataccttaagtaagcttagtaagtcagtcaaacttaattgtatattctatcactgacatggtgtctccttgaatcagttcagtaaactcttttctcttagcacagcaaacagcctcattataatatttggcacttaatgaatcccaaaattcttcccaggtcatagtagtgacgtcttgggtgagggataccatctttcaccacacgagtgtgtcttcctagaattggaatataacacaggtcactcgatcatttatagtgacactcataaaattcaaaattctttaaattacagccaaccactgttcagccatcatgacatctggaccttcgaaaaaaattggaggcgtctacttgtgaaaccttccatacaaaggccccatatgtttgcctattctttcaatggaagacttgggttgataccccaaaattaactacactgtgcttaaaacatataaactacaaaggcttattaattttatttgttttaataataaacatactttggtttagaccctctaaagccaacaatggagacctccttcgcagccaaagaacgagcttgggaaatgacattttagggtaaataatgaaaatgagaatgaagagacagaatgttaaaacccaaataattgagctcaaacatgtcacatgttgtcacaatatcaactttgtcgcctatacatgcactctcgatactcgcaatgacttgtattcgtcaccgttcaaccgttgttttggaatcttgtaaacacattatgtgtcactagaactgttggaattattttaccaggatcatagatttataacaagtatgttatttaacatcctaaatatgaacttctaaaacgatatgaaataaacacatataaagtataagaaaccttacagtggttgcagcgaaatataatgtctccttccacttagatctctaacccttgtatcctttctaccgcagagtgtcaccaagatctgagctcgaatgtcctcttgaatctggattcttcacaatcttccacactatgattgaggtaccacttgatgtgtgtgggcactcactcactaactatagggttcggttttcggaagagaggaagagagagagaaggtgtcggctaggtttaggaagaaggctttgagtttttctctgaaggaatgagatgcatcatctttttcctaaagccatcactacctatttatagcaaacc

SEQ ID NO: 387423 - DNA, 641 bp, Cannabis indica
agagagagagagagcaattcaattcttattttctaaaactttgttactatatatctcaggttacttttattgttaggcttttttatttatgacattatatatcaaatatataatgttacaaataactccttttgattccttatttaaaataaaagaataattagcaaatttccatcctgaacttttgacaatactcattttggcccttaaaatatacggcttgttaagaatcccctctaaattattatatttacagaaatttagtcctttagttaggttctatcccattattctctttaaatgatgacgtatctttttcaattagcaactttgcccccaaactttttcaactatcaattcgtatccccttaaaataaaaatgacaaagattcaatatttttttagaaagtcttaaaaaattaatttagatcttaagaaaaattattttgaatgattaagaaaattaaaaaattttaaaactaattacacaatataaaaaattatttattttttattagaaaatttacttagatcttaaaaaaatatatttaaaatagaattgtaaaaatatattaaaaactaaattttacaggaaaaaacttgaatatattttgtttttatcaaaaaatatagatttgttt

SEQ ID NO: 387424 - DNA, 2742 bp, Cannabis indica
acatgtcgagaaagtgctaagaatcattagtgcctaatgacaatactctctcatgtattacttgctagtgcatttataatattagtagtgcaattaaacattaaattctacacaatttaattaataattattacaaaatatagctaaaaataccagtctcttttaccagttctcttttataaagtactgtgattgacgacttcttgtaaggtgtaaggtgtaaggtgtaaggtataaggtggggttattgagaaaattgtatatatatttagctgacttgtctccattcttcctcaatacacacactagtatactatatatacagtcaaccaaaccttaattcttattcatttattaattcataacccatatcatatatatagtatatatagttatcgttcgttatatatatatatttattagttctgaaaacaaaaaaaaaagaaaaatggaggaagaaaatggagttgtgataattgtgggagctggaccttctgggctgggcgtggctggttgcttaagccgattatcgatcccatacataattctagaaagagaagactgttacgcttctctttggaataaatacgcctacgaccgactccattttcatctcagaaagcaattttgccaccttcctcacatcccctttccctctgattttcccaactacgtctccaaaaccctctttctccaatacttaaacgactacgtttctcatttccagattcgacctctttaccggaggaccgtcgagtcagccatttacgacgacgcttccgccaaatggagcgtcaaagcaagatatgtactgaacaataataatgatgatgatgatgatgatgatgattatgagattgaggaatattccagtaggttcttggtcgtggctaccggagaaacggtaacccttttgtgccggagattaaagggttggatggtttcgccggggagattcttcactcgacccagttcaaatcagggaaagagtttaagaacaagaaggtattggttgttggctcaggcaattccggcatggaaattgctcttgatctttccaactacgacgccaaaacctccattattgtcagaagcccagtacgtctctctctttacttaatttctccattataatatgtaatataatattaaatgtttaagacagccaactacacctaacttatatgctttaattagtagaatttttgtgctgtttaataatataaagaacaaaacatgtttaatgttttaatatatattatgtaatattgtaggttcattttgtgtcaagggagatagtttacttggcattgattttattaaagtatcttccattaaaaatggtggactcagttgtggtgatgcttagtaagtttgcgtatggagatttaaacaagtatggtataaaaagaccctctgaaggccctttctatatgaaggtcaaatatggtaaatacccagttattgatgtcggcacttttaataagatcaaaaccggtgagattcaggtacgtcaccaaatcaaattagttaaatactatttttaatgttgtattttgtaaaaattattaattaaatttttattttgttaaataataaaataaattttatattttttaaaatagtataaatagaattttgaactaatttttttgagtcaaaataaaatttaataataatcatatttagatgtgttttgacaaaattatttatattttccgtattacaaatattttttaagttagttgtttgaaaaacaatttgttaaaaattaagtttagtgtcttatttttactattgttcattttgtcatttaacagaatagggagtcaattaacttgtgccaaagacaatctaactgttggaaatataaatgaaagaaaaaaaatagtgtagtgattcagacctggtttattggtgcaggtattgtctgcagaggtagaaagcgtagaaaacgacgtcgttttgttgaagaacggcaagtcgtaccaattcgacgcaatagtgttctgtacgggtttcaagaggtcaacaaatttgtggcttaaggtacgaaactgataaaaggtccaattaatttttcaactaaagaaaaaacatgaaacttaggctacaagatttcattcattggccgttttaagacttttatattattttgtttcacatggtgaattctgaaagcaaagatctgacattattgtcttacttttacattacgaaaagagagttcttaattcattttttttttattattttttttttgtaaggtagatgattatctgttgaataatgatggaattccaaaagtaagttacccaaatcactggaaaggaaagaagggtttatattgtgtgggcttatctagaagaggtctctatggagctacagaagatgctcaaaacattgcaaacgacatcaagttgatgatgagtgatctgcaaaacgacgttaccaaaaattagagggcatattgttttcaaaaatttatctctataatcgacagtgagtactaaagttgagtaatataataattctgttatgctttatctgtgaagcttctcaatatgtgtgattgtttttttttttttttttgaaaagcaatatgtgtgattgttacttcgtgattttcctagctggtataataaaaaataatattaaaaaatatttgtgattagtaccaatcataaaatacataaaatagacacatcttatctttatattagaacgatgctgtttaatagt

SEQ ID NO: 387425 - DNA, 1648 bp, Cannabis indica
cattatgtgtttctgctaatgttagcggcaaggccaaacagtatgctacctgactaactttgcccagtgtctcgaaaggacctataaacattgggcttaactttttcctttctccaaaacgcataatccccttcattggtgatacttttaagaacaccaagtcccctacaaaaaactcaacctcccgtctttttagatttacataacttttttatctactttgggcagtgagcatcctttgtcgtatcttttcaattacctctaaagcttctcttactgcttctgtacctaaatactgtctttcttcaatctcatcctagtaaagcggtgatctacattttcgtccatacaacatctcatatggcgtcattctgattgtggcttgatagctattattataagaaaattcaattactggtaaatacttattccacaagccagtgaagcatcgtgcacatgcttgaagcatatcttcgagtatttggatggtacattcagattgtctgtctgtttagggatcaaatgtcatactaagttttaattgcatccccattgccttgtgtagaccctccaaaaacttggaggtgaatactgaacctctttggaactccatgcaaccttaatatctcttgcatgtacaagtcagcatattgctctacattataagtagactttaccagaacaaagtgagctgactttgtgagtctatttatagttacccaaaccaagtcatgtggcttggttgttcggggtaatcccgtcacaaagtccatgtccatatcttctcctttccattatggtatttttaagggttgcaacattcttgttggtctctgatgttcagccttaagttgttggcatgtgagacattaggatacaaatttagctacatcattcttcattcctggccaccagttcatggtttttaaatcgttctacatttttggtttaccctaaatgcatcgagtagggtgtagtgtgtacttccattatgatctttctttaaactctatgtcgttggctatacacactcttcacttatacttcaacatgttgtctgtacctacagagaaattctctacctccttatctggcaagcttgctctttttcttttgtaagatttcatcaacaacttgtgtatctttaagttcttgtagcaacgttgagacaatagtaaggtaagctagtctttttgtaatcatctctataccacttttttggagttcccgttgtaatggcttttccatttatgtcagtatttccaagttgcataattgcatctgcttagcgcgtctggcattacattggccttctttgggtggtaatagattttgcaatcaaagtccttaacaagctctggccatcgtttgtgccttgtgttgagttccttctacgtaaagaagtacattagactcgtgtggttggtatagatttcacatttcttctcgtagagatagtgcctccatatctttcatgcaaaaattactgctgccaactcgagatcgtgtatttcatacctttgctcatactccttaagttatcttgaggcgtacgctactactttctcattctgcaatggcactataacgcctttacttaaaataaagtgcaataaataaactgacgttaagatactaatgttgcctt

SEQ ID NO: 387426 - DNA, 561 bp, Cannabis indica
cttattcagggactgtgcttttgctaaggctgtttagttttcctgcgatatcccacttgggattgataaaattccatacgacaacttaatccagttcttagaaggccttgtctctaatcttaacgagatcaagttgtattcactcatcttgtattttggttgtgttacttgggagatttggaaacagagaaatagtaccaggattaagggcagaccccctatctgggctctctgtaagaatcatattgttgttatgttcaaggagtactccttggacgttgatcatggctgccaaactcagtgcttaagggagggaattgataacaccaagaaagaaccaacgaagtactccttgattactgatgcttcatggctgccgattttgtgcccaaatgtgcaaaacacggaatggaatccgtgtacggcaggtaggtcccacgttagaatagttataatttttaattatttatttaagttggcaaccggttattctaggttaggtaaccggttgtaaatttgtatttttaattaaaaaataaaaaggtacaatttaattactgt

SEQ ID NO: 387427 - DNA, 3571 bp, Cannabis indica
taggggactagcaatatctcaactcgtcaacagcaaccctactacatcaacaagtggcaacaagagagcaagtccttcatttgtgtggcatgaagatgatagtgacacaaatgagtgcctgaacctcagtccctcgcatgaacccattagcaaaaaaatggtaaagcatgcaaagatacccatctatacttgtgtcgtgtttgttttatgtcataaggtggatatgtgactactaaagaagtcaatccattgtttcgtgtaccaagacctgtgactactcacaagaccaacagagattcttgctcataaaaaatgacatctgaagataagaaatcatacagacgacaaagattcatctggccagctaaaaagtttatctgtttctagttatatatatatataatctagaatcatagagattctttctcaagggaaggatgcagttgaatttttaatcatttctgttaatagaaaacctatatatagtgaccctcattatcaattataaacacataaatttagataataaaaatcccatctttcttaactcaatgtctttctaaattttctcttagcgtatatctctctactagtccatactagtctaaccaagcctatactcaactctaaatggtatcagagctcggtatcgttctccttatctttcctattgagaaatcccaatctcatacatcatgaaaacaccttctaatattatcgcctcttccaacctctcaacacataccataccagtatccatgcctcttacaataagcccaacattacgacaatcttctgcgagaaaactcgatatttaatatgaaattttgtatctttacgatgacgaaaaaattgtataatatgaccttcccttaataaacccttatcaagctttcttcaaaccacaaagcctttttactaaaacaataaaaatcctcattaaacaaaacctaaaaactgtcaaagaatatgtccaatcaaccaaatttgatcaatgtaaccttcctattatagagcaagaacaattagtcactctccaaatccctcctgagttttcacaataatagatagaccaaggtctaactcacatctattttggggcaatcagactcgccttaacccatcacgggaggaaaggcttaccagaatattcaataacattgcttgatacaagaataagaaaattttaacatgactctataggcaccctagaagcaacactcaatacaggcacaatcatcgttacattatatcccaatttttgcatgtcattgagggataaacaataagtagatgccttgaaggttcaacttcaaattgtgggcatagatcaagatcctgattccttaggatctatgctacactatcaaatggcctacagggtgtgtttaccgagatttttaaaaactaattataagaaattagaactaaggaaataaataattcaaaaaaaaaaataaacacacaaggtttttacgtggttaagatgttaatgagtcttattcctacaagtcgatattattatatatttttagctagaaaagcctttgggaatacgatgagtataagttctctattttttcctgagcaagtattgcaagagcattgttaggctatttttagcctacgttttgggtcactttttatagttgtttttcttatttgttattatttttggaatagaattatgcttgttttctttggtttcaagtttcacacttgaaatatataaattgatcaaatttcagaaaacaacaatctataaaataaagaaaattttacaagaaattaaagctgaaacttcaagtttaaatttgactatgttctgatcagattttagaaaaagtcaaaacatggaagctttagatttctttttacttctttccaaccacatcttgaatcaactcatttggagtttgtatgtgtaaagttatacatattttagtaaaagatgttgaagctgtcaatttgcttgagtagtcgcgaccaccattttccatggtcgcgaccattttccatggtcgcgaccattttccatggtcgcgaccctttttcatggttgcgaccatggtcgcgactatggagcaggtagagagcttgatttttttgttttgcctatagtcgcgactaagcattcaacccttaatctgaagaatttgttgggcatttatagtgtttataggaattatacttaattttcttttttctctctaaatggggagtttacatgaaaatacataagattgggttgtttcatgaggcccagcccaggaaaggataaatttgtcgactaagcatattagacacaattaagctatcattggcgtgtcctctaattgtggacaattaattatgaattaattgcttgatcttcatttgtggtaattttactttttagcttaatacgatcatttggccgagatttgaaaagagttaattccttattctgtgcacttggataaaaagagaaactggactactctttcaggaacacgatgtttgaccctccagaatcatgatattggatctcctttcaaataagggtcgggctttctgacacaacatgaaaccaacacgagcccagaaagcactagcacgactaggcacaaaaaaaatacgagcttaggcacgacacgacacgaaaaatatgtcatgaagcatgacacggcacgagaagcacgaaagacacggcacgtaagcacaaatagactagcccagaaaacacggcacaacatattataaaaccataaaatttattattattattattattattattattattattaagatatgaatttaaaattataaataagttaaaacaataataaaatttaaacataatattgaatattataattttataattaaaattattaaaatataaaagaattaaaattatatattaatttatttatagtttatagggtgtgatataaaaatttcagcatttataaataaatattcaaattttaatgatattaaaattttttcatataattatctataaaatattattcaaaatttatatgaatataactaaagctttgaaatatataaaatttaataacggtaaaaaaaatatgaaaaagtaaacatgaatttaagcttgagtatgaaaataggctgatctatttaaaaaaatatgggtcggcacgagcaaagcacagcacgaaaatactaggcctacaggtcatgccggtaccctttaaaaatattggcacaacatagcatgactcatatttttttgttggcacggcatgacacgactcatttttgaatgtcataaaaaaaataacagatcgagccagcatgacacgcacgaacttatagcactagctacatctactacgagttcttttcttcatagatatataccaattcacaaacatgtatactatataccaattcacaaccatatataatatatactaatttatgcatatattatgcacaaatacagtagaacctctattcaagaatatacttgggactaagcaaattatattttaattgagaggttataactaaatagagttacactagaaaaaaaaaatcaaaataccaaaaa

SEQ ID NO: 387428 - DNA, 1711 bp, Cannabis indica
gtcctacccctaacactacttgtagacggtcccattacgacccacatctagaaaataaatctacgaaattgtcgtccaggatggtcagattgggaacactaaattaagacaaaaagctacgagatgtgccatctggaaccataaggattctagacaggagaatttaagtttagcaatgcttagtgctaaattttagttatttcaattcactggtaaatgcataagatagcagaacctaacaatgtctacaagaaataagacacaaaaaatattcgtatttgaacaaaatgttcaaagtatggcctaaatcctattgatctacctagggtaagcatgcaatcatcaagaaagaaaaataaaactttaatgctacttagaattttagaaaatacaaaaattacttacttgatgaagaacttagagaaagatgaggatttggagagggaatacaaacatcatgcgatggcctccgaaagatttttgatgaaaaaggttcgttaatgcgcacaagcctggtatgaagggagaaagctttgttaatgagtgcttgatctctgcttgaagatcaatggtttcgatggtgtagaagaatcaataattaagactaggggtggtgcttctcggtattctctctcacgagtttgaagaagaagattaaaactctcatcgaaataatggttcattcacaagaagcgatttctgctctttttctctctaaaaattcaaacttaaaataaaatctaggaaaaaatggtaaatgagaagaagatggtgatctacgtgaactcagatcaagggccaagataatatttaggaaaatatagaatacatccaacggtccaaaagagatgttagatttgcagttaatgcgttttttggaactgggatattcaaatgatgatgttctcctcgtgataataactggcatgatcaaccatcattttgcaaatctgttttgcatgcactccattaatgaaagtaatccccgtgagccaagggaatagtgccacatgttgcttcatttcaaaaagcaagaagttttcaaccataaataaatttgtttagaattcaaaaagggtttcacctttttaatgtccacatgtccttagccacctggaaagttgaacgcaaaccgttgaaacaccttaaggatctgaaggattgggggaaaatgttatccgtgattatggatggaggatacgtgtaattctaagatggtttcagctcagctgttttaggcctaattgtctgcccatccaagataatggactggatccatcagcaaagtcaagtattctggatattggacaaatggctcatctagctgagataaacctccaatacatagtatcttcagatgacatcgaacaaatcttctggatgaacgattaatggatattcgaatatctagctctatatcacaacaatttatctccaaattccataatactagggcttttatttccatgatcatgaccaggatttgtatcttctgataaggaaataaagtaactttaaataaagaatttgtgtctttattattcacaaaagtaagacatagtttgacgtggcatcctcatcaacagaagatcaatacctcatgggtcaagcttaatgagacaggcttgaagttaatgtattatttgtacttaccctattagtagccaaggtttacatacaagaactctagcactataaatataaggagaac

SEQ ID NO: 387429 - DNA, 866 bp, Cannabis indica
gaagttgatgtctcgccttatgcttccaacgtcgtatagtttctcgttaatacatgaaacaacagtttgtatatctttatcttgcataagactttatagtcagcgagttgcaagtatattctgtcatttctatatttaatgagttgttccatcagaagtgattactgtttcacgcatcgatccatattccccttaacttgacacatgtcctccactgaaatggtagtcgaatttcaggtataacagagagtatctcctaagttacatagaaaatttctatctaacaagcctagcaaagaaacaatatcataaaggacagaattgtcaatcaattgtgacactctatgtattttgtgaacgagctcttactataataatgagcaggtgagattaagcttttatgtatgtatatatcttacctaatataaaaaatatctatgtagcgttattttattgtaacttaatagtatgttgtgtatttaacaggatatacttaaacaaaaagttaactttaacagacaccccatatacaagtaaaccaattctatttaaaaagattacacagaccaacgcaactattctgaagatacccattcgcacaagcactcattcattcacaagccataaatcataaatgaaacaaacagataatcatcttctcaatagttttttatataaaaaaaaacttcgtgtagtgccaccatttcagatcaaattgtttattatttactggaaaccgcagtcattgtggtctcttcaagtatttctttatcactctcttgttctaaatttaatagcaatagtgttataaaatcaacctaaattttatatatatatatactagtatattgttacgtgcgatgcac

SEQ ID NO: 387430 - DNA, 1656 bp, Cannabis indica
caaacaaaagggaacatgaacactggatcaagatatgacatcctatctaaggaagtttcacagcaatgtgattcaaccgtggaacaaaagaatgaagcggcgaactctgcattgcagggtcgccgagaacaatgaattccctaatttggaatttccaagggcttggcaacccttggactgtttcggctcttgccacacatgtcaaagatttcgatactagattggtttttctgttcgaaactcgttcaaggttcatgctcgcttgggttttgagggttgtttttgtgttgatgcaagaggcaaaagtggggggttagccctcctttggaaagctcctttttctgtgtagataaagtctttcaatgattttcatattgatgcttggatcaatatcgataatgactttaactggcggtttacgggattttacggggaccccgatccatcacaaagaagacacccatggaaactgctgcaacgtatagcaagaagatacatggggccttagttatgtggtggagacttcaacgagatcagaggcactcatgagaaacaaggagggggtgaaaaacctcgttacttaatgaaaaattttaacaatgctattgatatgtgtgctttaagggaactagagtttgagggcagcaactttacttggtgtaacggaaggaagaacaatatgatctttgagaggtttgaccgagtaatcgctaataataaatggtggaatcattttgtagtggcaaaggttaaacatttaaggcgttggtgctccgatcattgtcctctagtggggacttttaaagctattccaacgaataataaccagaaacaagcttggggtcatcgatttcactatgaaagtgcatgggctgataaagaagactaccacaaaattataaaggagagttgggaggagggccgattaattaattaagcagcagagtttggaagcaagttggatctttgtggagaagtgttggggcaatggaataaacagcaaagaagagaatgccaagctcggattaaagttttaaaaaaagaagtataaattttgtctcgggatcactcaaaccaaggctttacccgattgaaagaaagggagaaagacctgaatggacacttagcaaaagaagaacttttttggaaacaacttagtaaggcgatttggcttgctcatggtgaccgaaacacaagatattttcaccaaaaggcgtcttctcgcaggaagaaaaatcggattcatggtctttttgatcaaaatctgaactggttgaactctaaagaagagatagagaagaccatttctgagcattttcaagacctattttcagttaaggacctcaagtgcgacataatggctcacctccaacgatttgttccctcacagcttagtagaagacaaaacgaaatcctccttactgagttcacagctgctgatgttcttcaagcaatgaagtaaataaaccctctgaaggctccaggagtggatgggatgccccggttgttctatgagcatcattggacagtcatatgttcagacgtaaccagaatttgcttggatatcctcaataatcatgcggactgccgagcgataaacaagaccctcctctgcctcattccaaaaaccaatagaatgaaagatagcttgaagga

SEQ ID NO: 387431 - DNA, 700 bp, Cannabis indica
agaatttgggattttgttatcatcaggaaatgcatccttaagaagctcaagaatcatgtcgaagcctttaatactcaagctagtcaatacttttatatgcattagcttaaccatgaaagtcaaacttgaaaactttgtacatccaggatacaattctttttctacttcatcaaataagttatggaagtttttccatttctccttatgacttgaatcctcaaaattctcagaagcattatgtgtaggaacttcttgagccaagtcttcaattgctgggatcatatcatcattgtcatcatggtcaatgtcattattattatcgccaatatcactgaaatcttcgacatcagtagcatcattattatcatgatcactttcttctaaaatatcttccccgtgatgtacccagttaacatatcgagtataaaacccttttacgtagatatgacgctcaattgtctgtaagtcatgaaagtataaattcatacacataacacatgggcaccgaatcttattctcctcattcagatgactacttgataatctaatgaatttttgcaatcccttattgtacttggcagacaatctattgttattagaaatccaactcttatccatagcttgtttattccttttcagaggtgtgaggatgatgtgttacactagaaaaaaaaatccaaagaaacaatatgaccaaatt

SEQ ID NO: 387432 - DNA, 2749 bp, Cannabis indica
aatttatttttaattagttttttttaagtaatatttaataaataagtaaatatatttagtacaaataaatttattgtagagttcttaatcaaacttcattaacaggttttttttttttttaaagttagattactaattttatttttagctacagttttttgataatttttcaataaactgatttttaactatttactaagtacctttaattatagtacagttaaaaaaactaaaaactgtgacaaacgaacccaaaataattaaatgctataaagaggaagaaattgttagaggaaagactttgtagtcatattgtgttagattatgagttcattcttacttaagagaagttgtcataaatttttttgctataataaaattcttctacaaatatcatataattattttgaccggttaattaattttatttaaggctttcatttatattttgacttcggttgtaattgagttaattaagtgtccaagtacgtaccacaatcttccagacatactagaagtacatatttaattttattttaaatttaaatgcgtggacacatcacagtacattttttttaataattctctactttatttacttaggccaataataacactatatatttacagaacgtaatgagatataactgatcagttgattagtttaataattattttctttgctacttttttcgatatctttaattaatatttgtcttattaattccttgcttttgatcggagttggcatggtgagtacgtacgtacatatattaatttgtttccttatattgttttacctcattaattagttagatatattgtctcgtgttattttcttaaatattgttcattctatatatactactctttcaattcattcaatatatataatttttattataataataataactattttctcaagaagagccaattaaaccatgcatcttaaatattaaattatattcttcagtaggtttcactttcctctttttgttgtcgttaatttctaatgtttgaacgtcgtttccatagtttcaaattctttattactattttggatcaggatgcaagattcaacaacaatccatacttgttttatgtgtacacatcatttcaagaacgagccacgtttgtgtcccacggcaacacggcccgtttagcgaaaaacaacggaaacccactcttggcgcgcatttgtgggactattgcggccgatgagaagcgtcacgagattgcgtacgtaaaagtgaccgagaagctcttagaagttgacccaaataatgccatgctagcaattgaagaaatgatgaggagaaagatcacaatgccggccttccttatgtacgatggatgcgaccccatgctattccaccatttctcggctgtggctcagcgcctcggcgtctacacaactgatgactacgccaacatcttggagttcttaatcggacagtggaagttagagaagatggaagggttgaaacccgaagctcaaagagcgcaagactatgtttgtggcctggcaccgagaattaggaggctgcaagagcgagctgatgagcgcgcacggaagatggggcctcttagtgtcaagtttagttgggtttttaacaaggaggttcttctctagaacgaaaaatttattagggtttaaataaacatgaattattagtgtaataaaaaagagtgagcatttagaattgatcatgaccatgatcacgatcacgatatgatgattttacctttttttttttttcttataattagtatgtttatctatgttgttgcttcgtatgttatattttgcttaggcaattagcgagagttcttttttctatcttttgatagtgcaataaatatggttgtaaggagttatttgaaattttttttgagtggaaacgacctaaaataaattacagcaaaaataggtaggggtcattgccattccaaatccgattgttatcttacccaatagccatttgagctaagttatgtgtttctgtattttcttgtcgtggaaagtgttgaagggaaacagtggggagtgaagataacacctgccataaagaattcacaattgctccatatgtagaaaaatgggatcgtctgtttggatgtttgagatgaggtttaagcagtatgattccacctgatgaatttcaatgtgctctctcggcaccagcataaagcttgtaataatacccatccttcagttgttttcggggtcagtccatgacggctcttagccatagcagccacgagtacttgtcctaaagagtttcaaatcaaggcgccaacatccgtttttccttccctggttgaaatagtgccatcaacattaagcttctgttttcccgtctttggaggtagccactccctacttcaatttagactatgaggggataatgaattcgttgatgttgttgagcttgctggtagaaggccaaaaaaatcctctgttttttgacaaatcctagaggattgttcctgctgattcctgaacacaaaaaaaatcatgttgttccaaatcttccaaataatacacagaaaaagtagtatatcaatgatgttttttcctctcaaatcactaagagagtgtttaaaaactgtacttgatcacaccttcttaacacccttacagtcaaataaagcatgttggccagactcacgatgcaagtcacaaagagggcaagtgtgggaagggtaactattttaaccgagtctgcaagcagtattatctcaa

SEQ ID NO: 387433 - DNA, 874 bp, Cannabis indica
tccccgatgatcttggccttatgtcagaacaacagtaaactaataagtgtttatcccaaaacactagcttaatagttacaaaagaacaacctagggttcttaccaaaccccatagtattaataccctaaaataaaacttatatttttggctataaaacatacaccatatggtagagctcgtcacaagcttcaaaacagtatatagaacatccaaaatagacagccaagttaaaagttatggccaaaatatgaaatttaacttttctcggttactgccaaacggaattctggttgctacagccctgtaccatccggaattacagttcataacagtagggactcaaaaatttcaagtttttaaagtcctaaaactttctccaaatctaaccgattcattccaaacttcacagattaatactatttcatcaatataacataatccaagtgagagaaaccaaaatcaaatcaaaaaaaagaaaaccgccattaatgaccaagcttgagtttgaagaactcaagcttggttctacacttatgccaattgcaaacaatcattctaaacatcaaaacaaatcccactcaatcctagaaatactttctaatcattctttacactcacaacaaccatacataacaattcaaatcacaacttacactttcttcatagtttttaaagaggagaagatgaacaacaaccttacctcttgctccttcatctcacttcaggttctagtaaataattgaggagaaagatgagaaacttagctctaaattttctttgtctccatggctctatgagtgactcgagagaaagagagatgtatagagaaggataatgtaacaccctaactaccttaggcgtattacgtgattt

SEQ ID NO: 387434 - DNA, 2581 bp, Cannabis indica
ttggtttgcacaaagcgatgaagtgaaggaacagaaatgggtaatttgtgtttaagtaatggtagtttcattatgatgtcaaatttttggtacttttaataattgttagttgatgttttggaattttatggttttgtatgagttcacaagttttgttatggtttcataggttttattatgattttcatagggtcgaaactagttttacaaggttaactagtttgaaactggtaaacagattcgaaactggtttcaccgggttcacaggtttgaaactgatttcacatgttttgagggttataaaatggggttgttccatcttatgatgttattatatatttttcattttaagtttcttttttttttattattttgtttctaggtttgaaactagttttgattatatttatgattagtattttgtttagcattgtgtgttgttttgattatatttgtgattactatttttttttgtgtgtgtatttttcttttttcatttggtggcttattgaaactcgtttcagttaactaaattgtttaacatttcaattttgttatggtattgttagaatatattttaccagtatctagatttactaacaagtatgttctataatctaacactctaaatatgaattcctaaaataataaaaataaacacatataaaatttaggaaaccttactgttatcctattttttgcacatttgcgtggcagtaagaatggatgacacgtgtcccacattttcgatacctaggcggaggaaagtattcctagtagctcattaatggctacttaacatctgtaacacttgaacatccaggcaggatggtcgagaagatgtccgaccaagatccagacatgcttatgccaagcaaagtgtgtaagatggtaattctagagatcaatctcttcgcttcgaagacacgaagacaatccctataattgtgggattgagtcaaagaataaaggcaacacactttagtttcctatttcttacattgtaattataaaattaatgtaatttcttattttgttcattataaacaaagggaaacccttcctcatgtattaatcccctgtaaatagtgacataatctcactatggaggggtcgagagaattgattcaaaaatacactcaagagagaatagtgacctaagagagaaaataactcagagatccattataagagcttttgagaggaaaaatactttattccttctctcaagtcaatcgaaatacaaggggagtaggctattaccatactcatatggccgaacctctttaaaatctggtgttctcttactttaatgtttttgctttcttttatttatcctatttaattgctttatttttgactcactatcgttggctagaagcgaggccaacattttggtactttcattgagagcaaaaatacaagcttgtctttgttttgacaggtgaacaagatggttgtacaaactcgaaggggaggccttactaatcaaggcgacccaatggtgacagatcccaacgtgcaaactcctagaaacatgagaggaccaccaaggacaaaccctaagtaagttaatacataacctcctacgctatgccatggagtgacttctcctctggctgggttcgcaccaggtgtataggagactagaaacactagtacggttgtcgatcagaccactcccagcactaaggtcccgtccactactaacactcaaaggctggctggagatgacactgaactccaatatctgcgagaggcacttgagctcatgcaaggccataagaatactctgtatcatgatcagaaggatctccaagcagcattaaccttgcattcgacgagtaaagacattaattcatagagtggagagaccgggagatggaaattatgaaggcacaacaagtagccattgatgatcgttctaggcaggccactgtgctgataagaagggactaccaggttaccaatcaacaaccagctactgaatctagtattcccctaagcagatcagaagggtatgaagttgggcataccacataaactcgtagtgattagccgtccaatctaagggcacaggtctaaactatggggccaaatggtagatggccagatcctaccagactgtcctttggaggaattacacactcaaaaaactacactaccatcgaagtctcaggccatcctgtcggataaataagtcaaatgccaaggccacctggtacttttgtgtttgataggttgggcaccgcacatgacctcagaaccgatttgaattacaaaaggggactagatggataaaacattccaccgatcgtccagccacatactcgtgcccaagatctagttcaaagagatcctaatgtgacacaagtcgttcaacaacctgaacaagttcatccacttgtgtaggtacaaatagatcaacttaaaacatggcacaaggcctaaccagcccaaaactcatagatctggaacttgatcgggcacgtggatcacccttctcacctgaaatcgaagttcttgacctacccccaaagttcaaaatgctaatatggaaaatatgttgggttttatgccc

SEQ ID NO: 387435 - DNA, 1873 bp, Cannabis indica
acacttcacacaaaaaagtttagatcaatattcacatataaatatttaagattttaaatttccaaattatgagttatgccttattatgtctcctaatttttcaacttgttaaaaataatattaaaactaaattataagaaaaaacttttcacaatattttaaagtatttattttattaaattttgtcacacgttttttttttatttaaactggtatttatttaagcaaacaaaaacacacaaacaaagtctcacacaacagccacaaaaggggctgactccctaaccacaaaaatttggcataaacgatttactctagcttaggaagctaggaaatcagccaaagagttcaactcacgggaaataaatttaaaagaagcaacattaaacttaatagcaaacaagagacacgtaaacaatagaatattattgacgtaaacaggagacaagttttgtcacacgtaaataatagaatattgacgtgtttattgagggctagtttactatagttgtactgtgaataaatcagatgtagttgtgctgtgagaaaaataattgtagcaaaactatagaaaaaactaagctgagtatttagtaaatcaatatcaatcaatattgttaacgcagattttcgttaactaaaaataataagtctttacgtaataaatatgccacagaaataataagaaataataaatgtacagataacaccagatattttttcgtggttttccagttaaatttgcatactccacgagtctatattcttgatgatattttctgaattcaagatacaatgtataattgataatgtatctttttctctctaaaaattctccgtccctttttctgtggaatatgcccctatttataggaatataggttgtcagttatttacatttgagatcgatttgaaatgtaactgttcatgaaacgtgaacaattctcacgtttcatttaaatgcatgtgggataatacaaaataactgcttaactgatttttattcttatccttataaatggttaatgctgatttggacaattgtatctcgcttaattccgagttattatccttgtttatcataatgtggaaaaaacactaagtattagcagatagttcgcctcgtcaagtttctttagttagaattgcgaggtagctgtctcgctattcttaatccgaggttgctttgtacgactgtattcactcatttgaataaatgaattatcttctttggttgtgtactctaaggcaggtgtgtgtcttgtcaatttaagttttaatagactttatccttgtctcgcttaagactatttagtcaacgagttatgaatattttcttttaatcctttatttaaaaagttattcattttctttacattaaatgatataattttattatatcacgttgttcatattcaacagcaagacacgtgtcactttctgaagtgaagctgaattttgggtataataattgccccttaaaaagagctttttaaatgattacaagggtatttttatcttaatctcagtttgaaaaatggcatgctttgagttttggcggtttatgattttgaggcacatcattagcattaaatgcccatcttttccaattctcccttgttcccatccattagatctttattctttcaatctaacggtgatcattcttaaagtataaaagtcaagtgaaaacacttatttgccatttttgcctttcaaacctttcagctttctgcaaaaaatcatcttcgttcttcatcaccttgcttgcatgccctcattgtccttgacatattttatgcgtatttcatcagatttcatttttaatcttagaaattctcagagcccatcatcacattcatcatgatcccaa

SEQ ID NO: 387436 - DNA, 1257 bp, Cannabis indica
tttatggttcatctatcttacttaatctaccaatatgtgtgtgtgtctattcattttataaagatgaaattaataggacaatatacttcattttaacattttcaatgcctttgtttatcaaaaagcaattttaatacttttcaaattatcttaaaaaacaataataatatacaagatggatataaaaaaatttaagaaacaattctattatactcatctaagaaacaacagtaaaccttacaagggaaaaaaacaatggcaaaaattaacaacacaagtgaaactcacataagctaaaatttaattttgaagaatgttgatgacccaagtctttgtgtcccaatttttttaaaataatagcagaacaatttttggctgaaaaataatttgagtaagtattgaaatccttaaatctcaaaaataactaataaacataaaattaaacattaatcataaaaaaataatatgtttaatattatttgccaaagatatatatatatatattattttctagagattaccgtgagtatgagcttggaaggttgaagtttttgtagcagagattattatttttttctattgcagagaaagacagttacacattcttgtatataaataaaataatggatattcaacaaaaagtaaataaagaatataagaactataaaagtggaaacaatagaacgtgtatcaattttaatagctaaatagcaacacttttttcaaaatttataacgttatttttcttaaacatctaacaaccataatctctcacctgtttgatgtcttgccgcaactaaagcctgagcgtttgctcctggagcaccagcacatgccatcaccatgagttgtgcattgttgtcttccgccaaagctgatatgaactctgatacatctggctctttcccctttttatcctatagaaaaaaagattagagcaactctaatattagaaacttcacataataagataattaagtagaacctctactatatcacaatcatagtcggtgtcaaatagggatataaatctaaatacaacatctcaaatattatcgcacagacataaatttggtaaaactcattatagagcagatgttgacataactaagaatcataatactgatataattgaaaaatccccaaaaaattaaagtaaaaaacagggtagagaaagcttttaccattatggaggaacaaaaattgaagctggttcagctcaattggaattgaaaaaatgagaaccattgagggttc

SEQ ID NO: 387437 - DNA, 703 bp, Cannabis indica
cttgttttttggtagcccatcacaaaagaactccacaattaagtgtgcttgacctggggtaatgttaagatgggtgacctcctggaaagttttcccagggagtgggagtgaggacaaagcacgttagaaatactcgtgttggtttgtagggttagtcgtcactcttggaagcagccaaagtgacatacccatgtataagagccattagtccgtgggagaatgccctatggaggcttggaaagggggggggggacgttacatgccttctccttctatggcgccttgaatcgcatctttatcttccataagcaaaagtcgctctcgcctgtgaacttttccaaatcaaactttgcatgtcccatctcccctcggatcaattcttcgaatagataaagctctttgatcttcctttatattccaatcgatcttctccaagccttcactcgaatccaagctttgataccaattttttgggaatcaatgcaagtcttgattcaattaacatcaccattcaagcaatcataacacagagagaaatgaatatgcccatttattgtgttgagtgtaatttgtacaagctaattaaaagaatctaacacaatggcattttatagacattattacaattgagtacctaagcctaagagctgcttagaacaaactaacaactactaactgtgggaaattattttaccatgatctt

SEQ ID NO: 387438 - DNA, 1743 bp, Cannabis indica
ctattcattagtgcattcaaactgttttctgcattttgtgctgtgtgtgtgtattgggaagatttgatcgagtagaaacttacctgaactggatttattctaaggctatgagtgtcaattttacaggttcttaaagcagatgatgtggatttgatgatcattgctagggggacccctgggttttcgggtgcagatcttgcaaacttggttaatgtcgctgctctcaaggccgcaatggatggtgctaaagcagtcagtatggctgatctcgagtttgcaaaagacaggattatgatgggaagtgagcggaaatcagctgtcatatctgatgattcacgcaagttaactgctttccacgagagtgggcatgcccttgtggctatccataccgagggtgctcttcaagttcacaaggcaacaatagttcctagaggaatggctcttggcatggttgcccaattgcccgacaaggatgagacgaaaatctctcgcaaacagatgcttgcacgacttgatgtttgcatgggtggacgggttgctgaagagttgatatttggtgaaaatgaagttacttcgggtgcatcttctgaccttgagaaggcaacttctattgcaagagcaatggttactcagtatggtatgagcaaagaggtcggggttgtcacccacaattatgacgaccatggaaagagcatgagcaccgaaacaaggctgcttatcgaaaaggaagtgaagtctatgttggatacagcttacaataacgcaaaagccattctcaccgctcatttccacgagctccatgcactggctaatgccttgctcgagcacgaaactctaaccggaagtcagataaacgccctgctcgccaaattgaactccaaagagcagcagcaagagcagccacaagtaatttctgcgaagagtagctcacagtctaatccagtgccaccttcagctcccaatgcagctgcatcggctgcagcagctgcggccgctgcagctgctgctgctgcagccacagctgcagccacggctaaaggtattgctcctgcccaagcaaactctcaacagcatccacagtctaattcagcttcttctgttgctgcctcaacaaaggttacaactaagtctaaaggcattgctcccgtgggttcttagcacggtggagacaggttagggagtcatcctttttccaagtaagctatataatcggcttgaatgtgcatattagtaaatttaccagcctcttcgggtggtttactttgattgactggatattgtagaagaagagttgaattggcgggtagtagtaaaaaattgtagcgagttttaaattaatcccgtcgggaaaacattatttttcctcttatattcttggccgcgttttgttatttttgatccatgttacgttggtatacggtggaagcccgaaaatagaataatatgagccttagaattgttgattctattaactgttggccaaatttgtctaatatacaagtcatttgccatgcattgattctttcttgtaatttgttgggtttgtgtagagtttttctaacaatatgtttttgtgtgttttttatttttgatccttttaaggtttaaagaaataaaagttgattaaaccaacaacaattacaaaggattaggcgagtctcaccaaatacgtgacttgcacaaagagaattaattcaaatccacatgtcactaatttaaacttgttacaatgaaaaatgggtt

SEQ ID NO: 387439 - DNA, 677 bp, Cannabis indica
agagagagagagaggcgaaatatagaagggaaaacatagggtttttttgttaatgtgtgatttgattgtttgagaagaaagagagaggtgataaaataggttacctttttcatttttattttctcagattgtagtttagttggggttcgataaattttttattttttatttattataaattacagctgtattttttttttttgaaaaaaaattacggtattgatatagtgacacgtcaggtgggtcagggcacatttacccactcgcgcttggtgcgtcactatatgtctcaaattttcaaatgaataaaaataaaataaaatgattttaatctttagtgacactctatatttttaatgacccacattgtaggagactaacactgaacatttagagtctaattgtgaaaacaaagacatctcatgtagaacaaattaaacggaataatttctagaactcactaagaatttagtaacccacgctgataccaattgaaattctgtattttaatatttccagttttattgtttaattaaatgcagaataatgaaactggtactaaaatagtgtttctgtagctacagaaaacaactctgtaactccaaaagaaactagaaaaacaaatagggtagaaaaataaaaacacacagggtttttgtacgtggtttcaacaatcc

SEQ ID NO: 387440 - DNA, 630 bp, Cannabis indica
agtttactttcattgttgcctgtgaaacctctatgttttgctgattataaacatagccttaaccgtattaatcaactcaagcttcgtaaacttagccttgatatctctaaacttcctgtaccccgataggtaaggcatcctgtgaaatgctaaaaaattagaagttcaagttcaggagccatctgcaaaagtaagcagacaaataaaaaactctataattttaaatcgcaaactatgtcgctaatatgtcgtgacatgtcacgaaaaataaagtaaaacaaagttcatgattcaacaataccttgcgataatattcacaacatctaacagcataaaatttcatattctgaacaagtaaaacacagttcaactattaacgatatctagtgatactcataacgatatttttagtgatatggtgaatctacaaaaaaacaattaaagacatgtcgcaacgagatgttgctacatgtcgtgaaacatcgataaaaacacacaacttctacacattgtttgtgtttgaaagagatatcgataaatgtcgctaacaatatcgcaatatgtctataatcaacaaaacatagaggtttaacaggcaacaatgaaaatcaactcgaaacacgaaaaaaa

SEQ ID NO: 387441 - DNA, 1622 bp, Cannabis indica
ttctcatataacctattttttccatttccccaatgcacgcagctgaacttcacacttcaactgacccgtcaaatttagaattgctttcgttttttttcaacctgtagttcatacagtgcaggggactgtcacttatcgacggaggttgtgcagcaaacggaatgcaatctactagagcacaccagctccattaaatgaaaatcttcccaaaaacggaaagtcaaaatctatttaaacagacaatcaatccgttcaaatagatacagaaaacctagacaatgttttagcaaaattttcataaataaataagacaactttgacaacattaaatctcatagctgtacacggtttcttggtcaagaaatcagatcaaaaagaataaaatatgaataagagtttctttaaaaagcaaagaataaaatcaaatatgatataaaaggaaaacacatatttatttcaccaaagtcaaataggaataagatctgattttgaaaagtcttttcacacaagaaaatgaaacctatttttgaaaataatgaataaatacataagaacaattttgaaaataccacaaatattatttttgtctattttatcaagtatgataataaaaaattttacaatctccccctttggcaatttgatagacaaaaataaactaaaaacctgcaacacgcatgttagagataagaaaagagaaaactcccctacaagcatgcataacttataacaaccatgaaaataaaacttaactccccctcaaaataagaaggtccagagttgcacaaatcaaaatataacaggtttttgagtctactctcccctttgtgtctttcaaagtagccaaagtaccaaaagcataaacgaaacaaatatgccaaacctaagactaatgaaagtatcaatgttcttgggaatggagaacaaaaagttaaaaaggacaagaaaaactaagcttctggggccttagacaaggctttgagagcatccaaaagtgaacgttagagtccttcaagattcataactcgatcagttaaggcatcaagagaagctcaaacaccacagagttcttctctgacagaagctgaagtagttggacgaagagcttctgcaggaaggtcatccgaagcaaatactagagattgagtcttggatttcttggatgatgaggcttcaacagtatcaagaattggtgcagaagccttgttagatgcagcagtggaaggagccaccaaatcctcttgctctatcttgagatcacttttctgcatactcaaaattttgtaaataacttgaggaaaaggaatattcatatttttcttgttacctttccgaaaactaatgatttggttaaagatgacagtggccaaatcaatatcatgtccagttccaaccttgtacaagaaagaagccatatcaaaagagatggttgcagtgtgagaagtcggtttccaatttgttgtagcaaacttgtgaagcacgacatacatgaaagtgagattggtgaccgagataacagaattttgaggccacaccatcttttgacccacaatctcataaagaacctcatccttgtcaacaggttcactctcctcttcatctggaatagcaagagaaggaag

SEQ ID NO: 387442 - DNA, 1065 bp, Cannabis indica
ttattattattattattttgcaggagaacttttctaatcggaaaaatatgatattttgttttttggaaaaataagacgtaccacacgtacatatctgttgtttttatcctcgtggattttcatgcccacccatttgaaatctttcacggcttttgctgcatccaccgagattcagtggattttgacctccctcattgccttctgtttcaaccatattaccacgacttctcgtgtacatggcgtccatatattaggacttagcttgtgaacccataagtcaagtaggtcagatagcgattatatatattctatgtactgcacttatggattttaaggcaatgcatttaataaataattataaactactatacttcctaacatgcttttctaatcacaaaaattactaaataagtaaaggcttactgaaccgtgagttgagcttttctctgacgatgatcgtacatgtcttgacaatctttggtagacaaacctagcggctctgatatatatcaaaattataacgccctaaagcttaggcacgctacagtaattttctaattactgtgctcgcctttactaatcgaagggtttcttaaaaatcgtaccaaattaaaattttgattaaacattaaacttttattaacatatacatatatttacataaaattgggatctcgttttaaaacttttatattcaaaataacaactacaaacatgtcgcgcagcgactataaaatatagcccaagtcgctccgagactaaactctttaggttgcaccgtctcgacatgtacaatcattctctcaactcagaacttactgttattcaactttggcatttcctttacctacataagaaagtaatatctgtgaatcaacacttagtaagaaaagtattttaacatacaatatattaccgacttgtatctagccacccatacacctatccacaaggcttattagatgagttagaacattctttactaaggtacgaccattgtaccacatgcactacgtaccgctactgtgtatagtgttggtagggtttgcaccgtacctcgagtac

SEQ ID NO: 387443 - DNA, 2406 bp, Cannabis indica
cgttcagcaaaaatccaatccagtcatcgaagtagtcggagtggaatggtgaacgtaagggggagatatcgtaagtaattaaaaatttctaacaatctgcataaaaatgtaattgtactaatttaatttttataaaaaaatgtagaagcaggacctcgaagttcaagatcccctacgccaccgtgtttggatcaaatctcgaacgaagagaacaaaacttgtcactgattatgacaagaaaattctcaaaaagatagtaagtatttattaatcgttgattaagtactaatatttagttaatttatataaatcatatactaattacttgaatatgtgcattaggctcaactagaggagcaagttactcagagacaagtttaagtcgatgaccaaaatgacattccgacgcaggcgctcgggaaacctgagcatcctggatgtgtcagggttgttgggtatgctaatacatgaaacatattattttcttagttatacaaaataaattatagctaattttatttattggtttccagggtccttgccaaggcatctaaactgtttggcagaaagaaaagggaatttttgacactgtagctctaaaacagagggagattgagaaattaaaagccgaaatcaaatcccataaatagaagaaaaatattattgaggatgagaaagaaggagaggtggctcatcaggcgtatgttccataacaatatgctcatgaggatgagggttgaccacaaaattatgctcaggagtttgtttccctaaatgagccacctctcatgtacaatttcgatgaacagagggccctttatcagctagtatatctctgctccgacaatatcaacaacattgtggcccgagcttatatgtatgaacataaaggtccaatcaatgttcactgcaaagactacgatgattcacatgcccaggttctgattttagaaatgctgcaagaggatgctgaaatctcaatctcaattgacgggtgcaaatatgttaaggaagtagcaaacatgttccatccttggcctaaatacctaattataacacccgaggtaacttttgttataaattaattatcaatgattagtggagttttaatagtttagatattcaaccatagtgatatattatatagtgttttgtatagggtccagtagcttaaccaccatcaacacgtgatgtgtcgaagaagaaaggtcccatgccttctagaaaagacaatgatgatcaagaagatgaattattcacaacagagatcatggatttaattcccaactcactaatatagatggtattgatgaatttctaagaaacaacgataaacgtgacataatcacaattcatagtacctcgtaccagatcacgttatctagagaggatttgtagcatgtggcgttgtgtgacttcatcagcaaccaatgaatgctatttggaatgatgtatactctattctttaatataattaaccttatatatatatatatcaaaatctagtgaaattattataaaacattaatatttaacaatttaatacaggcacatctaggagagcataaacgatttgagaagaattttcaagtattatgatccagagcttctcgcagtgaatggtattaacgatgaagagaagagtgattcttttaagaatgcgtcaacacgattggccctttggttattatcgatgaataacaaccaccaaatgttctttattccctagaatatcggctaaacactattaaatttgttagtgctaattgttttctatattataacttgaaattatttttatactatcttacatacatcctaatataatttcttagtgcgcattggatgctagagatcattgcgctagggaaaattattcatttagaccctatacgtggccacaaagtttcccaacaaaatactgaagttttagaaaggtaataatttaattactctttatgtaagaaattttttaactaaccaatgatttgaaatgttagtataatttttaaaacagagcaaaccagattataggggcatcaaattcgtatcttgggtcgtagcaaggaatttcattaacaaattgtcctagacaacctaagaaccgagaatgtggtttttaggttttaaaatacacgacttgcatcgtcgcatgtgcaaaccccaaccattatatacaagatcaaaaagctgtaagttttaatttttaattatagtatttattatatcaacaaataaaaatatatatttaaactaatataaattttacgtcattttataatttcgagaaaagcagacatacattcgaaaaattgaattattgtccttacaacgacagtggatagaacgattgatggtggtgattcatgtaggcttggacgaatgatgctgaaaggcctaagaatt

SEQ ID NO: 387444 - DNA, 1340 bp, Cannabis indica
agcttgtcaacttatgttttgcggatgaccttgtgatcttttgtaagggcaatgaaaaatctgtgagatttattcatgaagctttctcattattttgtgacacaacaggtctaaaagctaatatgaataagtctactatctactttggaggagtcaatgaagctactaaaagggccattttgaacttggtgaatatggaagaaggctctttccgtctcaaatatctgggagtgaagctttgtcctaacaaaatggaagactttggattgtggttgcattttggataaggtaaatttgaagcttaataattgggctagcaaaaacctttcttttgcggggcgtgtgtaattgattcattcggttcttttggggattaggaacttttggatgaaccttttcattcttcccaagaaagtgacagctgccattgacaaaagttgtagggatttccgttggggggtcaatggaaattgaagtaagttccatttaccttcttgggaaaaaatttgtctcccgaaaaagtttggaggaattggcttccaagagggaaagaagtggaatatggctttgatagccaaaaatatttaggctatctcagagaaacaagataatctttgggttaagtggattaattccatctatctagagagtcaagacttctggttgctgacttttaaacaggttagcagctggtacttcaagaaaatcttgagactcagggacatcattaaccgagatgctctcttgggggtgggtaagaatgggaaatttaagacaaaaatgttttataattctctcatctctactgaaagttctgagtatgcgcctactatttggtataagatgtgtgtgcctaagcataggtttatttgttggcaagctataaatgactaatttttgactagagatcaccttagtagagtgatggagatcactaataagaaatcactaataagaactgccctgttggtgagatgaattcggagactcacaaccatgttttctttgagtgtcatttctccaaattggtgatgactgagataggtagctggtttggtttgaatatctagccgagggacttcaagcattggaaggactggtgttcgaagacgatgaagaacttgctggaaagggtgataaatgctgtcatgactgctacagtgtatttcttatggcagaatagagattgctgctggtataatatgtattgtcgggtcctagttttgtgagcagggagataaaaaatgctatcaaatatagaatcctgaattgtagttttcaacatttgaaaggaagggagttgtacattattaatgtaattaacagctggtagctatttt

SEQ ID NO: 387445 - DNA, 1623 bp, Cannabis indica
aaatagagagaattaagcagagaaaaatagtgttgtttgaagtgattttaaaatgacatgtcaccgtttcatatctctcctttatatatatagatatatagattttttattaaagtattatttaaacttaataaaaaaattaaaaaaaaaatgagagaattaaggagagaaatgatattgctatttaaagtgattttagaacgacatctcaccgttttatatctctcatttatatatatatatatagatatatatagataatagtaatatggtaaataaaaaaattagtatttattgttgctaaatgtggcacaatgttatatcttgtgcagttgtgcccaatttgacacaatttttcgcatatgccaaatttagcatactatttagaacatcattggaagtgtgctaaaatataaaagtataccatattttaggcactccattggagatgctctaatagaaaactataaatatagagtaaatgtatttttaacccatgctcataaaattaaactctaatggtggtgtgatatataatgtggtttaaattggtcacatgttaaaagttgtgctaagtttagtattatagtgttaattaaattttacaccacaataaatattactttttatttactcttttacaatttaataatgtctttaataattttttatattttattttatatatttaataaaaaaaattatacactttcaatcaaaaattaatgtatttattggctttttaatattcgaatggcttgaccttgtctcacctttttatgtagatgatagccttgtgttcattaatgcaaatgaagaagaatgtcactgtctaaaacaaattctaggtcaataggctaacttgtcgggtcaagaaagtaatctccaaaagtctgacctttgtctttgccgccaattacattaggtcgagggtcattttttggtttctcttatgggtgtaaagctggttgattgccatactcgctacttgggtatgtctgtggggattttatgccctaaataaaacacatttcaatgtaatctaatttgttatcaatagaagattagaagtcatttatgtttacatatagttttcatgtttatgttttaatatgtacaaaatctattaagtccaaaatatatagttattcacaattatagtgaggtcaacacagtggaatgtaattgtgattatatgcttcaaaagataatgtcccttgattcatcagtgcactgaatttacacctttgataattgttatgttctttctaggacattggtaaagtatgctagttttggatgtatggagtacacattggactgggaccgatattgatcttagtaaagatattataatcttatcattgtatctttctaagtcaatatcactggttcatcttagaccaaaagatcttaatcctgacatggttaggttcgatctcaagagtgttatttgtgttccttgatttgttagttaagcctaccttttggtctgggtgatacgtacattttgggaacatgagagtacaattgagtgggagcgctaaacatagatatggaatctatggcttctatctggacataaaagtgaaacaataattccttcgagattggcttaataga

SEQ ID NO: 387446 - DNA, 1007 bp, Cannabis indica
ggagaggcccgagatcttttactgcaaaacgagtgttgagatagtcaagaaattctgtaataactgaagaagatgagccagccacgataatatcatctacataaatgaggagtacaatcactgcagcttcggatgtatagatgaagagagaagtatcagcttgagaagcaacaaaaccccattggagaatggctgtactaagcttgaaaaaccaggccagtggagattgttttaaaccgtagagtgacttagtgagcttgcaaacatgatgtggatgatcgggatcaacaaagccttcgggttgagtcatgtaaactgtctcggtgaggtcgccatgaagaaatgcattttgaatgtcaagttgcttaacaatccaattgaaagaagtggccaaagagagaaccaacctaattgagtttggcttaacagccggactaaacgtttcatgatagtcaagaccttgagtttgatgaaaacctttggcgactaagcgagctttatagcgttccacaaacccatccgcattaagtttaatgtgatacacccacttgcaaccaatgaccttaaagccatgaggtggtggaacaagaatccaagtaccctgagattttaatgccaccacttcggtatccattgccgcaagccacttgggatctttgctagcctcccgaaaattagatggttcaatcggtgtacctgcagcaacactaaaaagcaaacgaggcttggtaatgccagatttagctctagtaatcataggatgtacattagtatgagcaatgggatgagtacatgggccttgcaaatctactatcacaggaatgatgggaggggaggctgtggaggatgatgttgaagatgcatgagaagggggagtagtattgagcggaccaataggtgaactgtgttgtggggaaggggaagtatacttcgaattggatcagtttctcctcaacaaataagtgctggggccaaaaaaatcctacctaatggagaaataattggag

SEQ ID NO: 387447 - DNA, 1115 bp, Cannabis indica
gaattaggttcatttcttcacaggctaacccaataagattgacatattaaatttgaactcattcatattaaattttagttgtaaccaaaccctacccattacattatttgttgagttgggttacaacccttattttgttacaattaatacccatttggttaccttaaaatacttggtgacctttacctagtactctaatatcttctaactttttcttgaattatgcatgtttttgcacagataatataaaaactcataaaatttataattacctcattaaaaatttagaactatatatgattaaattataagaagctgaaaaagtcatcaaaaattcaaattctgttaatcattgcaagtttcttgtggtgattagatcagccaaatcgtgttgtcaaatgctgatgtggaccgagtgatagagagttttggagggttgtaaagagttcattggtgagctttctttgtaatatgagaagcaaagtcttcttggtgtgattgtcttcttgtgttgatatggattcatcaataaagtttctcagccatttcaaggctgttgtacccctcggattcgatagcgaagacacaatatattgtctttgtctatcgaaccgagtaaattctggtttgaattttgttggagagtagtgattgatgattagtcctgttgcagttagactgatcattttgtgttcgacgagtgtcaaagcacctgcacccacatgaatcaaaaatatcagtacacaagcaccattaaaatggcaggaactaagaaatataaatgcaaagtaattacaagagaaaatgcaaaccaagctgatgttcctttctttatatcttcttattaatatatgctggcttcaatatgttggagatagaacatgtcaaaagaaaatgtaaaatgagatattggagctataatctcatctaatctaatcattaagaattctcatctttataaggaaatattgaatttcaaaatcaagatattttgttctgttaattccaactaaacagaagtttcggacaacaaaaaaaaagagcattttgaggcgaaactctcttatgttttaatttttatacattttaaccttttttttgtggcaaaattctct

SEQ ID NO: 387448 - DNA, 2355 bp, Cannabis indica
tgagatattaaagtaatagttaatttattattcggtgtattttattaatgttgtgtaattatgattcgtactataccatttcgatacgatacggtaagagagtgttaccctgtaaaattatatatatgtattattatgaaatattaatatttatttttgtaaatgtaattaatgtgtgatagcatattttaattcatttttacttgtatttttggctttatgaagtcacttaattttttttttataacacaattattattattgaactttgtaaatttttgcgacgtcattctagataatttttgtttaaaaatatcataaatacattcttccattatcttaaaagatcatacttcactatggatagccaaaaaatctatatttacattaatatcccatagaataaaagtttattttgtaaataaaagtgcatatttaaaaaaatatttttttgacacaataatttttactatttggtaattaaaccggttgtaagaggtgattttagattgtcttattagaagtgtcacacaccttaattagaggtgaggaacttcataagtccccttatttatttttcagaatgttaaatgacggaacatgttatcacctttattctaattataaccaattttaatgaaagggagtgaaaagaaaaactattcaataaataattaatcaagttttataaatcagatttacaaatataaagtaaattttaacagattacatgtcatcttcctataattatttattaatatctttaaaatttcatgtctcacgaacataaaaagtgtgaaatataaaatattactgttttttgaaaaataagcctttaaattaaaagcaagaaaacaagaattagacctcagagtcattatataagagattgactgacgtagaagaaaacttaaccatgccagtaatattttaggcaaaacccacttaaccatattataacccgcaaaattataaaatcttaaaataaacgaaaaaagtacaacttaacaaaagattagaaagatatttacattgatgcacatagttaccaatatcccaactggaaaaggctcccttcagcgtcttgataactgtctcagagtcactctcaatcatcacaaaaggatgcactactacaaaaataggcttcagtgatgcgcctcgagagactctaaatatttttagtgacactccattgcacgtcactaatgtgggtgactggaaatgtattatttagtgacactcaatgcgcgtcactaaaacgtattagagattctcaaagcgcgtcactgtagacttttagagtcccgagttgtcagactctaaagataatacccacactcccaaagtgtcactaaatctatttttattttattttttaatttttttcctattttttttaatattccatttatataatttaaaagatacaattattaatattaatggatataataatatacaaattcatttagattttttttatagaatataaatgattgttttaggcaatataaataccatcatattaataataaataaaatcattcactgacagtaaaataaaatagattaatttactaaataaaataaaaaatattacaattaatttataatgtacagattttcccaaagaaaaacacccaataccaataataaaaaatatatacaaacctaaatacataatataaatccaaaataaatatgacaacaaatcagaaaaaattatcaaaacctaaatattctagctcattttcaatcccagcaatgagcgtactaattggtgttgaccgctaaccgtcgtccactacaaacacccacaatcactcatcccgaacaacaaccatcatcgtggatctgtaaaaaaaataagaaatcttaagagagggaaagtagagaagagagtcgataacctgctccaatgtacagaaagcggcggttgggcgagtagttcgtggaaaacaaggtcggagctggcccacctacccagatcagagatagatcaagaaagatacgagggagactgtgggcgtttgggcagcggagaagcggcgctggagcagtgggagtcgtccatcgtcgtatctcaggcgttgccattggaggtcatcgtcgtcacagtgagagacgaaggaaatcccaggcgaagagagaaggaaatcccaagcgaatagaagcttttttttttaagagagaagagtttttctttgaagcggatgaaacaaaatgtgaatagaaattagagtttttcactttaatttatgtaatatattatataaattaattatattcaatttatttattagagagccgatttaaatgtttggtgttgactctttttattgaattttattt

SEQ ID NO: 387449 - DNA, 886 bp, Cannabis indica
tttttcaaaattttgttacaaaagtatggtacttttaggttttattattttttatgagatattttagtttttaaattattttatgatattttttatgtcataggaaggaaaacttaatttttaaagcttatatttagataaattatttttaaaaaaataaaaaatactcaaagctatttattctccttcattcaagtaccttacctgcatcacccctcaacagtctacttaccaacttccattcactagtgacacatccggcaactcgtgacccacacattcggcaaccgacgactcaaacggatcatcaatatgagatatctaccaccaaaaccctaaaggatcaaacgggtgttactgcagttggagctcaaagtttggttgggtatttgtagcaaaaaaatgaacaaattagaatttaaaattaaaattagtactgcaatccatgcacgaatacggctgtatataattagttgtgtatacttttcagatggatttagtaatgatttttcattttttctttaaattgtatagtttgttagcttgtaagatattatttagtttttaatgatatttataaaaaaaaaaattaatttctatagtaaattatagtagttagacccacatttggttatttggaacctttggccaattcgaaaggaaaatttacatagtatgctaacttttgtgtggtatttttttacttttttactgtatttttttataagtttcatactacagtatactgtgttaaatttttactggtgttctactggtgtattttagttgttctactgttgttttgagtttaactgctttgtgttttactgtgttttataaaaatacaatatttttaaaaagatttccgtgtaacagtatttttata

SEQ ID NO: 387450 - DNA, 588 bp, Cannabis indica
ctcgaaacaactttatttgttgtctcgctcttgataatggttcctctattgtaagcactgctgatattagtactcaatttcttaaattttataaaaatctttttgagtcccagggtactagaattgaggctattgagcaaattcttagctgtgttagtactcgaattgatgtctcttcttttcagatgcttgaggaggcttttactgctgatgaagttatagatgctctcttttagttgtctagggataaatctcctggcattgatggtatgaatactttattttatcaaagaaattggtctgttttgggttcggatttgtgtgctgctgtgctttctattttgaataataatgttgatctcgcgttaattaatgagactataatagttgtaattccgaagaaaaagaatgctaataaagttagggattttaggcctattagtctttgctctactctttataaagttgtgtctaaggtcttagctaataggttgaagagtgttctcaataatattatttctccgaatcaaagtgctttagagtcatttttgataatatttttattgctaatgaattggttaatgctat

SEQ ID NO: 387451 - DNA, 1949 bp, Cannabis indica
ttaatgagtaagaattacataaaaaaactcaccttaaattaaaaatacaatacatatttgtgaaacttatttgccattaacgtgttcaaatttggggcagtcactgcttatttatattgtgactgtattattctcattctcatgtgcaataataaattattatcaatgtattattctcatgcattatatatgaaaggttattatatatgggtgagtatatatgtacaaatttattaataaattgttatatatatatatatggatgagcatatgaagaaaaatcgatatattctttggtcactgagctacttttccattcttttatagataaataaatgtatttattaataattacagtatgttaaattaatatattataagatatatactcaaaaaaattaataagaatctaatgtataaactttaaaaatattcaaaagaatcaatataagaaacttaatgtataaactttaaaaatattcaaaagagtcaataagaaactaatgtataactttaaaatataatatttattggaagaaaattgttactgaaaagagatgtattatgtattatgtggtgtttttaataaataatagtgagataatttactacaagctagaaaattagtagtgataattgtatatatgtaggaagaggaagagagctgttaatttgtagaggagataattatgtatttatatatataggtttaggattataagtgtgaaggttaaatatatgagttattgaaataaaaaatagatagtaattgatattttaaattgttatgtggtttaaggcttgataattaattaggttttattattattttaattaattaatcaataaattttataaacttaataaaaaatagaaaaaataaaaaaaaattaaatgagagaataaatagagataattggaatgagtcttatatattaactttatatgtatagattaagcacgttatgtggtcaaacatatgcttgatgattttttacttgttgatatatatatatatatatatataatttattttgagtttaatgaataagaactttgcatacaggtgatacagctgatgaccaactcttgctagtacttccattacaaaaaataaaaacaaatctctctgtagtacaatattaatagtagtttataaatatatttatatatcccaattacaatataatatattacactacatgaactggagtaattaattaggaaaattaaatataataaaaataattaattagaagtataaaaagttatgcatgtgcgctgtgaattattatatgctgttatttttttatcgatcgaaaagaagaattctcatgtcttatttttttgtaggcaatataccacgaacactctagttactagagcacggacgagtgttcttgcactgtatgaactcagtgagagagagagagagttattgtcggcatgcaaaagtagctatatagtacggatttatattattggcttttccacatcaccagccagaataattgacatccattagaacaaaaatgaatttttgtaatattggaattctgtggtcatcgtattccgacaattaaatttacgaccttggcttctctcttagatatatatatatatatattattgattttcgtgctttgaaaccctagcaagctagatctaatggacagggcacaccccagcttaaaaaataaaggtactggtacttctcaatttgcggagataattaaaaggtacaatttaaattacatgcacttgtgtgtattattgctagtacatatattaatatatatatatatatatatatatataaatgcatggatagtatttaatttatgagctgtaacattcaaaaaaataaaaataaagtgtatgagctattagaatatttctaattaaggaaataaaataatattattgattctgataaatgaatattttat

SEQ ID NO: 387452 - DNA, 3096 bp, Cannabis indica
ctctggagttacagagttgtattctgtaactacagaaaaactgttttcagtaccagtttcattattccacatttaattaatcacttaattaaataattaacctgaaaatattaaagtaatatatcatactatatactaagaaggcataatatgccccttaaacaatctaacttttcaacacatttccaaccatatcttccttttttgttttataatgaacaaaggtaattaagttttgtataagagaattatatatatgtatatattaaatattcatattatatctataaaaaattataatattacaatccaattaagttaaaaaaatagacatgtaattacattaggaaaataattatttgttctccctaggtcgtctgctagggtttcttaaaaatatagctgctactctagttttcttcttcaccaggcttgggtgtggctctcgttaggtttgttgattggcgcctagggtgaggttgatggttaacattagtcttcatcctctcctcattcttctattttctctctgatattttgtgtaggtctgtgttttttttgatctcatttggaatctttggccgacagttggtttggatcttgcagggcttgtgggaggaggcttggtgattttgttagggtttatgtcctgaaacgcttataagacattttttattattaataaagagatgaatgatttgatatatacttgaatataaaattattaatatttattattgaataatttatattaaatatctaaaaattccttattcatatatgaggttgtggcttgtagctgtacagaaaactaagaccacttagctatgaataaaatagtgaacaacatattaaagtttagaaatctttaattaacggttgctagtacagttcactgatgcccgttcttcaaagcaagtaatctcagttcggattacagatgtagtatgacaacctaaattttgaccaacaataaaagctgacacgtgtattaaggttagaatatgaaccaggtcaaacaacacatgattaatgcactaaataacatgcctcgggaaatacagttaatagaaatattcaaactcgctgtcatatagacaatatatgagtaataactattgactaatgagaccagcgagatgaataaattcatctcaaaataaactgaatgcacaatgaaagttgttcagaacgagtaaacaataagcttgtagcttatttactcacatactcgtgagtaagagcttgcaactcattgatccacatactagtaagtaagaatttacaactcattgatccacatagctgtgagtaagagcttacagctcattgatccacatacttgcaagtatgtttaaggaatggaagtaacttcaacatttatttgcctcgcttttgacgcgttgaagtaaccacctcactaatacctttctcaaatggcaaacgaagactgaaagatgcattgtatctcaacacttagtattttgtatgaagatgtttaagaaggataacatgcaaatggtgaggaccatctaacacagtgagtataactgtctatagataaggagaaagagtgattatgcagttatttaatattatcccatgtgcacaaagataaaatgtaacaaatttctacattttataaacagatacaaatgattagatcccaatggaataaccgtcaccctatgcatctataaatggggacagaactcgaggataaagggacgaccaatcttgagagtaaaaatactattgctaaatcatgtcattgtattctatatactaacacatttatctttaataagattagattcataggctatgaagatttaacttcaaaactacgtaaaaaaaccttcttgttatttgttactcttaggtaattagttgctacataattaattctctagtttatttattacacaaaggctaatattttagtaacaaaaacttacgttaacagtttggtgctttcattgagagcctttgtaataaaactcagaataataccctccttaaaaatacaactccaaaattgccctcatggcagacgatactcaacgtaatgaagagaatcaacgagaggagacaacctatcatccgagaaaggagcctcgggcttcgtaaagaactaacactattgaaactctccattctagaagaaatggagattttaataaactggtgaacagatcccaaaaaggcaaagtgagaatacttatgatccaaccagatacgttccactaatggaactggaaaatagggaactttggtaatacctggctaaattaaatcagaggaatatcgagttagagtgtgaagcggcagcagtaagggctacacaaggagaggccccttaaaatcaacatgatccatctgtaaggcaaccacaggacatacctcgaggttttagaaacaggatacaatggaacaaccaagggaatccctcaaacactcaggaagaacaacctaggaatgtgagagatatcccaatgggtggagaaaacccacaaaatcctagaaacgtaagaaataaggagactcaacgtgacaatccaggaacttcgcacggatttgtaaaccaagggaatgaacaaccttatatactggagtcttcttgcatgaatgcaaatgctaggcaaattccacctagaaactaggaaattccacaacacgatgcaagaaatgtaggaaattagcctaggacaggtcgacaaccaaggcatccgtaaaggcctaatcacaatgataggcaaatgcaagatgaaggtggatcatgacgttattactgaggtgactaggagagtattagtaattctcaaagttaccaatctgaaagttactcaaggacaagatctgtgagtaattatgaccaaatctaggcatcatgaccttgatcttcatgagtagctaaatcaaagacaacttggcctatgcgagcatttaaattgtaatgtgctagatcttcgcaatcaattaaatcaaaacacaggtgagcaacaaccaatagggaaaaaacctatggatccaatgttaggctaaaattagtctaagtttcgagtcatattttcggttagttttcactctttgttt

SEQ ID NO: 387453 - DNA, 1134 bp, Cannabis indica
taaacacacatttgagaagaaagaacttaatttgttgtatttttaaggtaagttgttgaaacaaattatttaattattgagttatttggcaatattataaattgtattttaaactacactgtatcacaccacatggcatttcttatgatgttttgtatttttaaggctggtttggtataccttgttgtattatatatataagtattacttaatacaatacttcacctatttagtatttacttgtattaatgtattatgtaaaattatatattatctttatcataggacaactctaatgataaaatttaaatttggggttaaatcaacaccaaataatactattctactactaatattttttcctaatccaactatactaaaaattacacaatatagtatattttttaaacttgaccccaacctcaacctcggccctgcactcagatttcatttttggtcacaggccacaaaccccaaatcgaatttaggatttgaggtcgagttccaagttttgatatccgtcgttcaaggttgagtcaaggtttgggtccaagtttgagttcgagtctaaggctagggtctgtagtcggattcaagtctacaatcctgaaacctttgtaaatattataatacaagttgatgcgaatatgtattaaataatataatttacattatattaaattttttagtcgtgatattaaatacaatacaaaattttatctaaatataaattataatgtttcttgttatttaatataatacgatctaacaaatgagcccttaaggtctttcaatgcagtcgtgaattcacgattcaaaaaactacaaaaattacatgtacgatttagtttgaaaaataatcaaaagttataacactggcaatgcaaacacatctttttttattattgtattagacactttagatgtcctgtataaaattaatgttgaaatataggttacacaatttaaattataatgtttaattaattaaaaacttaaagaataataagattaattaaaaaaatgagttgtgtatgtttattggaccacattcaatatttataggcctatctagatctgattcaatcatatattggatgattgattttactatttgatctgatccaattaatt

SEQ ID NO: 387454 - DNA, 1614 bp, Cannabis indica
aatagagatctgtatgtaaattctttttaaaaggtgaaggagaggagtgacggtgacggtggtttccgtgcaagtaggcatgggtgcgcagtgcgcatatataatgacattttgtaccctcgtacccgtcatgttccctcttcaatttctcaccatatcatatttattattatattattatttgcttctactttcttggaccacaattgtgttattattattattattattattattattattattattattattattattttataaagttaaatcaaacattatcttctttccaaacttattttataacatgtgatgttgtgttgtttattgcactgagttttacatgtattcaaacttatttttaggcctaatatttggtaggaagtgggtaatctttatatggaatgagaatctcacacattaatttgtgtgatctaggtttatatatattattgtttatttttttttctaagaaaataagtacaaaagttagtgaattttatgagatttactgtatgattctatcttcctagggttcttattgtttatttgttttttttttttttacaatgacaaaaggtactaactaatgatgtaaatttgtgggtgtcgtgctagcgcgacttatattatattgttttttttaaaaaaaaagaaaaatatagatcatgtcgtgtcatgctaataaaaaatatgaatcatgtcgtgctggcctgttttacatattttagctcgaatttatttattttatcactatttatttttacaattaatgaatcaattactaatatatatttttcatagcttcaattatatttatataatttttaacgatattttaaacatataatcatattaaaaaatagaatttattatacttaaatttttatgttatattttataaataaattagtatgtagttttaattttataattctaatacttttaattatagaaatataatattcaatgttctatttaagttttgttattattttaattaggtaaaatattaatgatcatgcgaattgataggggtgcagaatatttggatatgcaatttaaagatcatttagttaaacttgatagttgcatcccatctaactgcccccatctactccacaaaaaaatggtgccgcatagcgtcaaaatcaaacgcttatggaaatggttaggtctctacttaaataatcaactttgtcagtgtctttctggggatatgccttgaaaatggttattgaaattttaaatgttgtcccatctaaagtgtattttcaagatacttttagaattatggaatggtcgtatgcctagcttacattattacataatctgggggtgctccgctcatatcttaagaaagaaagatggaaagctagaaccacaaactaaggttgcatgttgtgggtggactattctatagtcataaatataagaaggtgtttatttctacatatgctacttttttggaagataaatatatcaaatatttcaaaccacgtagcaaagtattgttagaagaaatgttttcaaatttatctccaaaagatgttccttcatcttctacacatgtagaggataatctcacttatgcataaatagactccctct

SEQ ID NO: 387455 - DNA, 1300 bp, Cannabis indica
attaaagttcaagcataaaagtatgaagcattaaataaagataaaaaccaagttggccatccaacctggtaaaattatctttacaacaaaagtgccataaggggcgaaccattgtctcagccctagggcctttttcctaaataaaataaaaaataaataaaaaccaagcctacatagtaggagacctggacaaattttcttcttccactgcctcagcctcttcctcctccttccttgtcttctcataagcaagaatttcctcttctttctcttccaggaaacttgtgtccatagtcggatttgccatccaagctcgataaagggtacggaggccaacattgtttcatcgttcttgggtttcggtctctttcacttcgagtgtcaccttggcaacattaagttcctcttcaagcttcttgcattcctcagtcttgtcctttgctaccttttcagcagcttcaagcttggcctcgaggttctttttaactttctcagcatccttggtgaggtgggtattctctgacttggcatcattccattgtttggacacaacctcgtgtagacttattaatttttgaacctcgccttccaggtacttcagcttgtccatgccacgacgttgggcgacaaatgcaaggaaagtttgctaaagacagatagtgaatgtgttagcaaatttaaaaatagttaaaaggaaaaataagaagagaaaggaaacagagtttaccgagaggccatgagcaacactcctttcaagcatgttttctaaatccccattacaaataagatcccattcatggggaaggaaggatttgaactgacgccagcaggctgcaccaaagtttgcagtgaatttcgagccgagattgttggcgtcgatagggagagtcttaagggcttggctcaaagaggcagaagctgggttcacatttggagcagccttgttggtgcttgtagaaattaggggaagaattggatcctgagtttcagtctcagggacatcgaggttaacggtctgggaggccttcttcttgttagcagtggttttcctttgccttttgaggggctccacctcgacatcagaaggagcctccgaagtggtcaccctcttcttccctttcctctgcataagagcctctaagtgcattcctgcgagacaagataaaagtgttagcattaattaaagaaaagtaaaaggggagtttggtacataaattttctgcctaaaggaatttatgatagttactagaagacgaggtatcgctagaagatggggtagaaggaccatagtatccactaa

SEQ ID NO: 387456 - DNA, 2078 bp, Cannabis indica
taacttctaatcttctattaatagaaaataagaatatattgaaataggttttatttagggcataaaatcccaactttcggtctagggccctctaaagaatttgagtcacttaatatcgaacacctttccccctcgagcagcctgaattaagttaattccagggcatgaggaaattagaaaaactcttttctctatgggcagtctaaaagcctcgggtccagattgtatgtcggtcatattaatctttaaacaatactgtaaacctctgggtacggatttgtatgaggcagtaggggacttttttcaatcagggactatgcataagggtctcaatgatacaaatgtagtcgtgatccgtaaggtccccaacccaaaaatagtgtcgtagttcaggcctatttccctctatagtgtggtttacaaagatatctaaaaaatcattgagaatagaattagacaagttatcctcaggctgatatgccctaatcagttagcttttgtcccttggtggaacatttagataataatgtattagtccaagagatcatccacgcatttaagctcaataaaggaaaagaggatttctttgccataaaaatagaccttgttaaagcctatgataaattaagttggaaatttatagatcatgtgctccgcaacttcaagtctcctgacaagttttgtaattgggtctggcagtgtatctttacaacttctttcaatatttgccttaatggaggtaaagttagtacgttcgcccctagttgtggcttatgacaaggggatcccctatccccttatctctttatctggaccgctgatattctcttacatattcttaaggaacgcccttgatagtggaaccattagaggaatcaagttgagcaagaatggtgctcggatatctcatgtcttttttctagatgatctaatccttgtgggtagggccatgatggaagaagctaagggcttttggaaaagtttggagaagttttatgattggtcgggccagcaaataaataaactagaaaccttgtttttcttcagcaataatactagagaggttatgaaacgagttatcaagcaggaacttggtctcaaaagtgtcattggtaatattaattacctggggctttcattgttttgtaatctcaataaggatgcaaatttcaacttcatttgggataatctagtcttgaagcatcacgggtagaggttaaaatcactgtctaaagctagtcgtgctaccttgatcaaatcggttggcctttccttaccagtttatgctatacaaaccataaagttatccaaaaatcccgcctctaaaattaatggtatagttagggacttttggtgggggtattgagcaaggcaaccatggtatctattcgaaggcttgggatcagttgtgtcttcaaaaatttaagggtgggcttggctttaggaaaactttggaaataaatcaggccttaccggctaaataaggttgggctctctttattgaggatcgatccttatgctgcaaggtttttagtgctaagtatctaaaaggtagtcttttcttgaattgttcttaaaagaattttgattcgtggttctggaacaatgtggtgaattctaaagaaattctagagcaaagagcttgcaaacttatttcagatgggaaagatactaatatctaggatgatttgtgggttatacatggtcaggatttctatcctcaacctactagcaatcgagctgagggtttggaaaaagttgtagatttactttcagtaaatggagattggcacatatcacaactccatgctctttttgacccaaaaacaacaagtaacatcatcaagggtggtaaactctgcggttagggtagggataggttaatatggactaaaaagccaaatggtttattctctactaaatatgcctatctggtttacgttttgatgttggaataattttaccaagaaccctaaatataaattctctaaaacaataaaattaaacacataagattttagaaaaccttatattaatgacagcggaattatatgactcctttcactcagatctctaac

SEQ ID NO: 387457 - DNA, 670 bp, Cannabis indica
tttttttttttgaaagaaaataattgatatcatttataaaaataataatagtaatttatagcaaaccggcgggcggggggtccaaccattactagctagtttaataaaaaatattgaaaataattaatattttatatgcaaaataataataatagaaaatattaaacctccccaatatttaaaaaaaaaaaaaaaaatcatattgtaaactaaattaaataaatcagagtgtaaatataaaaaatatattgacttttctaatttaaaaataaaatagaaagataacaattattagtggcggtgcctttacattttcggcaaaagttgaaatttcaaatcgctctaaaggagtcctctatagtatagtatacagtataaagacttgagaaagtttaataaatgtgaaactgagtcatcctgttaggttgagtatcggtcaatttcctcagttttttttatataaaaatctataatttggtttttggtctgggttggtgcaatccgaagactgaccaatccaaaacctatcttaatactgactgttttgaatcttagtttggtcggtttaaaccgcctaaaccgaacttcttcttttttctttaaaatatgatccaatttattctataaacacattattctatattttacaactacaaacatacaaattaat

SEQ ID NO: 387458 - DNA, 1113 bp, Cannabis indica
gaaattcactcgacaacactagccatcaaggataagcttcatcttctcgtcactcctcttgagttcagtccctagaccggagacatgagcagtaagtgaagtgttctccttattcgtagtgttgagcatgagctccaaactagaaatcccatccggattctattggacaagagcctccaagttggtcacaacctcacccatcgctaggagctcaacctccagggtctttacctactcccagagagcactcgacgaccccctggagtcaccatgcaaaaagctaagcttcatgaaggcctgaaaacaaagcaaggtcaagattagtactagaaaacaacactaactggccagcccctctatggtgctactgattaatggtgaaaaatatacatttagtaagcttaaagtataagataaattaaaaataaattaatattttcatgaaattaataagatatattttgatgttgaaaatatttaatttagatttaaattattgccttttttatagtaggaaataaaattattgggagttttgaaaagaaatgaagaattgaataaaaaggaatgtttttacaaaaaaaaggatcagattttcgacctcggagaagcccactcacgcgagccccacattccccattcgagccgtccgttccttgataaaagggcccaaacgcgcgcgtgtcgttcaccaccagagagagtcgcatgagcgccttcttcctctaccgccggccagtcccaacagcacgcatgggacccgcctgttccccacactagccatcacatgagcgacaactgtccgctcctccttccatctgagttttgccagcctctccatgcgtgacacttgtctgcacctccttcaagcttctttccagcagcctccccatgtgcgccaagtgtcgtctcctccttccatctgcgagtttgtaaattgttttaaaatgcaatttcaaaatactaacttttgccatttttttacaaaaatactaccaggcggtattttttacttttttactgtgttttttcataagtttcatactgcagtatactgtgttaagtcttcactggtgttctactggtgttttactagtgttctactgttgtttt

SEQ ID NO: 387459 - DNA, 992 bp, Cannabis indica
tctctctctctctctctctctctctctctctatctatctctctctctctcgtccgaagatagacgcgcgaccacgagccaccacgaccaccgatcaatcttctctctctctctctcaatccactttttctcgtaacttctttattgttattttattttgggatttatgtatttttgagatttttatatttcacaaatcattggagatctcgactattcgaggattttaaggccaaacaaatctcccatcttagttttgaggaggattaaggcgataattttttttgagaaatcactatagcaacggtttaaaaccgtgggctataccttagtccacggtttaaaactgtcacctatagtataggcgatggttttaaattcttttatactggcatttttgtactgtcgcctattctactcagtattcgcgacacttgtataggtgacggttttatagaccatcaaaaattctttacatgacggtgtaaaattgttgggaattctggattttttagtagtgatatcaagtatgcaacttttcaattttttttaatagtttacagtactatcgacaataaagtttttgatatttcagtttccacacgcgcttaataaaaaaaatgagataaaacgtgtttttgacacggtagattattccaaaatttttttaaagattattgctaagaataatgtatttttaacatgtgtaattttgggtgcaaaaattgattaagagattatagtatgaagttttagttatcaatcctctaatttgtgtttcctccaccaacatgggaccattggctgtagtgaaaatagtaaagatattcttgtagtagaaaatgagataataatgtgtcagaaaattagagataaaaattctaatctcaatagaataaaacacatcaatcacttttgaaaaagtagaacaacattattttcatgggaccaaatatgacaatctcattcttaaaaaatattatttattttttt

SEQ ID NO: 387460 - DNA, 744 bp, Cannabis indica
atattttataatttatgtttgtatttttttagtatattagtatcttatgaattttaagttatgttttagatcataattagtttattgaataataattaatgtataatattttaatttttatgtattttaatatttttatatattaaaaattttattataaactttatttttttattaggggattccccacttccattagggattctccgccccatctccgatggagaataagtgggaatggggattaaaatccttaacggggatagggatgggggagcactccccgccaattctccgcttcgtgtgcatctctagcctctaccatactcattgctcctcccattttttttttaaaaaaaaaatgtagatttttcatatattaatgtgcgaatttgtatatgttcttgaaattaattggttttttggaaaattttttggagataaattgagtttgtagagctgtttatgtgctgttagctttttcagtgttatcgatgaattttcgataaattattaatataatatcgattaaaaattgaatggatagttgatagttttaacttaactgtttttttttttcaattgttttaaatgtttattgataacacattttatctatggttttttgatggtttagctgttaattaattttttgtaatgtcatgagttttatcgtataaatttttacttaagtttttgttttttttttaaagttttgtaattgataaactcaaacttaaaaaa

SEQ ID NO: 387461 - DNA, 1127 bp, Cannabis indica
atttttttatattttcttttatttctcgccaattttttttataaaaacaaaatatcttgtgtgtatatattatgtacacgactgtatcgcttggacgctaagttgcctcttgaagttttttctttttttttttccgagtgtggacaaaaaaattaatggatttgtaagaaatgttgacgtagagaaattcacaaataagatttatgggtgtatttgttaagaaaaaaaaagatttatgggtgtatttcagcatttaattgtattaatactatttttttttagaatgttgaatatttattagtgtaaatccatatcatatctcacatatttatatatatatatattgttagcgataaaaatagttaagttaaataatcgcaggttaatcaaatgaaaagataaaaataataactaaataaaaagaacacagaatttataaaggttcgatttcttatgagataatgcttgggcaaatcactaaagaagacaaagtaaattctagttacggctctcaaagtatttacagagaatatcttttagtaaagtgctcttagatgtgtgagtacaattttaggtctagatcttcgtccttccccttgtgaattcgttcactgagaaaattattacatttagcttcgtaaaaggagcaaacatagaataaatatcttatattctaaggtgtgatctattgaagctcatttattctcgaaaagatttgctggattcgagtttgtaggattcaatttgagatatttatgaagcttgctgacgtggaaatcaaggcttgtatagctttgtccagtatccctagcagcacttcttttggccggcatattcactacccggctagaccttctacaagacttgttactttatgggatttgcttgtaaaatcacccttacaaggtattgctcccatcttctctggtcggcaagtagatgattctgccaaatgctttatgagacgtgcgacttatggctgtcaccctttatatggacctatcaggtatacttttacttagaatttctctaccagattaaagagttagttggattaaatcacgtgtaagtatataataaaatgtgaaaatttttagataatatatatatattttttaaaaatatca

SEQ ID NO: 387462 - DNA, 555 bp, Cannabis indica
ccttttcaaaaaaaaaaaaagatgtttatttcattgtccggacacaatttgggcgaggctgaatttgagagaataccatagactgatagactaaagtacagtacgtatcatattttgtttgcttgatataaatcttcaaatgaaatcatcactcttagcatctcatcaaatttattcattttgttgtttcttaattgtactttcattaagaacgacatacaggctatattgcttatatatgtacgtataaattaaaacacatgtctttgcaaatgttttttgtttccatattattattattattattattattatgaacattattgcttttatgtcgttactgcgttacacctacctgaataatgatttgaagaaaataatccaagaagaagttaccacccagacttttatatatatatatatatatatatatagcttgttacaaatatatatatttattacataggttaaatagtaaaatgtagtgaagaattagaatagctaggataagtggcatagtaagatgtatgtacaaaccatatatatatatatata

SEQ ID NO: 387463 - DNA, 1190 bp, Cannabis indica
ggtctgacttcgtcatggtagagtgatagttaaatttgaagtcaaagtccaattgtgcttgtagttgactttagatcccagttcagctttgttcatgcactcggccgctagtctatttcggcttagtgaattggcccgtaagctgacttgcaacgttacaagtttacacatgtcatgttctcaaaaacacaaataataaagtatattagtgcactctttatcataatagaattttcctaaatatatataaatattattatgtatacaaaataataataacaaaaaaaatgaatgttcagtgtattatagtgcaggacatatatgtcgtgcactttagtacgtacggtaatatagtgtgatatttgtcgttacattggagcaatatggagcagcaaatccaacaaataaaatgcaatcccgttggagacaaacgtttaacaacaggtgcttttgtttttagttatattttttttctagagaagaatatattacaaataaacaaacgaaagcatgaaaaggaagtcggcaacattttgacatggacattatgatagtaccatttcaattcttttagctatgacatcactatgttagattagattctttagcataatcctggtaacttatttattttttctaaggtaatcaaggtaattattgtgacccattttttcctttatggtgtgacacatcaacaatatgtggttgttgtagggtcactaattaataagataagagcaccttttttatttaaaaaaaaatagaaagataagagtaacacatagtgtacactcaataatacattttccattctagtgcgactaaggaatgaaaattaaggtggtgtttagttgaaaaaaatgaaaatataagaatagaaaaagaaataagtaataacagtaggaatgagaatagaatgaaataaaattgaaattgtataaaaaaattgattaaaaaatcattaaattgtatctcatattacattagaatagtctttctttttatttaaaaatataatagtcattccactaaaatagtgaaaagggtattccattagaatgacattctaatactttcaaatacaaccaaacaaagggatggaatgaaattgagaaatttacatggtatactaacttttgccatttttacaaaaatactgttaggcggtttttttactgtgttttttataa

SEQ ID NO: 387464 - DNA, 1340 bp, Cannabis indica
gaatacatcaaacttgtggcatatattatgagagagtctatttatgcataagtcaaacactttatatttttgagatcttattaatgaatcttatctccggacgtaaccccataaactaataacaatctagaaagattgatgatataaaattttgatgtgtaaccacagaatatttatttcagtatcaactttattattctgtattcaattaattaattacttaaataataagttcataattataaaatacaaaatttcaattttttattatgctaattaggatttttgccccttaaattttaacatgtactaaatcatgtcctataaacttttctagtcgttaaaaattctcattgaactattgagattattagatttaaggacttttgtctaatttcattcaattttagtatttcagtgattgtttatgtattaaactatgctcctttgatatgtaccaaatcatgtcttttgaacttttacatgtactaaatcatgctccctgatcttttatccatgttagattttttttattaaaattggacaaaaattcttaaatgtaataatctaaatagttcaggggatatttttaacgatcttaaaagttcagaagacatgatttgatacatgttaaaattcggaagtaaaaatcgtaattaacctattttttaattggaaaaatcttcatttttttaatatgagagatttgataagagttaatgtatgataagggaattctcacaacacaacacaacacaggtgagatgcaacaacagtagcgacagagacatcaaaataaagaaagaaatgcaaaaacatggtatccctcatcaccaccaccgaccactagttagttaagggtatagtgttgatccgtgtgtcaaacgacattgtatttctttatttatgctttataattataaactataaaggctatgtatggttgggagttaagttacattgcgattctgatgccaataccatatgtcattatctcattagttctcactcttcacatcctttctgtacccaaacaatatcaatgccatatgatatgtacgcatgtgcccaataaatttgtaatagttgaatatattacattaaatctttctttatcattactttggtattacatcttattgtattcacttttataatattatattaaattatattgtatattgtatttttatataatattaaattaaacttttatttatattaaaatgttgaatatttatgttagaaattttattacaatggaagaaaaatcaagatacattataactctattgtaaaataatataaggactaaaataagagattgattaaatatatgt

SEQ ID NO: 387465 - DNA, 1425 bp, Cannabis indica
tatcatgacacactatatgatattcttgtagggttgtgggacttgaagacagattggccaactgccagttaagaccccaccaccccacatgctctcaaatctcttcccccatctagttaaactcacctccaaccccatgccactccctttaccttccctatttatactcctacttattacaaaccactaaaagaaaaagaatacatttttatttttagaaaaacaaaacaagctaaacccttctcattttattaagtatggaaattgcagcaggagaattagaagatgatttgttctttaaagacttaagcaagcaaatatcacttcttatcatggatgaagaagaagaagaagaggacccacttgccaattacccttcagtttctttccaggttcatatttttactttctttctcatcttaattttttctaagcataactagtgtttttttttttttttttttaactctttttgtgttgtttgtttcaggctttttctcaggtaatccataataatattccaccagctgttcaatctcatcaatttgtgtatgaacaaagttgtaaaagagaaagcagcaaagggactggtgtgttcattcctcaatcttctcagccaagaagaaagcagagacatgggagatcatcatttgggtcttcatactatgcaaaatctcacagacaatctgaaaataataacaataattaccaaaacaacacaaagattgttgtgtctcatcatcatcatcaacaagtggcctcaagtggctcttttaaaccaaaatatagcagagtatagaaggattaatagaaactctaataatctctactaattaataaataaaaccccatttgcccacttcatgtgctatatacaatatgtatatgcctggggtctaatatataattttcatcattattatatatatatatagagagagactacttttgtacatgggataagatctatagtgtgttaagtgcatggaaagattcaccaaaagggtgtgaagatcttctatggcctattgttgtgcatgtatgatatataggataatagctgaataattaattattcatttgatgctatagattaaataattcttattgttgtagatctgtattggcctatgatttgttttaagaaaatatcttggattatttatttctatctgagaggaacccttttctataatttttggttgaattaaaaccatgtaataagatgcgaaagttgagattagttgtgttggatctccagcttgggagaaaaggttttggctctattattattattactattatattattcaagggataaagagtaaggaactatgtagatgtgaccgttaaacttgaaaaatattttataataaataaaataaagtttattatgctattgtttggttctttggattctaaaac

SEQ ID NO: 387466 - DNA, 725 bp, Cannabis indica
attattattattattattcatagcttatattaaaactaatatctaaataaatgtaagatcaacctaatatatatgtgttatattaaatgtagctaatataattgtttggtattattgaatttgattgtctagtattgttagaagctcttagaaattttaatattttgtcatctacttttggtggtgtcattgaggattatgaacaacttttatcttcttttagtaatgtttctttacgttttattaaagatttgctaatcgggttgctcatcttatgcctagagtaacttgtttatatgttgatcgtattttttctaaagtgtaatctcccgtttaatattgttgatattgttgaggctgagttggtctagttgaataaaatttattgttatcctaatttttttccacatgacgtgacatattcacatagacaagatttatgccacgtggaatacaacttgtcaatagatgaaccaagtcgacatgcacaacttatgaattgacaaagggtccgaatactcaagcagaacgaagatacaataaaatggacaaccaggagggtctagtcagacctcccctggccggccaaggaagagtatgtgtcggccagccctagacaaaggatatgtcggctagcctctttaatgatagcccaaacgactagtgtttctgcaaccttaacctttgacgacccatgattattttcaactgttgggttttatgcc

SEQ ID NO: 387467 - DNA, 1063 bp, Cannabis indica
ggttgttagcacatattgctaaagaaattatcaagtttaaggagtcatattattgtgagtggtgactatttgaagtaaaattaattttttataaatttcattgattcatagaaatgattataattattttagacatagtattatggtttgattggttgttgatttagggataatttttccatggacaaatcttattagaaatccttttgtaattattttcttaatgtagaaaaaaaaaaaaacaaacaaacaacaacaacaataagagcaacatttctatcattctctctaaatatgttggcacttgtttcaaaaaaaaaagtttgtatcatttaattttttattcgttatgatcctaaaataaatgtaaaagattctttattctccttcagaaattccaaaaatattggtttgtggtaatatttatggtggtttgtccaaataattcataacctatctttgtatcaatgattatttaactgtttgtactaaaattgatttatccattcatgtggtcactttttaatttcaacttaacgagtgaaattcttagccacatataaatacatgcaatgacctgtgagattagtagagttgagacttttacttggtatatttgtttcaaaagcctttatgtgctacgatttgtaataagaaggtttagttttggtgcacacactcacaactctaaatttatttaaaattatttttatagctcttattggactgtttctaatattttgttttaatagttgtgtgatttttagaatttttgacaaaaaaaaaattatgttgacattattattttttttttttgcttgaatttcttaaaactaattatatgctgggattgtaattaatgttcaaatttatatattttagggcttttttttcagttttaatcaaaaaaggtaacaatattacaaaaatgcttctagctgaccaaataaacaaatatacagctcaaataaaaaaattacacaaataccacttgcacacaccttcaactcacaattcatgcttcctgagattgaaaccttcgtctgatgcaaccttcgggcaa

SEQ ID NO: 387468 - DNA, 934 bp, Cannabis indica
atgaccgctatagaactaacttcccaaagggtaacacttggtcattactcactcgtttcgctaaaaattctttgatctttacaattccaagtttaaaaaatcaagatcaaccacatccaagacaattaatcagcagtgaatcttcttaaccaagtgatatttcatcatctgtaacagccaccataacacctgcaacatctgaagcatcctcacaacacaacattcaatttggttgtcaaagtttaaactctgaaatgggaaatcaccagaatgcatttgcaggatttcctactacaccagccagtaatgagttaaggcccatggttcactttacaccggcaaaactatatcctctgactgcacccctaactcaagttcccatcaacaaaccattacaacattctgttgctatgaagcattcgacatcacagtcaaaatcttttgattttgttactgatctatctgaggtattttgttacaaaatgcaggctttgatcatcctttatcctcaacggttggtatccttctttcccttggtatttcagttgcagaacaatattttcttagttgcattccaggacctctttcagcttctgttgtaattcttcgtacttacaaatgatatatattgtccactagcttcataattttcataattcattcgatcatcaaattgtccattgcaaaagactaggaatggaatatcttcttttttctgtgattttgaaattattattagtgtaagacaacaattttgacactgttttgattctgttattgctaatgttattaatgtatctgaacattttttatactgatttttataacaaaaaataaaatgatatttatgaaatagaatagaaacttacttctatttcctttcctttgttcaagtcttgtatttccaattatgaaccctgtttttgtcattttt

SEQ ID NO: 387469 - DNA, 563 bp, Cannabis indica
aaattattttttcacaagagtttggatatatatatatataggtgtgtactaatatcgcactactactttatagtttgtatcccttcacctatatttttttattactaataataataataataaaaaaaaaaactatccttgacctacctgttatatgaaaacaaaataagttggccatcgtcagtaatagggccttctgttaatcatttaattccactacactattacgtacgtaaacaataattatatagcgttgcaatttgttcttatggttgtgatcgtatcctgtcaagaggttaaggtattaatttaaactcgatccattttagtaatagtgtcgaaactaaaaccaaaattataaataagttgacttgaccatacccaccacataacccatttatatatattcatacatagatgatcatgcttaatttcagtttgcttattaatccattaagagctcatttgatacgctgtataagagttgtattgtattaaataataaataatattatatttagattaagcaatgtattgtattaattattacgactaaatttttt

SEQ ID NO: 387470 - DNA, 1218 bp, Cannabis indica
atgaaatcagctttggaacacaccacctcaccttgatattctctaatcaccacaccggtactacagctaccttccaaagcatttaccgcagcaaacttaattgcactaatagcaaacttttagcatttttcaataattaattgattagaaaagaaaagtgagggctcattgccattggttgttaaaataataaaaacttcagtttaatacaccaacaatatttttctcgtttcattaataaacaaacccattggtcccacaaaagtacaaaaacaagcaaaggtcaaacataaaacaaaacattacacaacagctctctctcctttggagagggctacatattctacattcagttttcctccctaaaaataatataagaaaactaacccccacaaaaggcataattagatcaaaaaaaaccaaacaacaaaaaggatagaaaggaaagagcaattgggcactctccaacggctactttttccctcaaaaacaaaccaaacccgacaacggctactttcgagtcgtgggaaaccaatagagccttttctggcatagatgaagaagagattaattgttttattctccttctctatttgtatagtcgttaattacggttttagggttagtattagaagaagtttaagcgggaagtgtaagttgccttaggagaccaattggttggaatgacgtctctggcagagagagcttttccagttgacaatgtcgttaacttcactgaaaaaggtcctcttaaaggtcctccgacgaaacaccaattagctccccatagatggctcatttgtagccattcattagagtttgcctgcaaataataacatctctcatcatttttaattttgtaagagtaaaagtaaataattcagtagagtaagaatagaaggaattaattaaaagcaaaagaatatatagtattctactgcacatgttctgaattagactacttttcatagtggggcctactctatcacatgcaccaaatgttataagcaattactaaaagtgctttctgggggaggagtaacacattggctccactccattagcaaatgaatattaattaaaaaaaattaaagtgaaaaaaaaaaaacaaaaacaaaagaaaaaacaatataaagaaaactaggcgccaaattaaaaaaggtaattttaactaatatagacagcaataattttagggctattatatcgtacagagtc

SEQ ID NO: 387471 - DNA, 1382 bp, Cannabis indica
atgcagtccactctccaatttagtgagttgccttctgaagatcctcacactcacttggttaatttttttttaattatgtgatactttcaaatataatagagtgattgatgatgctatcaaactgtagctttttccattctccttaaaagaaaaagaaaaaaaaaagctagttgaagtctctacaactaaattttattgtcacttgacaagatctgactcaaaagttcttatcacaattcttcatttgttcaaaaattgctaaactgaggggagaaataaataatttttattagaatgatggtgactctttgtatgaagcttgggagcattttaaatatctgttgagtaagtacccccaccatggtatggagcattggattctggtacaaaatttttatactattgtatgtcctactactagaaccattattgatgctgcatcttgaggcacattcatgagcaaaagtgcacctggaacttatgaattatttgaagacatagttatgagcaaccatcaatattctgatgaaagagctatatgggaaagaaaagatagctggtattcataaattggatgctattattgttttgacaactcatgttactactctaaaagataactgaagctgccaaagttgtacaagctttaattgggtatgagatttgtgaaggaccacacacttctaataggtgtgaatcaattgaagacgtggtgatgactcctgctcaagtgcaagcaattgttaactttcagaggtaattcaacaaacttttcttcaattcatttaataataaatggatgaataatcaagggcagcagcctcaattttaaaatcaagcttctacttctcagcagccaaatccacaagctccacctgctcctaaaattaatttgtaatccactatacaaactccgttcatgactaagacgagggcatccatcagaaatcttaaaacacaagtggggcaacgctaatatgcttcataacaaatctcaagaaaattttccaagtaatatagaggtaaatcctaaagaaaagtacagtacaatcattttaaggagtggtaaagactagaagagtcagtcaagaagcctattcatgcaccaaagattaaggttgagatcatgatggtctagaggaaggcatggttattgtgaaccttgagaaaaattagcctctgatgagttatgagcaccacatcaagattttatatcctcagcgatttcaaaagaagaaacttaacaagcagttttcgaagtttcttgatattttccagaagcttcacattaacatacttttttccgagatacttaaacaaatggcaagttatgtgaagtttatgaaggaaatcttatcaaaaaagaagagatttgaggatta

SEQ ID NO: 387472 - DNA, 886 bp, Cannabis indica
tgatttaatgaattaggtcaacttactgtatgaaataaaatataatttaaatatacttattaattatacgcacaaaatgtcatagttaacaaatgaaacctaatctctcttttattctcaatttaacactgccttagtgtaaattgttaaacataacatagttagtttatgaattttaattgaatgactaaactaattaattaagttatacaagatgatattatcgcaggcattgtagggatcatggacctatataataaagcttccactaagttgatctgaaatttattctcgtaaatttcctaaattattaatttctcatgattccactatacactaaaaattgcacttttgattaaataaaatgctctaacgattgtactccacaaacagaccccgaaccaacccaaaccctaacaaaattacagtagcaaaaccgaacttaaaatcaagcttaaaacttagaaaataatgaagatagaggagttagggctttacgttcaatactcacttgaaaaccctatgaatttctactaaatcaccaagagaaagatgaattttcggtctagttcttgcttggttctagagaaatgaaggtagacttaaaatattttgtcttattctctttttaatcaaccacagaactatggataaacatagaattagctccattaataacttgatatcaatcttaaaccaaaagactaaaatacactctacattactatgaagtaacttaaatgcccacgggtaaaatggttaaaaactattatcctgcaataattcgatattctatatgtctaataaattcgccccgttaaattttagatactataccatatgcatgtgattttaatggtcatccgttgcatttccacttttattg

SEQ ID NO: 387473 - DNA, 537 bp, Cannabis indica
ttggccagccaacatgattctacctgccccgttatgaaatatataatttcatgaaattaaatctaaatatcaatttatattaatataaagtgaaaacctaaagtaaatgaatttgcaatcagagtagttaaggatcacatatctctcatttccaatcaaattatcattgtatcactttactagcaatagtggggggctttagatatgtatcaggtgtggtctgtttgtttgtgtaattagtagcaatagtggagaattgttatccttaaaatgttattcttttctccaatttatttttctttgtacctttaagaaggaaatctacatatatattcattatattataccttttctaattatgtttaagaaagagaacgacttccatacttgaattggcgcaaataggtatcccatttacactttatgaatttctaccatctatttttcttctaaatacacaaattgacagcctaaagcaaaagagaatggtattatactaatagtgtaatgaccgctctagtaatgtggattagtaaa

SEQ ID NO: 387474 - DNA, 2080 bp, Cannabis indica
gcctagcagtatttttgtaaaaaaatgacaaaagttagtatactagggtaaattttccctatatatatggtatataatattaggaaaaaatactaggaggggccatgggcccatggccaccccacaaataggcatagttccgccactgactttattcaactcccctacttttccttctcactacaaagaaacaagatttttaccagcgaaattcatgaatctcgcctacaaaagttgatatttaccaacgaattaaagaaattacgctggcctttgttagacgtttttttttctaatggaaaatcttttgccgacacattaatttgccggtaaaagttacatttgtcgacaaattttcgttgttttgtcggcaaaaagtttgcaatcgaaccacgaaaaggtgccaattttttgcgattttcttacttttgacaggaatttttcctcgtgaaagtaacaattgggggaaaaaaacttttgccggcagacaattgcaccgataacaattgtgtctttagggttttaaataagtttttctggtgcatttttacttttactggtaagcttgaattttgttgacgaaaattcttcaaataagatatgatcctttcttcttttcaatttttacgtctgatctttctctcctctccatctctctcaatgtggtatttccttcgccagagccacgtcccccactccgcccgtcccccactccgcccgtcccccctctctctcctctccctcaaccatctctctctctctccctctccctttaatttgtttccaacaaaaataaattttcccctctttgcgtgtactctagccaccggtcactgccgccatgcccactatcattaaaaggtattttaatagttatctagatacgtatttatatttatataattttttatttatatatgtatgtttatgtgcatttataattatgtatatgtatattatatatatgtctggatgtatgtatatatgtatttgtatgtgtatatatatgtctatatatatttatgtgtaccaatgtacactactacaaaaagtactttacgtcggtcaacgcgtctcaccaaaatagttgactgaggcaaaaaataaggggagattttatgcttcagagtgtgattgaagctaaaaaataacaattagcgtcggctcgtacaccgacgcaaaaagtataaccgaggtagaatgtgacaatttaaaaaattatctgttgcattttgcatcagtggaaaattgaagccaatctcttctgtttcggttaaaaattgaggttaatatatttggcatggttgtgcaccgaagcaaaaatgttaatgcatttgtaaaactcaaattttacaaagtgtaattttattttcacgcatccccccaatttaaaaccctagcagacccatttcgatacccagccgcgccagccatcatttcgaaagactgccggtcgctcactgtccgtctgccacccactatccgtttgccgcccattgtcggttcccactgccggtacgcacctctaaaactctctctctctctctcactctcgccaatccttttgagctcacatgttgcacatagttcatatttgcgaaggcttttacgattctttgattgcactaatttcataatcttgaaaaggttttcttagtcaaagtttttagttagggagtattagtgggtataagcatatatggtagtcttagctccatgattgatacatacgcaaaaattctaactctgttggtggtgatcatatatcgttataaaccatagaaagtctacaacagttggaaatgagtgaattagtgctttgctgtaattttggatatgactgtaaccaagacaaataggtacctgggaagctatttcggtaatgccattcaaatagttggtgagtttgagttttcaggttgacttgaatcgaataggatacaaggcagatcgatttataatggcatctcaggcaattcaagtgttttatatgagtgatccattagatgcttgttggtcagttgtcctaacaacacaactgaaaaaccgtgtttttgcaaatgtcagttgtatataagaa

SEQ ID NO: 387475 - DNA, 3433 bp, Cannabis indica
gcatgcatgtttatgaatgtctattagataacatatcagtgatagtggtattagtgtatatatagttgcactgaatatcgacatatatatgtttgacatagtacagattgatgctatcacatcggtatgactagagtaccgagtataagatgatattatggtcaatagtattatcatatgaacattctagactaagtacacgtgggatgcgagataagattgtaattgggtgtatgggtgcctagttatactccgatttatatttatgttataattattcttttcttactgactctgtcgactcacattattgtttatatgtataggtaagggcaatgctaaagctaaacagcagtgaggaagagcggatgaagattgtacatattaggcagttagacctggagtgttcgatctttgggacaacaagctttatttggatagccaataggctacatcttttgtaactaaatattttctaaagtagttgtaacttttaaaaaataggatctcaaattaaaatgccatcctatattatgtaaagtatttatatattcaagcttaatgtttaattaagaagttttaatttaatcatgttttccataaaccatttgattagcaaaggagtgcatagtattaagaaattacaataacacacctaatctagtagggtgttacagttaacccagaaactttccttggtgacatggacatcaatgtttgacacgtgaaaagaaggatgatgtcacgaagttgagtagacctgagtcatagtagctggcctaggaggggaccttagcccttcgcccaagttgacttcgggagctctgattggaagttcagacttgaataacttgaacctaactcacaatctttcaatattctataccgtgaagacatggaccaatcaaacccaagccccaaaaactgaaatcacatgaacctacaacctggaagccaacctgtgcacctagggtttcacctagcacccaaattgatattcctaactagggtttcaatttttgagaccgtcttagagaaaatgggtcaaaatttgcattgggacatctactagacataccaaggacatatttaaggcatcgaaatcaaatttagagcaagttcatttttgagcactcggagcacctagtgtccaagttgacaatttgtcaatctaggcaccttccaagtatcaaatcgacgatatgacttttgtaccttcttcgtcttcatcaaaaatggggaaattagtaattttggggaagaaacaacacatcaaggtgccaaaggcaatcgattttgatgatgtttttcgagaactctttcgagtatcttcttcgttttagaagagattaagattcaactatttttgaggactaaacagaatttcagaagggtcataattgggacccaacacccaagttgacatattgttaacctaggctgtttccaatcaagttctcaaaaaagtgttctatgtattttttctgccataaaaaatattgaagattcaagcaaacttgggaagaaaaccacaaacccgagcccctggaaggagggcccagcgctcagattgacttggtgttgggcccagcgcccaggttgacaatcaacttggtgcactcctttcaatttctcaaatgcaaaatttgattcgactaatgaattcagaatggtcgaaaacggggtagaggaccttgtcgtcaagtttaagaaccttggaagtatcaaaataagatcccaaaagctcgagaatgagtacctagtgcccaggttgacaaatggcttggtgtgatgtgctctgcttatctgattctaattctatttcgactgtctgtctaatttttcacaatcactaagatccatgaagttagtcaaaatcacaactttccatttctcatttcaaacatgggaaattcactcagaaatgaagagttttgagtctctcatttccgcataatagcaacatctttgagaagtagtgaccaactttgccaaaacacaaaaacagactaagtggtgttaaaatatcacttaggcatcttaaagtacatcccttggatgtttttacacttacacagtgtccaggttgatgtcatatgtcaacctgggcgctgggatgtcaacttgagtgagatgttaacctgggccctaggtcatgaattgccttcagtaaaacagtcataacttactcaatattgatccaattaatgcaattcaacttgcattttgaagctaattcaatgctctattaagttatgtctcatacttcaatcacaattctgaagctattggcacaaaattatatccccaagggagttgtgaaaataaacttcgggtttcccgcaataggtcccgccgggcttcaaaaaatgactatcaccatcagaatctaattttcaccattggatcatcatctacggtcaaaaatatctaacttgtattttccccctatttttgtgggcctcctcacctataaaaggagagctcccttagctcatttttcatatttaaaaaactacccacaaggttatagcttctctctctaatttctctcttaagaaatttgagcttctgacgcttaatatttttctgtaataccatcttgtgagaaataagaactcgaagtagatgtagctccattactttcgggatacagggagtgaactactataaatttgttgtgtctctcatataattacttaataactatttcattattgtcaatctagcgaacgggtgtggcttagaagtctagtccaaatttttgagtcaacaataatcatatcatcaacatacatggaaagcagaatacgacctacagatgtgcacttgacaaataaagttgaatcatgatcacttgaaacaaaaccaagagacaaaacaacaatatagaacttctgaaaccctgcttggggaacttatttaagaccatacaatactttttatagcttgcaaacctcgccttgcttatgaggaacgtcagaaggaggaaccatgtagacttcctcatgtaagtcgccatttagaaaggcattcttaatatctattcgagatataatccattgacgaattgatgacattactataagagtacgaacaatagtcatttttgcaacaagagcaaaagtctcttcaaagtccataccatactattgtgaaaaactcttagccactaattaagccttgtaccattcaatggacccatcagacttggtcttgattttatatacccaacgagaaccaatagcatgtttaccaggtggcaaaagtaccataacccaagtatgcattttttgcaaagtaaagaattcctcattcatagcacgctgccaaagggggtcaataaccgcctctttataggatagaggctcaaaaagacaatgaatagatgttaaaaacaaagtaaaagaagcagaataagaagagtatgtaa

SEQ ID NO: 387476 - DNA, 702 bp, Cannabis indica
tcctaacattagagattgtgttatagcaatactcctactttattctttttttccaccaaattattatgtctcacacaagcaatggagtaaaaagtaaaatacagaagaggacaaagggtatgaataaaataaaaagtatacggtgtacggtcagatttgcgagactttgaaaaaattggcagattgggagagagagaggtagtagaagagggagagagagaggcatttcgaaataaatagggtggtggggatgacttaatagggttctgaatagttacttctgtctcttgtttctcactataacgaaacacaacttcaccaagaagactctagaaacctcctcctcaaacgtatatacccctttgcctatatatacttatatgcaaggagagagaaagcagagctgcatataatggggaagacaaggtgttttcttgatattagtatcggaggagagctcgaaggcaggatagtggtggagctatatgacgatgtggtgcccaaaaccgccgaaaatttcagggctctttgtaccggagagaagggcattggtcccaacactggtgtcccactccactacaaggtttccttttatataagagacctatataatccatatgtacatgttatgtgtttataagcaagtttgcatctgggtttatgatggttttggtaaaagaaaaaaaaaagttcatttttctt

SEQ ID NO: 387477 - DNA, 948 bp, Cannabis indica
atcctataaatagaataagatgcctgatcttattttctaagctattcctaataacctaattgtctctctttgtcagaaaaataaaaaatagaaaagagccaccataatattcaaaatcctcttcttctcttctcaatatttcgaagccttgagtgattaaataattacccacacaattcaagtcaatactcaagatagtgtggaagattgtgtagaattttatcaactgaacggatcaagggttagagatttgaacgaaataagtcatttaattctgctgcaaccaatgtaaggtttttttataattttttatgtgtttattttattgttttagagaattcatatttaggatgttagattatagtgttataatcaaacatacatgttagtaaatctagatcctggtaaaacaacatccaataactggcctcagagccatggtaatgatttattttcatgaaatatggatttaaaatgatgtttggttgatttggatgtgttcatgttggtttatgtgatatttgatgattgatgtaatattacaaaaaatttaatgaaaattaattttattttcgttttggaattattttatttgaaaaattaaacaactttctttttaccgaatataatttggtttgaaactaaaaagttatgattttttgaagttttggaaaaatcggattagggtttcccctatccgcgcacgcgagcctgatattttggggccaatttttagacaaaactcagttcagacaagatcctaactgagatttctcaggcaaagctcgagcctgaccaagaaatattgcccagccaccctgcatgcagcctaaaacctcggcccatcccccttgtccgcgcgtgcatactccccagatttttttttctttctaattttcaaattttttaacttttaaaaatcattttttaatgaagtaaaattcaaat

SEQ ID NO: 387478 - DNA, 2172 bp, Cannabis indica
aaaataaaaggaacaactacttattaaacacaaatgacgaagaagaaactacgagaaacatatgaattctaagtcattcttcaaatcatccatattgttacataagtcataagtcaatccatccttaaattttttagataacctttttagacaacaaaatataaacaacaaagaaaaatactcattatcctaattaaactccattaattcatcaaaataagatcgatctaattaagggtaagggagagtggcaatgtgattgtgagccactgttccaatccacaattttcctttcacttctctaacttcactcacaagtttcatcaccactccttttcgatcctcaagaacttcaacaacctctcccatttcgttgaagagtgaaattacagtgtacatcttcatccccattagtcgagctaagaaactcattctgattggtaagcgaaaatagacacttcttatccatggattgtgacttaaaacttcttgtattggagtacgacaacaatctatagcaacccaaaattgaccattctcatttattctcacattgtctggaaatcctggtaaattagcaattggttccacatgtcctgttttaggtccctctagccaatatttcattagcctacatcaaattaaaacaataaatatttggtgctaagttagaaaagaatttcattcaaaatttaggatagtttattcatgaaactagaaccaaattacaacactctcaataaataatgtaaaatgattacaaaagtaaaaatataactaattagagtttttatttttttgaaaaaaaagtgtccaaaatacatgtacaatagtgagctataatagctcaaatttttagctcattcaaaacagtcccaatagcttctctaccttatttaaaatacctccctaaattcttactttttgtattttacctcacacatttacattacactatatattaatttctatatattttcttgggaaattaccccataattatatactattttttaacttttttttttaaaaaaatttacggtttgaatttctaaggtggtttctccggtaatttctatgtgggttgctatacggattttggttgtgatttaggttgctccgttagttgcaataggagttttatgtgaaatttcgtaaacatatataaaaaaaaaaattgaagtgtatatattaatgaaaaaattcctatattttttaccacattatttaaatattatatttttattaattaaaattataataataaaaaaaacaaatgctaatttgggagaggttaagacaattaagtacaaaaaagaatattaaaataataaatagagaagctttaaagcttagctaagtgcacttagctaaagattttttggagtttagaatgaggtatacctaaaaaattaagagcactttaacctcttagctatttttttagctcttattagctataatgaagcatttattgggaggttaagaaaaagctaaaaattaaatttccttttccaatagatgagctaaacttttctactatgtcaaaaatttatgttatgaatagtatttagctaaatgtagtaagagaattttaggttttagtgcttagttatagtttttttttattattattattattatgatatattttgtttagtaaaaataaataaatattatgtaatatataatattttattatttgtgtattataaatatattatttaaataatttagagaaaaatataagaataattatatatggtgtaacttaaaagtagtgagctaaaatagataattgaattttagtaaagtattttaaaagataaagtgttgttaggagtgcttaaataaatattactatgggatttataagtttgagtaggtacttagctataattttttattactttcatgatatcttttttagtttagttgtaagtgtaaatataatataataatattttattatttttttttttttgtaaagtaaagcaaagttcattaacaacaagagcaaaagatgggaatcacaggggaaattccctccccaaggacaatcctgcctttggactgaaaattctagtactcccggcaaggccatccgccacagagtttaaccgacgaggaataaaagaaaacttacacacgtaatgaacttttggtttagat

SEQ ID NO: 387479 - DNA, 860 bp, Cannabis indica
aaaaaactgtggatgattggacggattggaagagatggatgggaaatcgtggtggtattgggatctcacctgacaaaagttgggagtcatggtgggatgaagagcaagaacaccttaaacacacagattttcgtggaagagtgcttgaaattttacttgcattccgcttctttatctaccaatatggaatcgtctatcaccttgatatatctcatcacagcaagagtttgctggtaagtattaatacatgatcttcaattgaacacttaatctaatttttattctaatagttatcttgttgtctttttttttgtttaaaattttgttctaggtttatggactctcttggctagtcatggtaacttgtcttcttgttttaaaggtaattaagcaaatggacattgttgagttgttaatatatattatgaatggacaattaatcattttccaaatgccatatttgatttttggtttatcagatggtatccatgggcagaagaagatttgggaccgatttccagctcatgtttcgaattctcaaggcactattgtttcttggttttatgtcagtcatgaccgtcttatttgtagtatgtggtctcactatatcagatttatttgctgctatccttgccttcttgccaacaggatgggccattgttcttgtaagtaccttgttcatcttatgttattcagatttcaatccaattttttactcagtgaatttatatgagcttgtgtgttgttgttgtttagattggtcaagcttgcagaggattgttaaagaggataggactatgggattcaataaaggaattagcaagagcttatgaatacataatgggactcataatcttcat

SEQ ID NO: 387480 - DNA, 1035 bp, Cannabis indica
ataaatattaaatttatataggaaatttaaaattttggttactatttacccatatatagtgaaaaaagaaaacactatttggaacacaaaagtcagatggacatatatagatgatatatggttgctcatgagctgtggccttctttcttcttctacttctttttgttgagatatcaacagagtccattgtctggggtccatgagaagaacatgaactgcataacacacgatcccaactccataaaggagtgatcttggcattggtgtagagctgaggtggcaaggaaatccaactatggaggatgtgaggtctatataattctcacattgggatttgagaagaagctctcatattcataattcatattcattagtattgtatgtgtataatccaatgctaaagtttgaaactttttttagtttaatgtttgttttggtgttcatattcatgaatcatagatatataagttgattcattagtattgtatgtatataatcttggaaagcatttagtaaagtttgaattaactttgtttttttgttttatttttcttaaaaaaatataggctgcatgtgtttggaaatagtgtaattacataatgtgtgtttggatatgaggtagtaattatatatatataaataattagtaattatagggattttttctattttgggttaaaattaccttaaataaacatttatactaccataagcaaaaataaacatttatattgtttattaatttcaaatatactattttcaaagttttttatttacaaaaatacacttgaaaaactcccccagatgcgcaaggagatgtgtggcacacatgtggctatgtgggcgagtgagactcacacgcgagtgagggacaaagcattcagacttgcctgacgctcacaaactgtagcgtcagaacgcagcagtggttgccacgtggcgaattcggacaaaataaattttaacgtataaggcttcttttctcagtgcaaaacaactaaacaacaacacaaaaacaactagaaaacaacttaa

SEQ ID NO: 387481 - DNA, 1065 bp, Cannabis indica
tatgtttaaaagtgaatggtacatatttgatattcaaacttttatactctattttaactagagttttaagaaacccaacttgttaaatataaatgtcctcgtctataagttagtatatttctcattaaatatacaaagtaattagtagaaagtaataaataaataatactttatttattgaaatacaaactattatagtactttatatttttcataatgtttatttagtaccataatttgaattatacttatttagtatattcttggacctaaattggtaaataattttttttatatgaccaatttgttttcacataattaaatttaaatttaaaactcaaagtaaattagcatagtttagtcatattaagtcttaactacttaaagctagctgaactgaccataagagtatgtgagagtgtgtgtgaaggagtcttaggatcgaatctcaagttatgctatgtaatatatatataaacgctttaataaaataaaaaataaaaaaatttaagtaaaatcttatctagatatcaaataagtaatgttgaaaatatatatgaatctatattttgacaaaaaaaaaaaaaaaatacaaagttcaagtagttacattatattatacctgaagatcaataaaatatctaatgaaaattgtaattgttactgtacataaacatattcagggtctctctgcacaacaaagtttggttccttatgtgttggaacttggaataactcccttatttgggactatttggtcacagtgtcctcatttataacactatttattattggttgttaaggaccatgttataataacttgggagaaaataaagttattttggttaccaaaacataataaaacggcttatgattgaaccaaagtcatgtgacaatttgttagcattccaagtcaaaatcttaagatgtttctcttccactgctaattatttgaaggaaattccttaaattgttaacttaatacctttgcaagaagatgttgaaatgaatatgattgtcttttttttttaaaaaaaaaaaaaaaaaaaaaaacgaaaaaagtac

SEQ ID NO: 387482 - DNA, 671 bp, Cannabis indica
aagagagtgaatatgcaagaagaagaaacaaaaagcagaagacctcgaaagtgctgaaagaaagtcaatgtaaacaaaatttaagtataaaggatgttgagattgacatgaaaaaatattgctaagagcacccaacccaacaactaatctaatctattcttaaaatatattattaatttttttttttttttttctttgtttttaagcatatttttatattacactatatattaattttgtattaattttgttgaaatatatcactaaaattttattttgttaaaattttattattttaaatatataacattaatatatatacatactcacacaaaaataattattaaaattcaaaaaaattaataaaatatatttaaagcaataaatagtattctataaatatagaacaaaataatatattctcaaaaaaatttaaaataacagagtttaaagcatttactgtagcgtatttttagtaagattctttaaatttcttaaaccttctctacttggagcatctgctcgggaggatagactgagcaggatgcctcgttggcacatccagaatgagatattcagcgagccgtgcaaagcactcagcacttagcgaattcagcattcgcatcatgagtcatcagctcaatccctataactcagggatcaacttacgt

SEQ ID NO: 387483 - DNA, 1810 bp, Cannabis indica
acccagtgcctaggttgacgtatagcttggtgcgcttgttggttttgtggaactaaatctagtacacagtagaataatattttctgattatcatcgtaccgctattggttttatggtactaactcaggtacgcagtggaataataattttctgaatatcattgtaccatagttctaaggatctctagatgtatatacattaaatctaaaatataaatttgatgaaagaaataaataccccttaatgggtatcagagtattcttgaaacttctcgtaagttggatccaataaatctcacaccgtagtcttccagatcgatccaccacatataaggagtagtgtgggctactaggataaataaagtgtatataaagttcttgtataaatcttaacacatgagcaagaacaatttcttatgtgataaagagaaaaatatttactggtaaaactctttttaggctttcaaaaaagttacctacaaaatcttttgtcagatctttgttatgtggtatatttaaataaacccgttgatctcaaatttggccaaccaatactgaagtcatatatatgatcaaaatcaaaaagtgtaaacaattagaacaagtaaataaaaagggccaaccaatggtatatttttttgtagaggttcgacctccttagttagcaagtaatgacctactcccgttttggttgtattgatatgagagataatacaacacagatcacaagtgttgtgtgttttagagtggctctctttgtattaaaatagtgagaatatgaggcaaatcttaaagaagagagatgagggagacttagtctctactacatttctaatggcgtgtaggagagagggtgagctaggattttgagtgcttgaactcaatagcttaaggatgagaacttaggaatcagaatttaaggtttagagcctttaggtttagtttagggctctttatataggagagaggttacaagaaatagtaggttgatatcccttaaaatgaggagatatcacctatttattacacattaaataaataacaaaataacttattaattatacctaaagaataggtaaataactgaagttaaacccctatttttgtgggttgtttgaggccaattcgtaactgaaagtgttgtttaggttgaaaggtgtagaggcaccaaaagtgcctaccagaagagagactggccgggctaccctttgctggaggctggccagcctatgttggcactagggctggccagtggtgattcggcgagacccctttggttggccaattcgttgtctctttgtcctgattaagtatttggactcttcgtcaactggtacattgtgcatggtgacttgagcttcttattgacaagatgtactccatgttgcatcaatcttgcctatatggacatgccacgtcacgtggatagaaattgagataacattttacccccaagtccctgtgcggacgtttgtacggataaggactttcaaactttagtgaaagcgatatctaagattggactaaacaattagagctcgggacttgagagcttaggatcatctttttggacaacgtttaacaacttgagagaggtgagaactcaacttgattattggacttgattttatgtgttgaaaaacattatccatattccaatttttatgatttgtaaattatttgaaaaattaaaaacttaatctgcatatttttctggacttttctggggcacttagtgccaaatatatttttgtacaaatatttatgcaggttataatttttgggttgattcaaaatatagtcgttatgct

SEQ ID NO: 387484 - DNA, 518 bp, Cannabis indica
agagatggtccaaattgatgggtatatccctcaaaatcaaaattatttctaataaatgatacccttattataaagtacaattaaattatgaaaatataaaataagatgatgttacattttatgatagatttaacatgttaaaaacttgcatggagtggagtctttttctattttaggtatttaatcagtgtaatccggtatttttttatttatagtgcatccgatttgtattaattgtagattttgtattttggatctaattgaattctcatattaattcaaatctaattgtatcataaattattgttgttttatgtctccaacaataaattaaaaaaaaaattaataggtaataaattaaaaggaataaaaaaaatatatgtataaagaaagtttaattttgtttataaataagaatgaaatatctatttgattttattaagttttgaaatatatttatatcatgtgtattatatttttaaagcacaatttttatattaaaatattaattttattta

SEQ ID NO: 387485 - DNA, 1827 bp, Cannabis indica
ctcattaaatataaaattaatagtgtatttataactcactggttgtatagttataagcaagataaggatacaaaactattaatacctatattgacgaggcatcaacctacgtcagaatacacaagtctgaggacaacattcgtttatcctaaatgaataagtgaagttactcaatacaaccttagataatatatagcgaggcatatccacctcgctacttataattaagaaacttaacgaggcggatcatttataaacactgagcgtattttccacacgacaatagctaaggattgtaactaagaaatatgcgagaaatgattgtccagtcttcaaggccttatagtcaaagagcagctcttaagtttgctctgtacattggtgctcatgccattgctgaaagacatgctactattcaaatcaacattaaccgtttacaggttaagcgagatacaattgtccaaatcagcagtgactatctttaaggataaggataccacacggttatgcgattactaattgttatccccaatgtgatcaaaatgaaatatgggaactaaccacgttccattaaaggcttactatttgaatttaaatgtaaaataactgccaatctattatcttataaataggggcagaatcccataaataaggggacaaatgattttttagaaaatctttgagagaagaattattatattgtatattgaatactcaaaacatatcttgaataagataaattcatggagtatgcagatttaactggaaaaccacgtaaaaaactatgtggtgttattattatactttattaatttcttataatttctgtgttaaatttattacgaaaaagatttattattggttaacaaaaatctgcgttaacaaaagaattgttattgggcactagtggtgttcaatactttttataggcagtgtcttatgattagttagtgatattttcttaagttatattagactcgatatttaattacaataatagttgtatgacaccgagaagagtgttagacatcagtattgcttaaaagctaaaatcttagactcactgcttagccaaccaatagctcaaaatctatagtttattaataatattatgaaacttgtaaaaatgtaagattatatctattaattaatgaaaaattggacgttatttaaatatatattttttgacaattaaaaattgtttaagttaatttttgtaaaatgagtggattagaacatctccaatgatgagaataaatgaacaaagtgaaaatataatccgctttgttaagaaatatactctaatggtgccaaaaaataatacaaatttgacacataataaattttataatgtgccaaatttacatcactataaatacaatatatctttttatttttatattatttttattattttagtagtatattttaacattaaatatattatggacaaattagagtcttattttattactttaccttataaaactaataatgaataaaaatattaattaaatattaaattttacataaatttaattaaaacttatacaaatgtatgacaaaggaattttttttattatatataacataattttcacatacatattcacttcttgtattaagatccactcacagtgaagaggtattcatctcgaatcccttgttattttattatttttctttttgttttaaaaaaaacgaaacgagcaataaaaattaataaatgatacatatattttgaaagatcattgttattaggcactagtattagagagtcccacattgccaatgtgtggaaaaataatagaatacataagaggaatg

SEQ ID NO: 387486 - DNA, 1655 bp, Cannabis indica
aaaagaaaaacacaaacacccaattcatccaaaaacagagcaagaacagcagaatcccaaaacacaacttcaacaatcaagaaaacatttttaatcaacttcttcaatctttggcccagcaccagcagctccaccagaagaagcattaggcatgtcaccacccataggcacatcaccagcaccggcaccaccttggtacatcttagcaatgataggattgcaaacaccctccaactcctttaacttgtcctcaagctcatcaacttcagccaattgattcccatcaagccattcaatggcttcatccaccgccttttcgatcttctgcttgtcggcagggtctaattgcccagcaatcttctcatccttaatggtattcctcatgttgtatgcataattctccaatgaattcttggcatcaaccttcttcttcacttcctcatcttcagctttatacttctctgcctcttgtaccaatctctcaatctcttccttgctcaaccttcctttatcatttgtaatagtaattttgttcttgacaccagcagtcttgtcttcagcagacacattcagaatcccattagcatcgatatcgaaacagacattgatttgaggaacacctcttggagcaggaggaatgccagtgagttcaaatttcccaagaaggttgttgtctttggttctggctctctcaccttcatagacttgaatcaaaactccaggttggttatccgaataagtcgaaaagatttgctctttcttggttggaatcgttgtgttcctcggaatcaacactgtcattactccaccagctgtttctaatccaaggctgagtggtgtgacatcgaggagaagcaagtcttggactttctcattcccttcaccactgagaattgcagcttgaactgcagccccataagccactgcctcatcagggtttatgcttttgcagagttccttgccattgaagaaatcttgtaaaagttgctgaactttgggaatccttgtggacccaccaacgagaacgacctcatgaacatgactcttgtcgattttggagtctctcaaacatttctcaacaggttccatacattttctaaacaagtccatgttcaattcctcaaaccttgctctagtaatagttgagtagaaatcaataccttcataaagtgagtcaatttcgattgtggtttgagttgtggaagaaagagtcctctttgctctctcacatgccgttctcaatctcctcaaagctctagcattgccactaacatctttcttgtgctttctcttaaactctgcaacaaagtgattcacaagcctgttatcaaaatcttcaccaccaagatgagtatctccagcagtagccttaacttcaaagattccttcttcaattgtcagaagagaaacatcgaatgttcccccaccaagatcgaaaatcagaacgttctgttcaccggaccgagatgccttcttgtcaagcccataagcaatggcagccgccgttggctcgttgataattctcatcacattaagcccagaaatggcaccggcgtccttggtggcttgcctctgtgaatcgttgaaataagccggaacagtaacgacagcgttcttaatagtctgacccagaaaagcttcagcaatttccttca

SEQ ID NO: 387487 - DNA, 994 bp, Cannabis indica
aataatttatgatgccaaaaaattaagatttaaatagttagttgcaaacagttttatttattttatacacatacgataaattgttttgaactttattttttatactataaattgagaatttcttaaagatgaacaagatacatattacaactacaatatgcaacctcatataaaaaatttaaatttgatttattcttaaagtataggaaataaaaaacgccccacggtagaaaagtgatgcccctacatgagaagttgttagttcaagaatcatccatgtgtataagagccataaattcgcgagagaaagcctaatagaggcttgaagtggagacgttacaaaatggtactagatccttaattcaactgaaagtgtggtcgatgaggacgtcggaatctcgatgggggtgattaagacagtcagagtcccgttgatgcgtgtcgtaagccacaacaaatttacttattattttaatttttatattaccaattactttagtataatgataaatacaggtcgatcccatgaggattattatcaatttattattcaaaaattagtgacaagaaataaaagattttgattatgagaataaaataacatgaattaaaaaaaaaatgtgatactacgatatgagataaaaataatcagagattattctccaccctcaacaatcattcttaacttctattaatgaatgtaattttaatttttcaatcaaactaccaattctgtagataaagctgaagcaatcaaattatttcaatcttcctattacatgtaatcaaggcaaagcgctcaacctaagcagtaaatctacgaagcatgcaatttatttaacttagataaatttttaaaatttatggagatagactaatctagacaacaaattaatgaagcatataatttatttaacctataggttctattcttcatcacaattaaaaatacctttgacaatattaaaaattgtaatttgtcacaaacacttag

SEQ ID NO: 387488 - DNA, 890 bp, Cannabis indica
ccccacaaatctgatacaataagttgtaatggtttattgtagcaggtttcagaggccttagaaaatggaaatttgtgtatatttcctaaacaacaagcttggctaacagaatgtggcattttatatattcgaattggaaatgttacaagtagagagaacaatctttacaatcctttcagaaggatgatcaagacgattatgccataaatcgaattcatgaatggaactattacaattgacacaaagactggggttggaactctcactgtgggaggtggtggcaacatttgtgtttggctgatgcaaaagttgagagtcactacagggctgaggtgaaacagacagttgtaattgattgtcatcaaaagtatataggccattgtggtgttttccagtcagtaggatagctttgctcacttgatccttgacataacaaacatcatgataaaacacaaaatacacattgttgtcaacaacaaattttgatacactaagcaagttcttagtgatttcaggcacatgatgaagcttatttagagtttagggtttatgacaggtattgggaataagataagtgttaccaatttgagaaataggtagtgcatcaccattccccacatacagttgctcaagaccctcataatctgctgctgtcatgacattttgtccatttggtgtgcaatgatttgttgctccagcatcagggtaccagttgtcatcctgagattgagttgtgttagccaagtttgcatgcacctgagtttgatctgtggcttgaaaaatacctgtaatgaccgctctagtaatttggattagtaagggcaattagcactaatttttattattttattattttattattatatgtgaattaatttaattgtggaccc

SEQ ID NO: 387489 - DNA, 611 bp, Cannabis indica
gtaagaatatctcaaatttgaatgcgaacgaagatagtcatacccctacctaaaaatactttgatacatttgagaacacatgaacaacccaagaaaggacaagactataacccctcgccatagcaaagtgttgatacaacaccgttattaaaaaataaaaataagcatattaaagaaaaataacacactaataataacaacacaattatgatctaatttaaagccaataagcaactctcaatcattgagagacacctttgaacccatggaaccaaagctagacaccaccatgccaactcgacaatcactcactagcctagcctatcctctctacctcctcgataattggactacgacctccaattttagccccaaatcacgaccattttaacaggtctaacataaccttgactcccccaaacaaccccaacgacaaaaggatgaagacagagaggaaaggaaaaattgagacaaaaggagagaaacaacaccagtgaaatcgataatagcgtgagaatcaacaaagcccgaccaaatccacgttgtaaggtcaagaataagcaacgagcccttttcaagaaaaaaaattcaacaactaggatgaagaaaaa

SEQ ID NO: 387490 - DNA, 1158 bp, Cannabis indica
gcaagcttctaagctctatcccagagggtaagtgtgaagggagggtggtgatatgtggggatctgctggaatcgagtgtaagtggtgcccatatcatccaccatgaaatacttgtcaacaaagtgcccaatttcgctaacgaccttgttcgtggtgcccgtcaaccacttgaagtctggctgagaaaattagaagtaccccaacctgccttgcttaggggtggacttcaaatcaaaaaaccagctaacctcatggggagaaggcatatgccacttctggatggcatagagaatgaacagggcaaacaaatacttgatgcccttgggagtgaattgggtcggataggggtggaagaagtcggcaagtacaggtgcaaaggcagcaatgccccttgtttagcgtgagcacccgaccaggcaaacatccccttctcagggtttgtaactcgattggtataggcaggaatatagcagtctaactcccccaaataaatgtcctggtcgagatctcgtaagcgtgcctcggtaacattggacggagggctcacctacctggaaccaaaagaaccttgccttctgtgaggaaccgcggcagtaaattcctcactggcatagtccacgccctcaactaggacgtcgccatccgcatcgactgactccccagtctcagtatatcccccaaaggttgggggtgcaacctcctcctcttcctctgcctcagaaggactgctaggacgaacatcgtcctgttctgcaatctcttagaccttggcgtccccttcatgatcatcctcctctttgatggatagatcttgttcgacactgggtaaggtggcatgtcgggccacttgagggtcagatgcgttgattctacgcattgtctttttggtacgagccatctattggaaatattttaccaggatctagatttacgaccttgtatgtttcattaacgtcctaatatgaattctaaaaaaatgaaataaacacatctaaagtttaggaaaccttacattgggtgcagtggaatataatgactccttccgttcaaatctctagcccttgattcctttatgtagcagaacataatcaagatctgaacatggatctctttctctccttctttgatattgattctccttcttgttggttggattct

SEQ ID NO: 387491 - DNA, 2070 bp, Cannabis indica
aaaaaaaaaagagaacagaaagaaaaaagcgagatctggtgttgttcttactcttgccaagcggagagaacgaagacggagacgaagagaactctaccaacgaaggagacgaaagccatggctagttgtatctgtacggacgaggaagtcaaaacgacaccccgttttgagattcggaaaaattcaaatttagagaaggtgagagagagaagagagagaaaagggttcgtttcgttttcggtccgtgtgtgagtctatttacgggcaagcttaagaaagagaaaacagtggagcagacaacggaaacggcgtcgtaaatcgagataaaagaagagcatggtctaacgagtccaaacactcccttagatgtccttctactcgcgtatacacgctcgttttctacaatcgcaaccgtacacgtataaggaaccaatcagatcgtttgattacacaggtccggagtcatcggtcgatgacgtggcgaaataatgaagcgagtagtgtgtatagatgtaggggagagtagagagaattgtgttttgtgggattttgttgatttacgtttgtacccttcttctttgtctttttgcttggtattgttttgttcttttttgttttcgtagctctagctcacctcccattattgattattatttattttcattattactatgtatttatctcgtcttccaagaagggtttgaactttgaatcacataactttattaattggcatcagctttcttcttctaattatacttttccttctcagatgttctcttttttctttttcttccaaatgtttgtgtgtggttggtggatggccttataaataatgcgtttttgtgaatgagaagatacacgattcttcagttctaactccatttgtgttttgcaaatggattaattttagtgttttttgcggttaaattttttaaatttttattttaattgtaattagtcctctaattattttttttagcaaaacctaccaatttctacttttattgacaaattcaaattgtctatcagaattgttatgtgtcagcatgagttgttctacttgtactaaaatagagacgtgatatatttatattagtccatataaattaacatatttaatattataaaattaacaaaaaaaacaatttaaaactaagaaaactacaattaaaatagtattaaaaaaaatttaaacaaattatcatattcaatcagaattatttctcaccttattttttccctaacatttcctaaatttctgtaattcttcttcttcttcttctttctgttgtaggggcagtgaaattttggacaagggcagatggatttgggcatgcattggtcgaatctgggatgaggtctgtcgaattcgggctgagatccctttgatctgggctaggatcggcatgaacctggccagagagaggagcagaaatcgatcggagaaagaaaaagcccttctggatatgaagtcaccaacaaaggtgaatgaagggcaaagttttactagtcagatagtcgcacgtgtcaaaatcaacagacaattgtgttcctttcttcaacatcctccgaggaagcaaaaaaattaaatggaccgaggagtgtgaaaaagcttttaaagagctaaaaaagtaacttccacaacctcccatcctatcaaaacctctagacggagaagaattgggaatttaccttgcggtaaccgaatatgctataagtgcagtgccgatccgataagaaaataacgcccaacatccagtttactatgttagcaaaaggttgattgattttgaaattttataccccctgatcaagaaatttacctattgcttgctcctagcctcaaaaaaattaaggttgtacttacaagctcattcaattcgggtgtaataccgatgccaaaagacggtaaagtcatcagctgtaaatgggtgtacaaatggaaagaatgcattctaggagtagaagatgttagacatttatatgtataaactgaaatatatatgtttatgtataaaatgcggaattaaatcaaacatatatacactatgaataaggatcgaaata

SEQ ID NO: 387492 - DNA, 828 bp, Cannabis indica
attttaattaatactcatcatggtaataaacttatgagattacttgagaaattacttttttttagaaaatatacataattgttatcgggattttttttatactctatgttaacattttattgtctagatttaagagatatttctttatttttttatgagttatttttcttataaagaggtcaatcaattgatttgcatgctttacatttttcactatgaaataagtttttggaatggaaatgatatcccattgttgtatttttttcatttcaattttcttgtgtttaatttgaattactatcaatttttatatgaaaaaataaattaagtaagatatatactaacacatctctattttttttgagaaaaaaattattattaaattagataaaatccattacatcatcatatatatggctaaaaaagtagaattaacacatccctatttctagctacttattctttttattgcttttgcaattagaataacttaagagttaatctaattttagccattataaatttacaaagcaagtatatattcatcatcatgatgagttaagaataattattagaacttattactttagaattttctttttatttttatttttttttaacaaactttatataatgaatatttcattaatatagtttgtaaacccaacaaattaatgtataatttattttatttcatcttttaacttatttgaataaatttattggtacacttcacattgatggaatattagtgttcaaactatatatataattgatagctcatgtaaatttatttatttatttatttattatttttatatatatata

SEQ ID NO: 387493 - DNA, 887 bp, Cannabis indica
attcgaatattatttttatgtctcccagttgttcatgtgtcaccatttcatcatatttgtgcctcaaaagatatcccatttttgggttgttttgcgttatttagttttgttgtgtattcctcagttaaatttattttaagtataaacattttcttactattgaagttaaaggctttcgtgacggtattttaatgaattgatagtcaaatcgacatatttattttggacatatattggatggatcactttcttagatttagttttgaggtttgttcatatatgggtattcatcttttacatatatgttgtgttaattctatttacaacatcaaaattttgaaatgtataagaaaaataataccaataaggaccaatttttcaatatatgcaaagtttaaggacttagattatggtttgccaatatacgtaaagtttagagatcatgaaaaaactaattaaatattgcgccggtaaaaaaatatttttatcaatacattaccttaacgcaaagtgttttgaatatttgccaaagccaaaaaaatgacttttgttagaagaaaagcgctaacaaaagtttcgatattttagtgtaccgaaaacaaaaaattaacattcgcaaagtttcaacattgcttttaagtactttcccttctaagttttcttgttcatatttatgtgttaaataaaatcctactgcctttatttgatataagttgatgtatctatttagctacttatgaagaatatatatcataaacatcttaaataaacatcattataggtttgaaataaggcataatcccatgattaataagaattttgataggttgataatgttatataaattaacaattaacccaagatctatttgtatataacatggaaca

SEQ ID NO: 387494 - DNA, 1416 bp, Cannabis indica
ctggaaaaacgccacacctgcagcagttcttatgtatttcattttcaggttgaaagagtattataggtgaaaaaatggactacttaaactttacatttttctttgcagattttatcacttttgctagaaaggtattataggtgaaacacacacattttttgtagtgtttatatatttatcttggaattattatttagcttttttgaactattgtttatataaggaagaatatttttagcaaattatggtaagattagtcaactaattaaatgagattacaaacataatcacagatattacaacagttattcttcaagcaactatttataaagtacaaactccatccaaagcttctcttgaatcataccttaactcccacaaaatactccattgactctcaaacactcttaagaatacatataaaattgtgtcaactcaaatgaatcaaccttccaaatgaaattaatgagacttgtataatgccacaaaactcccaacttataagcaattgataaattttgagaattatgccttttgctaactttgaaagtaattttagggtgaaatgcaatctgatcctagagctaaaaagaaaatgagaagagagattgaagctttgaagaaacctccaacaatttttatttttattgtttagtttattcaatgttatcattaatttttcaaaactcaaattgatttagagtgcataattattaaatataattttttttaaaaaaaacaaaaaaaaaaaatattagagagagatttcatatagagatgacaatataatctaaggttacaggtacccatagttattcgatctgaatagtgagggaaataactgtttaaatgggaaaaattgtaccacacatacacgagtatagtattagcatacaccgccccgtatctacccagatgtatacatatatattgaatttttttttattaatttattctatttaaatgttaccatattatatttatagtttatattgtgagaatttcatcaatgtcttattgtttgtatttttttttttaatgttatgatatgtttatcttaatatttttgaataaataaatgcatatacatgattggattttgagtttggaaagcatttagaattgttttttgatgcaagaatttagaatgttgtttaattccattttatcaaaattaaaataaattaatgaatttttttcagaaaattgcaactattaacggttacggttatgggtagacatggttttctcctgataatttactggttaatacatgtactatcatcaataattagtggggtggatatggttatataattaatctacggggatgggaataataatttaaaaattgtccttaacattagcatacatttgaactagaaacttgcttttttatttgagcaatatataata

SEQ ID NO: 387495 - DNA, 2131 bp, Cannabis indica
taagttgtttatcatttgattagacacccaacaaaattttgagaacaaattaacctttttgatttgttctaaaatatgatttttttttttaaatgatcattaatgtaatcaagaaaccattaaaatttaccaaagtataaatccggcatcctctatttatacatatatacctcaattctatacagcgaattacagtctcactctcacttgtatattggaaaaacatacccaaaaaatataagaaaaaatctttgtataagttgatgataattttaactataaatcactatagcataacacgagcaatttgattaaatctcccttgctcaatttgcctggaaaatttaatttcttcagcacatcttaatgtcttctcaatatggtaacctccgccaaagctaacttctctttccaaatggcagcaatagctttcaaaaacacttagattcacatgaaacttgaaccccatcaagaacaaaaattcaacctctaacttattcaactcattagtgcttagtcccccaactcttgcaaagtaagagttcctataattcctgcataaataatcaaactcaataacattcgaaaactaaatgataaataatcaaatgtttcgaggaaatgtagaaatatgtacttacatgtcttcgacatacttagaagccaccataattgtagtaatgagaagcctatgtacatttcgagcattaattcgaaacccaggattggtctggcaaaaacgatcaatataaacataggcaacgacatacacagagggccctgctcttgtgtatctgaaaattctttctaaataggactgaatggtcatatctggagtctcatggcaatcaaagattcgagtcctcatatctgatccactagacaaactccatttcttcctactactactacaaccactcccactcttggagatgatcctttggtttcgtgccatacttctttctataagagaagccaacacattaaccactaatgggatattggaatcatcttggtacgaatacgaatacaaatcggatcgaagctttctaggcgatattatcacactattgcagctagaagaagtagtagtcattgtgttttaatgagcactgaatttgcaaaaatagtggggtgggagaggtagctacagatcaatagggagaaaacaaaatagttaaaacctaaacgggtttggtgtggtaagagattttgaagtagaggatgatatatatacagagttggaatgagtagtgctgtgtgtagatgattgaataaagaaagtaggaagcattagacatcggtttgggacatttggaaggtgagtggaaagaagaaatgaaatgattttcaaagatatctaagatatgtgtgcctcctattttgtacaactcaaagtacagacaaacagctaagctttcttatttaattgtttcttatatttaactttaaaggaaaataaataaatataaaaatctcgccgacagtgggtttgaagggcaaaagggtatgggagaagtggaagcattcatagctggtaggtcttcgcttcggtacaaatatataggtacatatattatttggaattggaagcattgaagaattctatatcggtgtatccaaacaccagtgctaggcgactcctgcctcgagatttgttttgtgtggaaatctaaaaatgaaacttctactaatcacacgtgcaatggcatgggaaggaccttttatcaaacatatattgtattatgagaaagagaaatgctaaaagttgctgatggtgcctagcacacatttatatgtcaatagttttattggtataattatatataaggttctttataatttaatacaatagctcttaggagatataatccacatattatttttttattatttttttttaaatttacagtttgagttgctccatgtaagttgttatgtagattttgattgcgatttagttgctctgtgagttgttatgggagtttttatgtagagaattaaattttggggctctcaaaaaatcaaaataaaagtattatgggattagaacccatgacattggacattatgttatccaccttaaccaactaagctatgaatatttgttgcttataatacacttaaattt

SEQ ID NO: 387496 - DNA, 973 bp, Cannabis indica
gaacaatataacatatatatatatatatatacatatatatatatatatctatcaacagagaccacccaaattccatccccccatttcctgccattcttctaataattaacctctaatttatatataaatatcaaaatcaaagaaagacatgatataattatatatacttcaaacgacagaaagacaagatataatatattatcgagtaataatacaaaagttaattgttaccatggacatggagttatttgatcagttattaatataaattcataaacataatgtaatttaataattttaattaatgaaaattaaaggtaatagtagtagtagtagtagtagtaggaagggggtccaataatgagagggacagtactttgcaaattattaatggtgttggtttggtatactgttgttggcttaattaataatttgctgcctcatttatatttcattaccctacctactagctactactactacactacatatacatcattaatattatcatccatatattattatatataatcattcatatttctctacctctcttctccccaatattcatcatatatgtatatgcattgccctttcatgatgtttaatttaataatcaatacatatatattagctaatttgacacaatgacataatataaaatcctgcatataattaatatatatagatagctcccttcattcaatctaaatgtgttccaatatcatatccatatatatatatataattaagttggagttaccatcaattgtaataatttagttattcgttataccatgtcggtacgactttaattttttataaatatataaaaacaatttaatatatattatctttttctacaattaatttcgactacgaattaattgacatcaatttggcatgatgtagttgactttcaacctatatacacgtgtcataacctcatcattaattaataggagtactactc

SEQ ID NO: 387497 - DNA, 1531 bp, Cannabis indica
ttcccagctcatttggggggcatggtacgcccgattgctgacagctgcaacttcttacgtctctttgccaaagctatttagcccaaatgtacacatgcaaccagaagcaagaaacgttttcaactaagtctcccaaagagaaacgcgcttgaattctttcctcagaggctaaactcaagcatgaattgagagataagatgcgtattcgaccaaaattcttgaaaaagaaaagaaaagaaataatacgccagaattccttcttacacatctctgtggacttcacataagtttagcccttcaggttgcataaattggctaaaatgttaggctgacaaggaccaaagtaagaaaaatgccttagtctatggcagttgcggacattactcctatgactcaacctcgtgaaagaactaaagcctgaagaagatgtgtaaaaaagaaaaggcttctctatcgcgaaaggaaaccatctccgggctaacctcaaccgagtgattttttctaagaaacagtttgagcggtgggccaagaagtgttatagctctaggaacggaatggtaaaaccaaaaaatcttccttggaccttaagagatgatcaagactaataggaaaaggttgaaaactggccgttggaaccagctgtttcgatgacacaaccagcccctatgaagtctatcaaaacaagtctctagagaaaaatggtgaagaaaatcatatttatcattacaatagcccctgtggcagggaaaaattataattgtctctgcaattgaaaaagtgtagcaaaatgggggcatatacaaaaaaaacaatagcaataataattaagaaggcctgccggagttcacgactgggcgccgcctaatcgagtggaagagcctgctccagacatccgttccatggtctccctgtaaaaatcatgtacagctctcatactctgtatgagatgggcctgatgagcattctcctcctccagttgctagttctcctgctgcaggcccccaaattgaaacatggccttagtaagctcagcccaaagggtctcattggtggcatgcaggtcgcagttggccactttgacttgctctagctctgttgccagcacgccaacctccttagcagccttctctaccagtagggccacctgtcagaataggtcaagtcagagatgccaaagtatcagaataaggagcggaatataaaaagaaaaagaaaggtggaagaaaagtgcttcaagcccttaccccaactgcctgctgcttggcagagtgggtcagcccgagaacatccatgctgctacaggaagcctaggtctccatgggtagctccgaggcgctcctagccacttggtccaaaagctcatcggcgaagggggcggcctctctccccaccttgtatgtcagccacttctcaaaggccttaacttccacagtcggccctacaggaggaaaagcgtgtagactgtccaagatttctgccttgtagatgttggaagttattttaccaggaacttagatctactcacaagtat

SEQ ID NO: 387498 - DNA, 1109 bp, Cannabis indica
agaatgttatttagatgttcgatttgtggtttgttgttagtttttattgtatagtttttgtgttgaatcgttgttcttctaaaaattttgtatagtttatggtttctaaggtttttttttattaatccggatacgttaggggtataattgtttgttcagtttagaggttagggtgatgtgtcgatgtttttcgatagttgtacatagcagtttgattgtttgttcatgttagaggttaaggttttgggtttgatgttgtctaatggctgtacgatagttgtcttattgtttgtttagtttagaggttagatttatgtgtctgatataggtcgatggtatgtctaatttgggtacgataggatattgttttaaatattattctttgagtacgatttacagctcgattgtattcgatattttttcgatattacacatgatcaaaaattattttagcctttttgttgtgttttgtttttgttttgtttttttcaatggagtaaaaaatttgacattcgggattgataagaacacaacctactcacaactggttgagcatttgtacgatgagctcatggttgacaaagtgcaataatacttgatgttagatgtgaattacaagtacatgaaatggttaatgtatcagcctgaagttataagtaatgataagtgtctaagtttatatttgtcaatgctttagccaggcaaatttgttcccctttttgtcattttggtgaaaaagaatgtctgtatcgatcctaatcctccaccaagtattactaaagatactcgtagtgaggttgggacttatgttccaaaaacaaatctattggtagccgatgtgttacctaaattaaatactatggtgccgacagtcaatattgtagcataaatgcctttttatgatgagtttggtgatggtctaaatcctgaaggttcttttgatggcaacgatgatgtaagaaacaaccaagagatcgatagaggtcatcgttaactcaatggtgaaagtataatgtagatccaatttaaatttgtgcacaacttttttgtaacaacctactagtttaggcgtgttaacgtaattttaacttaactgtgcagctcgttgc

SEQ ID NO: 387499 - DNA, 1282 bp, Cannabis indica
atggtgaatctatgtggatttatcgaagatagtgtcaccagtcaaggagttattgaactcccgttgactgtgggcgcaccaccattatccacaactgtgatgcaagatttcttagttgttgacttaccatcggcctataacatattgttgggtcgacctgcactaattggcctagcggcagttagttcaattaaacacctatctttgaagtttcagacaccaacatgtgtaggtgtagtgcaaggtgaccaactactggctcgtgaatgttatcgcatagagctacaaaataagaaggccgaccatctattaatggcagtcataatgaaggaaggcgagaaataggatgaagatctaaatccccgagttcaagatgaaaagaatcaattgaaaccaattaaggaattggaggaggttattttagatccaaaaaatcccacaaagtgtgtattcattgggaaaaatttggatgagaaactaaaataacagctaataagttttctgaaggcaaaccaggatcagtttgcctggagccatttagatatgatagggattgaccctaaatttatttgccaccacttgaatatcgatcctaattacccagcgaaaaggcaaaaaaggtgacccctggactctaaaagactaggggaactcaaagaagaagtggacaagttgctgaccaatgattttatacgcgaggcattctacccctcgtggatatctaatcctgtccttgtcccaaaaccaaatggtacttggagaacttgtatcgacttttcagatttaaacaaagcatgtctaaaggattgcttctcactaccaaggatcgaccagttgatggatgcaacagctggacacaagctaatgacattcatggatgcatattctggatataacgagatcaaaatgcatgtccctgatcaagagcatacaagtttcgtaaccgacataggactttattgttataaagtcatgccttttggtttgaagaatgcttgggcaacgtatcaacgactagtaaatgaaatatttgaaaagaaaataagaaggaatatggaattatatatcgatgatttgttggtaaagtcattaaaaagtgaagatcatacacaggacctcgtggagtgctttgaaacactcagagagtacaacatgaaactcaacacaaaaaagtgttccttcggagtctcctcgaggaagtttttgggattcatagtcaacacgaggggcattgaagcaaatcctgagaaaatattaaggctttgatagaaatgccatcgcc

SEQ ID NO: 387500 - DNA, 588 bp, Cannabis indica
agggagggatgggaaaaagggaagtgaagtgatagttggaatgtttttccatcaaatttgagcttagagagttaagagcaagtgaaatgatagttgagaaaatttagccgtaaaaaattctatattttataactttatataattatataataaatttttataaataatcatataaaaattattagcatcattacttaaatatttacttatgaatctcaaatttctatatcacactctatatataaattaatatataatcttaattttttatcttttaataattttaattatagaattataatattcagtattatatttaagttttataattatcattttaacttgataaattcatatcttaataataaaggctcatcctccatcaccatcttcttctgaatttgagcccgaagaagaagaatctgagtccgaaactgatgagtctgatgaatcttttcttgctcctgcagatcctgaatcagaatctggtgaaacggagtctgaagatattactgcccctggtccagaaacagtgtctgcccctgcaccagtcacttcaccattgtcctcaaagggtaaaggcaagaa

SEQ ID NO: 387501 - DNA, 1802 bp, Cannabis indica
tgttcgaatgtgtttttgatattatatacaatttattataacaattgcaataaaaaaaacagagtaacaatattattgaatgaatgaattggctacaatggcattggaatatctatacacagagtacgagaaaccaacctaactgtctatctgaattaactaaccacctttaactgttttaacaggccccctcaagatgaagtgtaagaatttttgatactcatcttggaaactaaaatatgaaatgtgctggaaaaagagattttgtaaagatgttagctatgttggacttggaggagacatggttggtcttgatctttccattgttgatcttttcacgaatgagatgacaatctatttctacgtgtttggtacgttcgtgataaactggattttcaaaaatatgaagagttgtactgttgtcacagaagagtgttgaagggagtttgatgttgatgttgaagtcgtgtatgatgaagtgtagccatgttagttcgcaggtgccattagccattgctctgtattcggtttcagctaatgaatgtgagacagtgtgctgcttctttgatttccaagagatcagagaattgccaaggaagatgcaatatcctgagatggagcgctgagtgtccaaacaggctccctaatctttgtctgcaaaggcttggagatggagtggtgctggtgcagaggcatggaagaataaaccttgcccaagggtgccttttaggtactggaggattctgttagctgcatggaagtggggttctcgaggtgtgtgaagatattgactcaacttgttgacagcaaatgagatgtcaggtatggtgattgttaaatagatgagtttcttgatgagacttctgtattgagtggggttttgaagctgttttcctgtctcattattgagctttatgttgggttccatgggagtggaaacaggtttagtaccaaggtgaccagtatcttttaaaagttgtatggtgaaaggtctttgggagactgagattcccttgttgcagcgtgcaatttcaaggccaaggaagaaatgcagggtgccaaggtcttttagtttgagttgagcatcaagagttgcaacaaaatcttttagagcagcactgttgttggtggcaactattatgtcatcgacatatataaataatgccttgaatgtccctgcctagtgttttaggaagagtgagttgtcattttttaactgtatgaactcttgttgaagaagtgtgctaatgagttttgcataccattttctggatgcttatttcaatccgtacaaacttttctttaatttgcatacatcattagggggtatgacacccttaggagtgtagccttggggaaacttcatgtagatatttacatttaaatcaccatgtaagaaggcattgtttatatccatatgctggagatgccattgtttgattgcagcaaggaaaataggagtttgagggtgttgaattttgcaacaggggcataggtgtcaaagtagtcgacaccttgttcctgagtgtaaccctttgcaaccaagagagatttgcacctttcaacagaaccatttgagttatatttaatcttgtaaacccatttgttaccaatggtatgttgtcctgagggtaatgggacaacaatccaagtttcattggcttctagagcatcgatctcactatccgttccactatttgacactttagatttgcatgcttgtgcaaaagtggttggttcgatgaaatatagctctctataaagataaaaaacatgaatcaagtaggcagatctctaatgag

SEQ ID NO: 387502 - DNA, 592 bp, Cannabis indica
cattttgaatcgggcggcatatttgtattctggtttttatagttttaccaaacagaaacttatataaaggaacaagcattcatatcatatactagagaataatatgatatgaacagaacatttgtataatattatccagatgttatagttgtctttgattctttttcttgtcattttattcatgttttcgcttctattcattgctattttagaactcgtgcagcggcttactgaaaacgacctcgttttggatcgccttctcgttgtaatttgagttcttccgagtgctctggacttttcttataaatctaaattagtgttactttaagcagaagccatggatgaaagcttgcaacttttaatatgaaaataaacaagtcaataattagaaggtaagtgagtggtgtcagaataagatataaataccatatgaaatttgggagcaaattctgtctcaataggtgttctgttggaacatttgttatgaattatggtttgagatttaaaaattgtgttttctaaaagagtgttttggaaacaaaaatatgaattttgcatatgaaaaattgtttttaaaaatgtgattggttgt

SEQ ID NO: 387503 - DNA, 1517 bp, Cannabis indica
gactcccataaaattcaaaatccaagtaataacggtaagccattgttcggctttcataacatctggacctcccagaaggactggaggtgcctacttatggaacctttcatacaatggttccatccagttcacaactgcaaccggccctgcctgcaaaataggggcataagccatttagaccacaagagcaggtattgcaggagcaccatgctacctcaaacatttgatatctttgtcttgttcattaattctggcttgcattgttacaaacctgttttcccaatcctgggcagcctgcggtgagttaacatttcccggactgggtgcccggcctcttcggcctctacctcggccataaatttttgagggaaactaaactccatgactgccactagatccaaccgaattaccttggcttctcgtgttcttcttggcatccaatctaataaaacagccaccaaaacgaagaactaacctagttagatcatgatcaagaataaatcactaattaccccttacttaagaaattaaaacatgcacctattaagctattaggctagtaacatgcttcctatcaggtttttcttataacattctaataaaacaaactactaaagcaataaaggcttactaaactgtgagtcgagcttatctctgttgatgattaaacatgtcgtgacgatgttcagaagacaacgtggcagctttgataccaaattgtaacaccctactagtttaggcgtgttatcgtgattttatattaactgtgcaatccgttgctaatcaacgggttagttgaaaatcatggttaattaaatctttatttaattactcttatattgaaagtaaataacttttacataagttgggatttcgtattaaaatatttataattgtaatataaaacattcgatacaaaagttgccgcctagagactattcaaaatatagcctgttttcccaaagatcgtacgctccaggtctaattgcctcgacatgtacaatcttcatctgctcacactcagtgttgttcagccttagattttcccttacctacacgtggaaatattaactatgagtcaatggaatcaatctaaaaagcataaacataacataaatgtaaaccagataacaattaggtccccatacacccaattataaccctatccccacgtcccatgctatactaagtctagaacgttcatacgacaatactattgaccataatatcaacctatactcggtactctaattgtaccaatgtgatagcatcaatcagtacttatgccaaacatatattaattagtatccagtataaccctgtgtatacagatactgctattctaatgtaatctaacaagcaatcataaatatgtatactaaatgtgtaatcacatatgcatatcattacactaatcttacctcgattctgaattcaggtgtgatggtcaacctgagtggaactactgctagacgatttataggcccctaaatcataatattcgtaaaactgatgag

SEQ ID NO: 387504 - DNA, 918 bp, Cannabis indica
tggaataggcgacaagagatgcaggaagagcatgcattaaagcaacatcatcaataccagaggggagatatcactggaaggctccacctggacaccaacagttgttgaaacctcctgaacatttgcaataaccttctccccgtggacatcagcaataatggtatcctcctgaacacttacagaaactttcccccttggacaccttcaagaacttgctcctcttaaacaacaacacaagtactaggacattgattgacaaccatagaagaaggttgaacaccagaaacaaggatagaaggcctagggacgacagcagcagatggatctgcatccaaattagatgtagagaacactggtgaatgcacagagaaggcaccgtcaccatatgaaaagctcaaaaaatcaccaccagtgggaacagaaggaccaacctcaaaagaatttaaaacctcaatcatagcagaccaaacatcaattaaaaccttctcaaaccgacgttgtctaagctaatcacatgcataagattcagcaaaagtattcacctaggaaaacatctgacctttccaagtagcaggattgaacccttccagaggtgctgaaggagcagtcgaggattatgggacattagaggctaaagcctcactaatagcaagaacatccataaccgataagggtaaaggcttgccaaaaacaagagagaaagatttgccaagggtaggaacatgcaaaatcttgtcttgatcaaacacaacaagaaaccccctttgcaccacacgattaatcagacttggataatgtaacgcccttacttacgtaaaataagatgccataaataaactggcgttaagatactaatgttgcctttatttttttttaaaaaaaaaaacacttttcaaaacatgggtacccagttgaaaa

SEQ ID NO: 387505 - DNA, 2710 bp, Cannabis indica
tcagttgtgaataaagtaatcatctctttcgacaagtaattataaaacatgaccccttaaaattatttaaggggcatatatgtatgattaaccagaatttatctagaaatacatgatataatacaaacccaccactttaaaaataattttttttgaattttataaaggtttttgaccaaacctttttggcaaaaaaggggtcaaactgttataacttcctgactaaacctttttgacgagaaaggggtcgaatcgttataacttcctcatcaaatctttctgatgagaaagggatcaaacaactataatttttgattaaaaacctatctgacgggaaagggaaatcaaaagttataaatgagatataactcataactcgcgtgaagctgaatactaaaagctcgcagtaaaggaaagtattaaacgagacatcaaggtgtcttgggaaaagtacttaaacctaacacatggataaagaattcaactatccgtgtaagcaactaaaatatatatacaaatttcaaggtcattgaaactatattcaagtatgcttgaaacagatcataactgactagtgcgaggcagaatcaatgactgctcgcgaattgagaacatggctgatgacgaacaactcgtgtgtaaattaggccattaactactcaacgcaaaagagatatgtgagcgatggaaacccctaaaataatttgtgcatgatcaaaatatgcttgtttaatttgtgaatgaaacacaagcatacgactccatattgaagttcaaacataaaagtacgaggcatcaaaagataaaataaaaagtaaagttggccatccaacttcgcaaatttgtctttaaaatggtaccgcaaggggcaaaccattgtctcggtcctaaggccattaccacaaaaaaaaaaataaaacgatgatgaagaaagagatatataaaaaccaagcctacatagtaggagacttggatgtatcttcttctaccattgcttcggcctcttcctcctccatcccgaccttcttgcaataagccaaaacttccttctcgtcttcctccaagaagcttgtgaccatgttaggatttgccatcaaggctcgataaacggtacgaaggccgacgttgttgcatcgctttacggtttcgacctctttcccttcgagttccacctcattccctttaagttcgacctctttctctgcgagtgccttcttaagttcgttgcactcgtcaatcttggtctttgtggccttctcgcctttttcaagacttttcttcaacttctcagcttcctgtttgagacggatattctcctgctgagtgtcgttccattggtgagtcaagacctcgcgttgagctagtgattttcagacctcaccctctaggtatttgagccgcttcaggatttatgatgggaggtaaaagaaaggaaagaagcctggagaattacaagcaaatgaatataaaaaagagggaaaggaaaaataatacaacaaacttaccatgagggtatggtgcaagttcctcgaaagcgtatcttctggattcccgagattaattagatcccaaacaactaggcaaattcagaaccagccttccctgctgtggccaacaaagcttcaatggcctagctcgaggaggcagaggcatgagttatttcaggaggaggtgctttggtgttgggatcaaccggaggaggagcccattcatgggtctcagattcagagatctcgaggttgatgggctcggacactatcttctttttgtaggtagtggttttctttggccttttataaggcaccacctcgtcctctgcaggggcccctgagtcagctacccttttcttccctttccgatccatgacatcctcgaaacgcatgtctgcaaggcaaaaggaattgttacaattattgaaaggcaaatgaaaaggaaaagaggagtacgattttccacctaaggaatttaccaaagccattagaaggcaagctatcactaaaagaaggggtagaaagaccgtagtatccactaaaatccatacaacctgtagtcttgaatatatcaaagggttcgattggctctaaatcccagctcacatctatatggcttgccctatctgttatggtaccatattgctcggctataccataatatgacttgttacagtaatgtggacgtggaatctagggtaccagctatcaaatctatgagcaatacaatctatgagaagggaattccaaatataaaaattaaggcggctatctttgaaggtaactaatgtgttacgatcagccctaaatattgtgggtgaccaaccgcgttgattatctcgggatgctccttcaccggcttcccaagggtatgtgttttgaaggtatagtgctcaagccatgcgatctcaggctttatcctccttcagaatgggaacctgttgccaagaagaatacttgggaaatttataattacaagtgtactccttgtcaataagaaggcgcacggatctcagattggcctcgtttagaagaaagtcacacgacctaaggccatgaggaagggtcagcaggagcttgtaccggttgaccatcccgggagtagggacgggtcttttgagagggctataaaaaagaaaaaccttggtcacaaaacatagaatggaaagacatggaacaatataaccgagcctaaagaaaacaatcacttacgtattttt

SEQ ID NO: 387506 - DNA, 678 bp, Cannabis indica
atttatattaaagcagccgccaccagccgccggcgccggcaagtcttaatgggctcaacaaatctcattctcaccaagttggcaatattatatatattgtgtttgtgtgtttatataatgaataatagtaattaattcaactttatattttccttttaattagctttttatttcatagctagatcttctttttttgactttttaatattcagcaaaatgctaaaaggaaaagcaaaaaatgtaccttttttttgaatttaatattggagacaagatcaactgcagacaatttcttttgcaggggaagaattacatgcaacccactttgtatattattattatttagttaatttaatatataagtatgtggttaagttaatgaacttgtaaggaaaaggtgaagattagctacttgctagttggagggttctatcattgaccaaatagaaattgacacttcattttatttaagttaattattatttttacctcttgaattttgatatgtactaaattatgtcttctaaacttttctaaccgttaaaaattattcctttgaactattaagattgttagatttaatgacttttatctaatgtcatttaatttaactaattcggtgatgactaaattatgttttttaaaatttttaatatctaccaaatcatgtccctcaaa

SEQ ID NO: 387507 - DNA, 2187 bp, Cannabis indica
agaaataagaccatttgtttgcatttccctacaaataatataacagcattactatagtaaaattgacatgatttcctttttttttttaagtacaccttgcgggaagtagacttaataccgaggtaaatatatataagagctcatatccaatccaaatgccattttacacattgctgattatcatttgattcaaatgcatgcatgcctcaaaaggacaatacaagctataaaaagagaattaaaatatatataaaaaaaaattgaaattatgaaacaaacggagattcaatattgtttcaatccagtttgtttattcgagaaccaatcgttcgaagtaataataataataataaaaaaaaaccttgtaatcttgacatgggaccaaccaaacacaattatgaactatgcctcatctcatcatatcatgatcatgaggatcatgttcttcttctagccatagacgtagcattcccatcaaacagttcatcaataaatgtctcaatgtcttcaggttgatacttaatatacttctctgcttgtcttccggcatccaaatactgcttaaacctccctaagaaagccctgtaagccggtatcataacagccgaaatcgaaacccgaagctcagactgaagctgatcatcactcacaacccaagtggattgtgtcttgtgtatctcatcgaacatggcattgaaactcttgaacctctctttcagtactggcttcgaaaccttaccgttcacctgaagcccctcgtgggctaaacactgtagcactttcccccaagtctcgcgctggtagttcttatggtactgtctcaaatccgaagacctcttccgacaccatgtatctcccatcagttggtgaatctcgtttgaacctttgatcttttgaacaatgtatctcccattgttcatcaagaaaacatagctcaatgatgggtctctgtacagcttcgatttcatctccaaattagagtccaacagatccatcatcgacatcagctgtttcgaaaacggcgtcgtttgggattcccctgtttcatcaccctgggaccaatgatgagcgctctgttcaactggatgatccgcattgtcgtcctcaaccttgtggcattgcttgaaaacctgttccaacgtgtctttatactcacaggcgtattttaggtaattcataacgtaacgagtcaggggatggactgccccacttgggacaggagttcttccattgtcgctcttgattgagttttcaaggtcgcagaagatgctgactgcagcctcccccagccggcttttggccgtagtagcttctgtggtcatttctttagatatctccggcgggtacgattctccgccgattaccggaatgagatcccggagggtctcgtacatgtcgaggaacttgaagagtttctctgcggagcgcttggttagaaccacagcctctgcgaaatcgagaagcttgatgacaaacgcacgagccatgttgctgaagaggctctgggagattgaagggtggtcagagaagacagagtcgctgagcttcatctcgttgggaaagagtacggcggtgcattgcctgacgatcgtgatccacgtggcgatctctccttcgagcgattcccattgcatgcgttgtacgtcgtcgatgctgatgctgtcgtagccgagtttctccagggctgctttgaatgcagatcgcctagagatactataagccatacaacattcggtgtcgtatccggctgagatcatggtgttagcgatcgtgtttagtttcgaaacagtttcttgagagaatccgggaaactcctcctctgaagcctgaccagattgttgttgttgatcagaatcgccacctataacacaacgatcggaatattcatgattgttgttgttgttgaacgaagattgtttcgaagtcttatcctgggatttaggatccgaggaggaggatgatgaatctttattgtcgtttttcgaatcctcaagaagagcacgaaactcttcttctaaaaacgacattgctctctgaagaacagagcttgctctgttcacactaacattgaaaacagggtatttccccaactcgttcgaaagtttggatactcgtctcaacgcatccgaaaacgacgtgtctttctgggtctttgccgaatttgatgagactgctctgtcctcgttc

SEQ ID NO: 387508 - DNA, 1165 bp, Cannabis indica
aatggctagctagacccatgtatggatgcctaaggccagccagccaaatgcaagaaacaccatggccggccagcttatacaatgccaaaaatatgaacaaagctgagaatataactcaccagggaaaggtcccaaagtccaacagagtacagcctgtcaggcacgccgtcacccaactcctgcaatgcttcatccaagaaagggatagacctctctatacgctgagtggctgactcaacagccctcctaccagtaggtgaccctgatcctctactaggcctccatgtaccttgactggtaggctgaattataggctacccagtaggtgcaggccttggtggaggggaaggcagtgatggtccactagcatctacactacgagaggtcctggccaccttggccctcactcgactggtaggctcatcttaaggcccacttgcgagacctctcatccagaaagacatggttgcaaaaagaatgtagcaaagttagaatgcattcaaaaatattcaacacaagaataaaagcatggtgttataaactatcaaataccattgtcatcagaagaagagctaccaaagctcacaactacaatttttcccttgcccctaggtgtaggcacagggtcgtgtacatctatcaaaaactgggccttaaggctcgatacgaagagaggtgtcaccaattagacccccacagggcaggcacctacagtgagccctcttctcctctccaaattttgtacaatacgagacaatggtacatcatcgtcatccatgtccaggcgttgcccatctctagggtaggcctcattagtagttgtcatccttgcaactctaagagtaggaggatataagccatacatccagaacttgtccacactagtaaagcgaataatgttcctctgctcagctgacaaagaaaggatgtgattcgctctatcccttatttgtaatgtggggatggaacatttgaagaatggtactttctagaagcttcaatgacggatccctttaacatcacaagcaatgaagtaattgttgccgtgctcatcagcatttggcatagatgaggtttggaatcatctaaccactgatggccaacctggctaaaatagaagtactgagactgatgttgcttcaaagtaaatgttgggttttgtgcc

SEQ ID NO: 387509 - DNA, 1042 bp, Cannabis indica
gcgtgttgtccacgtactagaactaacgtcgggttgagttatccaaggacgtgtggtccgagcacggggccaccctcaggtttagccctcctggaatgggtggtccttttggactgcagatcggtgaatcttttggagcccatgggaaatactttacactttattttctttccaacaaagtaaacatgccacaagagaaggagaagactgaaggaatcgagacttactaaattgatatgttattacagtgtaatttttcaatgtgaacatactatctattcaatattttaaagaactattttttcatgattggaacattatattttattacatactctcttgttttgactaaaaaatgtatttagagtgtgtacccaatattcatctctcttttaaatcttgtcattgttctctccaaatatttctttcctccctcttttgtgatttacaaacatagagttaacatatttattcaaaaatttaccttcaaacaaaataataataatagaaattattattaatttattaattaagttcttatcaatactttaattaataaagttcacaattgaagactagtaatagtacagcaacaccggtcacgacttttacatgagcatgacaaaagaaaaagggatttttttaaaaatatacataaaatacaaaataattacaaaaataacttaacaaatctcaattacaataataccttgccacgtcattaaaaaataccttaattttaaaataatatgcctgaaataaaactaatcccgaattttttttttttttattttcctgcgttttaaaagtaacattttggttacttatgatgttgataataaaccaataggtaactttttcataaaaatgtatcacttctctatattatatcatttgagatacattttggttacctctaaaatttatatgtatgtactttaataataaattaattatttaagttatattaatcatttgagtaacttttaaatttatttttaaaataataaattgtcatccaataagctaccattttagtaaa

SEQ ID NO: 387510 - DNA, 3314 bp, Cannabis indica
taccttggaaataagggatagagcaaataatatcctttcgttgtcggttgaaaggagaaatattatccggttgaccattgtggaaaactttcggatgcatggcttgtatcccattgttcttatggttgtgagaatactagctgctggtgtggctttccctagagatgagcaaggccctgacttggatgatgaagaagcacctttgtctcgtattgtacaaaatctagagaggagagagagggctatccataggcaactgacccatgggggtcaagttggtgacgcccctcttcgtatcaggcctaaaggcccggtttctaatagatgcctatatctaggggcaagggcaaagctctagttgtgagctctgacagctcttcttctaatgatgacggtattcgatagtttataacaccatgcttttattcttatgttgaatatttttgaatgcattttgactttgctactttctttttccaggcttgtcttctaggctgagaggtctcgcaggtgggccttcaggtgagcctatcggtcaagtgagggccaaggtggccaggacctctcgcagtgcagatgctagtggaccatcactacctccccctccactagggcacgcacctgtcaggtaacttatagtcagcgtgccgggcaaagtattaggaggcccggtagaagagcgtggttagctgctttaagaatgctgttgagttagccactcaacagatagagagggctatcgctttcttggatgaggctttgcaagagttgggcgatggcgtgcctgataggttgtactctgtcagacttcgggacctttctctagtgagttatacttccagctttgttcatctctttgccactgtataaactggtcggccatagtgttatttgcatgtggctggccagccttgggcatccatacagggttctgcccgaccatggtagtccaaagaaggcactgggaggccagaattgactgtttggtactgacattgttttgctttatttttaggccttgattaagttgagttctgctcgcgacggctcgagagggtcttcaaactctttctaggagcgtgtgaaggtcttggaggcatctgttactacaaaggacaaagccagtacctagttggaggtcattctaacagagaagcagagaatggtctctggattagagattatgctgagtggcaggaacaccgagatcaccaacatagctgctctcatctctgagttgcagactgatcttgaggaacacaagaagaaattacaggaggcttttgatggccagcatgacattaaggaatattaccttgatttttcctctgaacttatgtacgagttctgcctgcacaacccaaaagctgagttgtcatacatgggcactccagcctttgtggagagaacactggcccgtgagagggcattgttcaagagtcgaatggagatacaccagactgctgccaatcgagaggggtcatcatcaggtacccgtgatgaggtgttgaccaacccaatagtggaggaggaggtcggacaggatgttgcccaccaggctggccagcacagtgatgatgaggctgacctagactctacaggtctcaacttggcggctcctgatttagctcttgctgcctctgcacacatgtagatggaatttgtattagtattcagcattatgtttgtattgtatagacttttttttcatgttctccatagcctgtggcttttttagggcctgttgcatctcaacttaggatcattactcactttgcatttcatgtggcctactggctttttgaaattgtatgtcctatgtggcatgtagcttttttagaacattatattcatgtcctatgtcgcctgaggcatttttagacacattactttattttcagccccaggattttcatgttcatatctttggccatgagccctctgtttttgaacactacttgtatttgatggattgtgtgaccgaccagacggtctttaatcgtggctatcttcttagggccttgacaagtaagggtctaaatttacttttccaagctaaagtatgcctggacgacttagaggcagatttagtaacttatactaagcgttaaaatttctctacataagttctttgtactagtttgatacattttacagtatgggttccccccaagtgaccatacataactttgaaaagttgatcagtgagtaagtggttcatagacacaataaacagaatatataaatatgcaattattcattaattggtctttgttgttgtgcaacttacataaattgaattacaagcctatattacacaaatttagcttctagatatcaagtggctacccctactcacctacagatgcagaggccagtattgaagaatagtgggagaccacgcccaagaagggtcgtgggtgctagcgcttgttgtactctaatgtttagtagatagaattgctacattggagtagagttctgtaagctagttattagtagtatttgcagaggtcctctccattccaatatcttggtaagagaacgaggtccatgttctcgttgtaccttcccagcttgtaggctcccttactagttatttctgtaacttgataagggccttcccaattatgtcaaaacactcctactgctgagtctttagtgtttaggaaaactcttcagagcactcctatgaagaattttctactcttgacgtgtttgttgaagtgccttgctaccttttgctgataggcctacagctttaggatacttgttttcttctttcttctacttcgttaagggactctgccagcaggtggttgtttgtttgttggtcataggttattcttttgtgagacagtggcactagctctacgggcaacatcgccttttagccctaagctagagcgaatggagtttgcccagtggtcgtcttctaggttgtcctatgcaaccatatgacatatagcagcagttcacgccagcttccttttgcttcctcaaggcgcttcttcaaggtgtccttgagggttttattgacagcttttacctgcctatttgcttgtggatgggccacaacagagaagcttttgatgatgtcatgtctgttgtagagatcagtgaacatgtcaatgttgaaatgtttgtcgttgtctgacacagtcttctggggaaggtcaaaccggcatatgatgttcttgataacaaagtcaaggaccttctggatgtgattgttgccaggggttcagcttgtccatttggtgaagaactctactccgacgacaacaaactgtacccctcctttaccctttggg

SEQ ID NO: 387511 - DNA, 1693 bp, Cannabis indica
ttaggcctcatataccttaggactggtcctaccgataacgattgttgattgaaccaaatccgattgaaagagttgattttgagtgagtggatctctgattgttctaagtgtgtgtgtctttttgaagctgttttttgcccctcttttcttttgttgcaactgaacaatgagtaaggtgatgatgatgaaatattgttaccctgataaatgtattgatcagtgtataaacaaaggtttcatgaattttttttaaaaggtatgaataaaaaagcaaggatacattggaatgattttgataaagtttacttgaatcccttttcagcaagaagaagagaatgacatttcagatttttattttagcatttagttagagttttagtttttggattttaatttaattaaaatttgacttttaaatatttattatttaattttaatttaaactaattttattatttaatattttaaattaatttatagataaaaaataaaatatttaatgatctcgtctaatgacagagtgacacgtgaacagtgacctaacacttaatgaccaagtattacaaaatttctaggactctaagagtatctccaataggggcaacatttatagttgtcaaaatacacacatcatcctaaaatattattttttgttattttctctctcatccacataaaatttttcatcttttcttaaaataatactctaatggttgacaactctaaaagttgtccaccatgttcccacattaaattaaattaataactttttagataaaaaataactttttctaataataataataataataataataataataataataataataataaaaagaaatatcatgtgatcattgtctatattgagcaacacttcacttcaaattaatctttaaaattggaccacgttacatacgtggcaagatcacttcaatggacaaccccattggagatgctctaacagaaagtatttatacctcaaaaaaatttatttaggtattaatctgtaactcggagttaaacaaatattttcaccataaattactcaaaagaaaactatacttaaagtactaaattaaaaggataattgatgtcacgtaggtggaccaaattgtactgaattattgatgaaatgtactttaaaaaataatttgagtacataattattataaatttaagaacttaggtaatgctgctacaaatatccctaaagttaccatgggagatccttggttatgtcatttttggagaacaatgcattttacttcttaaaaggcttattacccataatgttgcttttggatttgaatgtgttaatgctatggagccacaaacttatggttgaaatgaagctgataatattaaacttgacatatttaaaagcatatgtgatctcgtggagtggagtgactctatttatgtgatattatgaggaaattgaattttcgtgaggattggattatgaagatctttgcttgtacttctactagccaattctattatttgaatggataaagtttttgaactattatgacaaagagcattgctattgggtcttagtggtgcatagtatttctagacatgtcgccttgcgattgactagcgatattccctaaaagttattatatttgtaaagtccttttttagcaagttaggtgacaaaataatttttcctttttatggtaag

SEQ ID NO: 387512 - DNA, 1155 bp, Cannabis indica
tatgttcgtgtaaagattggctttccgatccggagtgagatttttgttggacgatacattccagtggatggtggtaaaaggtgggtgcaattttaaatattataagttaccacttccatgctttaagtgtggctattggggacatgatcaagtagggtgtgacaagacaatggtaatggaggttaatttaacaggcggccaggctccgaaatatggaatatggttaagagaggatgatccggttcccaattgttttgtagctaatgcccaagctttggcccgacaacgtcaagattgtttggatgagcttgctgacaggccaatggcggaggaggatcgacgaaaggagctgagcaggatggcggagggggaagcaagtcaggccacgggttccacgtccgaccggtttcttcggaggcagcagttacaggaagacgtgggtataggagtaagtcgtgggaaggaacttcttggtcaggatgttactaataagtcaaagaatacaatagactttgtaaagggaatgggctttgtgcataatgggccagaatccactaaaagtccacatggcagtaatgttgcacaggatgggtttaattgtgttgggctaaaggattatgggcctagtaatcaacaaaaggttatctctgagactaatgcacagaaacaatgtaatgagaaggtgactaaagagacgggggttcgaagtcgtgggattgaccaggatgaagatatctcagcagctgataatgaaggggagggacgaaagaggaagtgtgggaggaatactattgcttttagtcaaacagagggctgtgtggaagggaaaaagttggtggctgaggcgatggcggggagttttgctccggggaatggtgttgagatttgtggagagaatcaacagaggaagggaagcagaaaacgtgtgtctattaaaaataaagcacgaggcaaggccaagatgggaggagttcattcggatatgcaaattgcggagttgccagcggctccagtggagggtatggtcgaattctcagcgggtctgaccgagccaattgagggagatagaatttctgctaatgattatgaggtaggtgtttctagttctatggatttacctgcttcttgtgttgaattgaaagcggcgagccttga

SEQ ID NO: 387513 - DNA, 636 bp, Cannabis indica
cgcggtctgtttactagtatacctataaatagagacagaatcaagggtaaaaatgacgaccaatttgagagagaaaaaataaaatattattattattgatattattgtattctgtattctaattattattcctatggtatatttcttacaaaaagacttatattttttgctaatgaaaatttgcgttaatagttagaaatagttggatgatagtacattgctactagccaaagggtaagagctttggcttggcatttttaagctttttcattaacttttacttaatagaatcaagtggtagagtcttaaaatttagtattttattcatatatcgtcttgtttataaattgtcattctaatacaatttatattctggtatttattttgtgatgtttcagttagtttttcaatgttacaagctgaaactctagctcttctattgtgttatttgaagacgttataattttattatctaaattttcggcagcagttttgtgatatgttgcttttttacttttgtagctcatgatttggtaaagcatatccttcgattaggcaaggagctatcctaattcgatggcagatgccaacatcgtatattccaatagtgatcttcatcactatgtcaaaaaaaaa

SEQ ID NO: 387514 - DNA, 1103 bp, Cannabis indica
ctccatccatatcagcatcaagacacttgataagatcaaggagagtggactagtaggagggtgttcagtatgagcaaccgtcgaggaaccaacgagagcattggttggcccttaactagatggcctggtcagagcaccacattgatcgggggtagtatttcccttacacccctaattaagagacattgtcgcatacttcatagtgtgaccaacccaaatccaacccaaaagtaccctaaagtacctttgggcaatgttcattctctatgctgagttaggctggcctcaaccttcccctataagatagggtacttctttaattgtaaatttttaccaaaaacagaactgaacaagatacttttactttagtcagattggctatcagtggttgagtgataccaactgcacgcccttatcgaaggtgggagatatgtcaagaactattttattgcttgggacatccagcaagttcatcatcgctgttatcagagagtgccaacctataaacactccattcacacccttctgatgtaggatacatcaaataatattctaacactctcacttgataagaggaatatattgaggctagcctgtatagccaacttctagagatatggtttgtatcccccagtgtttggcgttgcaggggctgagggcctgtcaagaggtccagatggagccctaatgattgaggaggcttgcccaggagatggacgtagtcctgatatggtaaaatatattcccctctccaaaattgcaaggaacttagagagaagagaaaaaaccctaggccaatgcttggcttgtggaggtactgttggggatgcaactttgctcattaagcctggaagccagggttcttccaaacccacttgtgtcttgcctacgtctagaggcaagggcaaggtagctactaactgttgggttttatgccctatataaaactttgtttcaatgtaatccagattattctatatcaataaagtaacagaagtaatttttcattcacttgtgtatgttttggttcacttaatcaattgcttgtctatttgatttataaattcatccaaacccctttcacatacttgaacatgtttatt

SEQ ID NO: 387515 - DNA, 1624 bp, Cannabis indica
ttttcttgaataattgtatggaacgataggatatagaaccttctctactcacaataaaattttcaaaacacaatatgtcctttctcacactatgtttcttatcacagaaccttccattggaacttattttactaagatcttaatttactaataagtatgtttgattatgtacattataatctgacatcttaaaatataaaatttataaaataataaataaacacataaaagaaataggatccttacattatttgtagtagaaattagtgactccttccgttcagccactctaacccttaattctcgtactgtagcagagtatttctaagtgatgaacctggataacttccttatattcgataagcaatagtttatataatcttccacaatgatttgagtaccaccttgaatattttgggttggtactcaactccctaatggaacaaaatttgagatggagaaaaggctacatttttcaaaaataatagaaaaaaaatagagagatttttcttgtcaagtttaggttacaatcacttataataactttggttgacaaagctctcatttcttcttatatatagtcgacccactagtgttagattaggtgagatgggctagaacaaagacaatcgggcctaaaatcaaagcccgccgaatttacatatgtggcccagagactttgagttttcccactttatttaatttaatgaaacagtaagtctttttctaattttttccatttatctaatctaatcatttaaatactaatttttatttaataattattaaataaaattataatttaaatatatttattaattagatccagaaagtatcttaagtaacaaataactcttatttctctttttttcttaaatttgcccaaaattagtgacactcttaaataagacatggtctatttttgaattctaattgacttattaaataaattaattgagtatataaggcaatattatctcttataatgtggggaccatagacctataaaatcaagtcccaataagtagatccgaaattactaagtaaatttcttaacttattaattcctcttgactccacaatagattcagaattacactcttgattacatagaatgctctatatactaaatatagatatgctatgaattcttcattgtttcaatttaaataatcaatgatcctttgtagttattttacaatgagtaagaaaaaaattactatttttcctttgatgtattttatctttaaaatacttagttccttataaatgatattttggtaaactaataaaaatagtgaaataagagctcttccatttatatcatttagctaagctctaaggaaaccatcgtttcacttctaaatagttatagaagctatagattccatatctatgattacgctcccactcaattgcaccgctatgttcctaagatgtacgtatgtgttagtcctatgggtaagctggtagaacaagtcaaagaactcatatagtacaattaagctagagctttatcatctcaggattgagatcaattgacctaagatcaactgaggttggtctggttggaggtaatgaaatagaatagaatgaaaaggaaacaattttcattccatttctt

SEQ ID NO: 387516 - DNA, 2589 bp, Cannabis indica
gggtttttgtagtagtgaactatcctttcgtcaagctttattcgatcttcaataatagaggaatacaagagtcgagctcatcatcaatggtatcttgtaccttacaaatctactcacttaagagaaatgtgatcaaacacatacattctctttaacaaccctcatcactcaatataaatgtaattatcatctaaattcctctctagattgtcacctaaacaagtagtactcaaagccttatataggaaattcaattagagggtagcaaattgaaaataactaactaaagagttgactggacgtacctgcaaaatctaacaggttatcaaatgagactagcaatagaagtataccaagttactaaaattttcaacaaacatatatacttattatttgacatattatatattggatatgtctatggtaggtgttatctgtgtttctgacattggatacgtggaattcaggttagcatttaagacccatcagtgggaccctcagcaaaggtaaagtgggctaagcccacttggataactccttccaggaacgtattctagttctacaattgtaaagcctttttccttcagcgagccgtactcaaaattatgtctgggaccacgagaccggagggacaagacaacacattcccaaaagacccttacagtttccctttttattcctgcgcacaaataaggaaattctagctgccaaatcataacagaattttgtatcaagattaatggagaaacttcctaaagtgaatattatgtaattaacatgcacagattaattgcccacgattagtgcacacgatgtggaccaaattaatcaaaatctaatctgcctaatcaacaaattgtctacttcatgggctggagttcatgagacagcttaagtgtataatttactgtaaactccccaacagaggaaaaaggcaaacttaatgtaattctcaaactactataaatatccctcgaatcctatggattgaactctattgcaaaatttgctcaagaaaattttagaacatatattctttgtattcttgaaggctttttcaagctaaaagaactatcaaataatactaactcatggcctaaggctaattaactctccaaccaagtaagaaactgtttgtctctctttattcattcgcttttgattgtttgttctttatttcttattatttatattctaattttgaaaatctcataaaacattttggtgctttcattgagaactgaagaaagcattggaactagttgtagattacgttcaactaatcatggccctcacctgaaccaagtctggtcatcttttcactggtcttggttcaagagttggagactctagtgacccccaagaggtgactagtcgtcagaatggccaccgggatgaagatcagaattgagatgatcctatcatcgaagccgcaaaatttggagaaagtagatttgtggacgctgaagttaatgttgaggacgtactaaaagatatgcaagaatgtgatcctcaggacaaggttgctaatgacgatgttggagaaaagagcaaacctgatgagtcaaaccctgtggtcatcatgtcaagacagcttaaattggcttaaagcaagctaactcagaaagatcaattcaacgagttaatacttgataaggtgaccagaatggaggctgtaatgtctgccttgactaagatatctcccaacagacaagctcctccaataaatgacgcccctaaaaaagcagtcccaaaggatctggaactttaggcgttcgtaaagacaaaggcaaaggaatcgatgttgaaaaaccaaagaagactcctaccaccaaatagcctaaaaattctaaggctgctgaccaacctcaacagaagaagaatggaaaccatgtcgggttttgtgccctaaataaaacttatttctatataatcagatttactaattaataaaatatcagaaattattttatgttgcatggttcacatgatttctttcatgattatatgtttgatgtataaattatattaaatccagaacatatagtttttcatgattatagtgttgtcaatatagtgaaatataattatgattatatgtttaaagtttaagtcctataatttttcagtacactggatttagactgacatgataatcagcgatagagcttacttacaccttagataagtgttatgtcctttctagggcattggcaaagtatgctaggattggatgtatgaagtatacatcgaactggaccgatattgaatttggataagataatataagcttactattatatctattgcattcaatatcagttaattgatcttaggtcaatagatcttaaacttaatatggttaggtttaatctcaattatgttatttatgttcttagagttgttcgttaaagctcgaacggcctaatacttacatcttgggaacatgatagtataatttagtgggagcgctaatcatagatatgaaatatatagcttctataaattctagaaatgaaacaataatttccttcgtacttggcatagaagagataaatgattgagacctcatttcaataattatattag

SEQ ID NO: 387517 - DNA, 568 bp, Cannabis indica
tatatagtatttgataactagaaatgatgtactttggaaccaaaaagtcccccttgatagaatttttatgattttatttttgatgaactcttgatagaaaaattattgtagatgcaaagaataaatttgttttaaattttatcattttaaaaatgagaaagtgagtattgtagatcaattttggtttgcatatactagtagaaaagtgtaaaaagtgatgtggtcgtaattagtttgtttagagaaataaaattcatcttttttacaaaaaaatatatattataagaattaattgtttatgctcttatctagtttttcaataagagggatgttcgtattgagtttatatttattgatgtttgcaaattcttattaccctactaattttttcacccttattttatagatttaaagctcaaaatattagtaaggtactactaaatttttttacttttagtcacaaacaaaacttagtaactaaaaagtaaaaaagttgtgactaattataaattatcattcctatattgtgactaaaaaagtctcttgctaaaagtattagtcacaaaaa

SEQ ID NO: 387518 - DNA, 7314 bp, Cannabis indica
attaaattagtgattaaattattgtttaatgtaaataattttatattatttaagtatttttattttgttattttaattatttataaataaaaaatatgataaacttttttattatatatttatgatatatacttaattatatatgatatattatttattttataatttaattacttttattatttttttgctacgaattattcttttttattttttattattatatatttttatttcaatttattattatatatttttattttaatttaagtttttttattaaaaaaaataaaatagtccagtctattcttaaaccaaacacggattactttcagtataatccaatcttgtccagtccagtccaatcctttctagtccaatccagtccaatcttgcgtaccaaaccagccctcaaggaaatagacttcactgtgaatggtggtgaaccagttatcagagaaactttaggagttgaaggctacaacccttagcatcccaaattccctcctactgctagtgaggtgcctcctagggagagtaaaggtaaggaggaaactcttgttgaataggcttccaagaccttctttgagtccattcttcttttttatttttaccctttagctttagtgtgttagttggtttttctcgggcgttcttttgatgtggataagccttagtaaaatatgatttaaattttgttttagttgaataagaaattatttacaacttaataaaactttgattctaatattttttatttactttatcagttacgacttcgaagtttaacacttgcacagtagaccatgtcttaagaaactcggttacttggaacaacgtcactgatttcttaaagttatcattaccatgagagcagtcaaaaaagtagaaaaaaaaaaaattgaatgctcgtgtaacatatggctctcttataccatagcataacctatgtgccccccaagtgatcaaagaagtaccttcattggtcacttgccatacgaaatccccataggccaccttgatcattactcttgagtggtgttacatgtgtgggcactcttcatttatctgaggattcatgggtggcagtgtttaactcacttaagaaataacggaagttatctgaagacagacttacaagttttactcaatgcttagagagcattgtcagttctgtgagttatactggcactgatgattagtttactggttgtatgtaagcctttgaagggatggagatgtgagctctatgggtagtgtgacctatttctattttttctatagtgtgataggcccagagtactttgagcaattattcaggccaattccgttttgtttgctccagatgcttctttagcatatccttaagagtttggttgactgcttgcacttgtcctttttttgtggataggcaaccgctgagaaactcttaatgattccatgtctgatgcaaaaattagtaaagcggccattgtcaaattgtgtttcgttgtctaacactatcttctgtgggagttcgaattgacaaatgatgttcttgaccacaaaattaagaatcttatttaatgtgatactggctaaaggcactgctttgacccatttggtgaagtagtccactgccaccacgacatattaagctctgcctttccccttaggcaatgagcctatgaggtcgattacctagatagcaaatgaccagggtgtttgtatacttttgagctcatttggggtagctctaggtaattttgaaaacctctggaatttatcacactttctgatgtattccattacgtcttctatcattgttggccaaaagtatccttatcttaagatcttctttgagaggcttcgctcccagcatgattgccacaaaagccctcatgtacctcgatcatgaggagtttggcttcttcctttgtgacacaccttagaagtggcatttaaaagcttcttccatacattactccatccatgatgatgaagcaagttgcttttctcatcagtctcttaatttttttccagtcagttggaagaataccttattgtaagtactgggcaatcgggatcatccatgatggagtgttatctatcatcaagataggctctgagtcttcattaatgctccgtttggcgaagtattcaatgggaactacactaagagtgtcagaatttttagtgctatccagggtggttagtgagtgtgcattggtgttctgctcatgcgacacttattagatggagtagtgcttaagctgaggtagtatatctttagctttactcaagtatgcaatcatgtttgaccttcaggcttgatactcacctagaatttgattaacaactagttgtgaatccctgtagatctcaagtgatttgaatttaattgctagtggtaatcctagtcctactagaattgcctcatactctgcctagttttggttgtggtgaactcaaacggtaaagcactgtgacttcaaaatccctctggagtcattaagatgagttcagcaccaaaactgttcttgttggaggagccatctacatattatttctaagaaggtctagtgtcctcctgagttgtagccttaggcgtgtggacctggtcttcacatatcatggaattgtcttcatcgaggctattacattctacaatgaagtatgctaatgctaatctttttattactttttgaggctggtaggtgatctcaaactgacctagtttaactgcgcacttgagtaggcaccttgatgctcctagctgcatcagaacttgcctaagtggttggtcagtacgcaccttcactgtgtgagcttggaagtaaggccttagttttctagacgccaagaccaagttgtaggctagcttcttaatgggggggatacctagaatcagccccaataagatgcttgttgatgaagtagacagggtgttgtactccttcttcctcacgcactagagccgcgctggcttcatgctcagttatttcgaagtagatgtatagtttttcaccatctattggcttagataggataggtggcttggcttgatgatgtttgagagcttggaaggtttgcttgcattcatcagtctgtttaaaccccttcttgcttcctttaagtaaactaaagaagggaacacacttgtctgttgatgtggagatgaacctgctaaatgcaacaatttgtcctattaggctttgtacatcttttatctacgatggtgacttcatgtctagtaaggcgttgatcttttttggattcgcttcaatacctcttgagttgacaatgaatctgataaaatttcttgattggacgttgaagccacaatttagagggtcgagcttcattcgatattccagtaggatattaaagcactcctctagatctttgatgtggtcttcagatcttttcgacttaaccagcatatcattgacacagacttccatattatttctaatttggttgtcgaacatatggttgactagtctttgataggttgcacctgaaatcttgagtccgaagggctttactttatagcaataaagccctatgtcaatttagaaactcgtgtgttctttgtttggtgcatgcatgttgatttggttgtagccggaatatgcatccttgaatgtgaggagttaatggccagttgttgcatccactagttgatcaatttctggtagtgggaaactttctattcgatttaggcaccagaataaggttggataccttaaccaagtagaaagcttccctgataaaattattttctcgtagtctttcaacgtagtccttcaacagcttcctggaaagctctttggaaagcaccctgtcaaggagcctatactacaagcgtacaagattaaaattaactttatctatgttgagggcatgacaaatgacttggggatcgatcccgaccatatcctcatgggaccaagcaaagatgtcttgatttctcttgaggcaagacatgatcatctctctcaatacctctatttgttctaatcttgaaaaccttggtcgggtccgatgtgttgagggaagttctctaagttcctcagtcaaaccaattcgtaagttgatttccccaaaatgggggtcaatgttgttaccatcttgggcgcaccttcaagtggccttaggtgccatctccatcttctttgtagtttgatctccagaggtctttgtcgtctctctagcttttgcaggagaggccttgctcgtcccctggtgttataacagcaagggtggtgttgttcatcccctctaaagtcgtaccaatataggaggtcatcttggcaagtgataactattaattatagcactcgcaggcagttccttgatttctaatgagacaactaatactagtcatcgttgggaacttgacagacaagtgttccactaaggagatggctcaaagggcctatagggtaggccttctgagaatcatattatatagagacttcatgtccaccactatgaacgtgggcatgatggtggtctagtttaggacagtaccaactgtgagtggattcttcattttgccacatggaggaatgttggctccagtgaaaccatccatgagttgttcgcattgttccaggtcttctaaagttaaacccatcctcagtagggctttcttcaacaggatgtttaatgatgctctgttgtcgatcattaccgtggccaccatcatattagatatttaacctcaacaactaaaggattattctgagggtaggtaacatgataagggtctaattcttcaaaattgataggttcacattcgtagtgttaagactttcgaggacgttatgctacctctaggactttagctcttggttcatgctgaagtgatcttgcttacctttctaaggccttccttcaattcctaactaagtgagggcctctaatcataatctttaacatgtctacaactagcgtaggctggagcagggcattccctccaactagagcttcaggtcgtacataccattgaagagcagcatgtttctgtttgacgaaaagtctatctcatcccacaattaattacactcattggtgttatgatcgtaattgttatggtaatggtagaatttgttcatgtacctcttccctgattcttttaaaggaaaaggtttgtgatacggcactgttgactgagtggtcgtatatatctcttctcttagagccaaataatctcttaagggcttgtccctagtcttaggcttctttcctctgggggagtttccttgcttgccactatcattgactctttttctccattcaaacctcccttcctcccattatcgtacgcctcagtatcatgggcttcagtgtctggtgacttcttatttccaccctttgagacctttgctcgggtgatagcttcttcaagtttaataaagccatctactctatctaagaagtcattcatggtgattaagacaaagatcagaccatagaggacccatctccttgagcccgacagcgagtgccataagccttgcatcctcactaagacttttggtcttagaggctacctctaagaacctttgtatgtagtccttgagggactcagcttcttgttgattgacatccaccaaagcattgggcttgatttggcattgttgggaaggatcaaattggtttctaaaagcatcaactagatctttccatgagaagattgatccagggggagcttaaggtaccaccgttgagctatgtctgtcagtattgtagggaagattctacaattgatgtcgtctctcacaccttgcaaatcagtttgctgtttgaagtagtggatgtgtgatagtggatcttctttcccaatgtgttaatgccaaaaaggattcctgaactttggaggaatgggtcgagcattgattcattcggagagtggtaagtgtcgttctctatcgaggtcgaattcaaacaacttaggtgtcgtgacccccttcagtaaagcaactaaggtgttgaattctacctaattgaccccgcgattggtggtttgcatccaaaatggagctttttttacctagatctctctagaaattaccatgtccattgttattctcatgttcaagaggtcacacatgtctctttgtcttccaggtcgatcttgtacttcggtcaatctaggtctttgtagttttcttctaaaaacgaggttgtgaaggcaactctgacgaggcctccagaatgaactcaggattgtctcaggaaacctgttgtgagagttttcattcaaggcattgtagtggctacttccctcaaagtagtcttcagtaggatcacaactgcaaagagaattgaaatggtcacacaagataaattcctctccatgtactcgagggaagtacttgtattgttaaccgtctgggccacaggcaaagtaacgacacaactctcctctttcatctcaaaagtactttaaagtatgaagcggctcattggtccttaggaggattcatgttagttctatcattgttttgaggtcattaaacatcaggtggatgacccatttgttggcaccctcaagcttgagttcgttcaggctctaggtcgaaggtacattcccttcgggaggtctccatgcctggtgtttgtcgagtgcttgctcagttaccggagtagtggtggtgttccaagcattaagggtttcaccttgagcacaagttccttcgtaaccatctagttgacggggtgtctctctcaccaactcgaaaatacctctacggagagcaattttgctattagagtgataagcctctctaatctgttgattcgggttagctctccactgtgcttgataaatacattggcttttgatattcttctagttttccacgaaccagtattgaaaccatttgtgttgaatattgagagagtctcgcagctgttgttgcaagtctgccacagtttggctgagctaagctacatgaggatcggtctcctcaaggtgtcctatctccacatgtggctccccaggtgggatattgctgttgatgctagtcccaagcgctattggtagtagcctcaaaggacgagttgaggagctggttctgagggatgctcttggcacctagggtgcagaagtagtcccacttccaacttcgttaacggcatgcccccaggttcttggccaatggctgcagtctacctgtcaacacttgcagaatgtgttgaaaccatcttgattagtagctttcttaagctatggctctcaatgaaagcaccaaaatgttgattcagaaatctagactagacttcttgttggaattattttaccagaatcttagatctactcac

SEQ ID NO: 387519 - DNA, 892 bp, Cannabis indica
tagattatttaagtatcttactagtgatcaacggtatgatatataacaattctatgtagttttaggtatcatactgatattcattatcaacttaattgtacaaataaatttcatgtgagtgtatatacccataacaatatatctattattaatctatagatgtacgttgattttttcagggcgagtacgttgatttataaatatacgtacttggtacttactattactaactatgtaaatatataaataattattaatttagtcagttaataattatttactatatttataactaggttggcttttatctcaataaaataaaataaataaataactaatttggcttaatcgtttggcaatagcaggtatattttttaaacaagtcgtattattagattgatcaaatgctgtaaagtagagaatctatttaaaaatgtattatgacaaaatgttttaaattttttcttcattttaaaacttttataaaatttactatttatgttttatgtacatttaaaaaatattaatcattcttgtaaacatattttattaattgttttagattttaattttaatttatacaagaatatatataaatattaatattatgtttaaaattaacaaaatatattaaaattattttaaaaaaataaaattttagtgatagattttaaaaaaagaataattaagatttttactttaaattttggcatgtactaaatcatgtcccttaaacttttgaggttgtcaaaaatacctcatgaactattgagattattgtatttaagaacttttgttcaatttcagtacaaaacgtctaaagttcaaaagtcatgatttagtatatataaaagttcgagggacatgatttagtagatattaaaatctggaa

SEQ ID NO: 387520 - DNA, 624 bp, Cannabis indica
tgagcttgtcaagcctttggtcaggcaatctgccacttgatccgaggatggtatgtatcttacttccagctcttttctaagaactttatcccgaacaaagtgtatgtcaatttcaatgtgctttgttcttgcataaaaacagggtttgaggcaagagcacttgctcctaagttgtcacaccaggtaacagctgttttgagaggaaaaccaatttctttcagcaaagattcagtccacgcgatttcagccgagacatgagccaaggctcgatactcagactcggtacttgatcttgacacaacatgttgctttttggaggaccaagagataagtgtgttgcctagataaacacagtaccctgcaacagactttcgatcatcagggcagcaagcccaatctgcatccgaaaacccagtgatgtcgagttgagaatcacaactaatgtgaagacctttgttcatgctgcctttgagatacctcagaacacgtttagcaccactccaatgtgctgttgtgggagcttttagaaactgactcagtttattcacagcatatgcaatatccggacgagtatgacaaagatattgcagccctccgatgatgcttctataagctgtgatgtct

SEQ ID NO: 387521 - DNA, 1033 bp, Cannabis indica
aatgaggatacatttttgttgtttttattgatttatgaagtctttttaacgatcaccttgtaaaacgttttatttttaagggaaaattatatatttgtgaagaggaatgctatatatacaagaatttttttaaaaaataacataaaaagataaagactttataattaagttaattagcaatttttttcactgaactttgatatatactaaatcatgtctcagaattttttttgtcgttaaaaattccactgaactattaaaattgttagatttaagaacttttatctaaattttagtaagaaattctaacatgaatgaaagtttagggaacatgatttagtacatatcaaagtttgagggacatgataataattactaaaacagtaaatttgaatgaaattagacaaaagtccttaaatctaacaatctctggtatatgtcaaagttcggaggaaaaattactaattaaccttataattaatagcaaaataacagatctcaatatcaactacaagagtaaatcaattggtaatgtaatggactgtacattaaatttacaactcaatagttgatataaaaaatgtatcagcaacataattacagttgagatattatatgggtaaatactaagttattaattagactctttgttttgttaaatgagaaaataaaccttatatcttttaaattgctaaaaatagaatcatgagtttaatttttatcaattttattttttaatatagataactttaaaataatttctaacacgaagagataaagaaaatataaccaatatttgttgtagactaataaaggcataaaaaatacttaatttagaatccactcctctatttttaagtccccaaataaatttgatccattcccaagagaaagtgacaatattgtctaaagggataagcctccaagagaaagatctccaaaaataaaaggaataattacataaggcatcattttttgtaaaatatttacatttttacgttcaaagaatcttcttttacatttttacggtttt

SEQ ID NO: 387522 - DNA, 437 bp, Cannabis indica
atatttctttttattattattgatacggaatgtgaggttcaccaaatctctttatttggtattggaaattcttgatttggtaatcatggtttgtaggaataaaatattaaataattaattgtaaattcatataagtgttatataattaattaattatttaactttaatttctctaatctctttatggtataattttcaatttttttattgactgagatataaaatatcccaaatctagaaactaatttagtaagtgttaatttgtttttaaaaaattagcaaaatagttaaatttaataattaactaataaaaattataaaaatacatttactatatattattttcttttaaaaaacataataattaaattaagtcatataattttagggaattaccccatatattattttttttaattttttttttctaaatttac

SEQ ID NO: 387523 - DNA, 796 bp, Cannabis indica
ctctctctctctcatcgatctctatttctcactctctctccccgagtcttcttcttccttccagatctgagaagctcaactctccttcccttccaggtggcaaatggtccaacagagaccaaactctctttcgcactctccctctcctatgcaactacctagcagcttgggcccaaattaataaaaaaagaaaagcccgccccatttgaaccctagcaacttcatcttcttcttcatttatccttatgctaagaccaaccgtacgaccggccaacactagtcacacttcttcttcatcttcgttcatcctaatccccgactgcacgagaccaatcgtctgttcctcttctgttcgccctcgtccccagctgcacacgaccaaaaacaacacccgcacgcatacaccaactggagtgccccaactggagcgccccaatcgttcgctcctcctctggcccgtccccaaccatcctctccttcaccaactcgttccatccccaatcttgaaaaaaaagggcagtaaacctatgatttgtttgatatgataatggtattaagattgttcttcttttgaatttcacatctcttgtttgtttactgagaaaagaacactcgctaataatattttgatttttatagatataataatgtttgagactttcaatattcttcatatatttggttgataagtaaatacaatcaaaaatggtgataaattttttagattttaacctcaaattcctatttacacaagaaaaaaattaacaaaattaattttccattatttgattttttt

SEQ ID NO: 387524 - DNA, 566 bp, Cannabis indica
gacgacgatgatgacgatgatgaggctagactttcaaattaatgttattcatagtttctgtttcttaaattattgtaattatagtatgtttttttccatgatagtactgtttgagttagaagctactatcatttattgttttatggtcttattaatttcttaatattagtttacctaatttttctgttaattatcaaaatatagtgtggtttttctgtttaattattctttttagttattatttgatttgaagtacttaatcgattgagtaaaatctttagtatgaatacgttaataaagaatcaatcaaagagaaattaaatcatgatgatatgacttaatataattgctagaaatatgtatagattcatgtcctcagatcataccctaattaaacatctaaacaaatagtatttaatgttaatctaagacttgagtaacttaacaaaaaaaaaactgagtaataaattacaatctattgtaaacatacaacacaaactcagaccaatctaaggttagataatcaacaagaattaaagtgacaaaaccagaattataaacaatat

SEQ ID NO: 387525 - DNA, 817 bp, Cannabis indica
aacaagagtagagagaaggaagaagaaaattgatgtcataatttaatttagtttgatttgttaaataaatttggttagtattggtgttgtatttatagtttaagacaagttgttggaaaaggaagaacgtgtttcaatttactatcaaaacaatatagaaagaagcacgtgttctcttctccctaaagtaacgattctctaaaaaaatattaggacggataattataatctcttattataattttttagttaattttaacgctcgaaattacatctcagtaaatttttttttttttttctatagcagtatttgttatagttacaatatcatctttgtcaattaattttgaaaaattttcgaatagtttacaatgttaaaaatagagttttcgatattctagtttaccacgcgcgtttaaaaacctttaaacatattttcggcactgtaaaatattcaaaaatttacgggaatgatgttgtaagtataatgaataccgctataaaaatattttaaaaaaagtatttttgcatgtgtttttgaacatagaagttgactaaaaaattatattagggggttgacagtagcactctttttatgatatttattaaaatcttgttaagataataaaagaattagtaaaagagaccactggtgcctaatcctcctcagtatcatattattatttgtgtaattaaatgtcggattccatataacttaagtgatgtttggttggaggtaatgaaatggccaaatggaataaaaaagaaacaattttcattccattcttttgttaattggttgcattttaaagtattg

SEQ ID NO: 387526 - DNA, 2126 bp, Cannabis indica
catcttctttaattgttctttgtagggaatatttacaaaaatcccgttatcaatgagaactctttttattctcttgttagcgagctgaacctgtataaccaggggatccatatgcggaaattgtacatgggatgcatcttctccaataaagatgatgggtagttcttcaggcttggctcgcttaagaggttttggggtaaaagctgacttttcatttttcacttcatttatatatctttctttagcattattgttgcttcttgtgacgtgtggccctccaaaaataactaagttgtcctctccttcatctaagggaggttgcaatccttggttcttctggttgttgggcagattatgctgatttccttcaatccttacatattgccttaggtatcctcgtgagatgagattttcaatctcgtctttcagttgacgacattcctcagtggtatgcctgatatctcgaggcaaatgacaatacttattaggatcttgcttattttttacatgtcttattagatcgggtctcgaaacgcgacccaattttcatttacaagatagatattttcacgagtttcatttaatttcatatacattgagtatataggaatatatttctcgtgcttcttttgttttttttttttcttttcttcttttgacgaatctcttgactcatctattcttttaacattcgaggcagtggggttcaaatttcccactttggttgtcacagtgctggttgtaacagtacttcttctgggtttgtctcctgagctagatttgagcaacttcatttcattttgtgcctattctttttgaacaaaaatttgcacactttcattgaattcattaatgtttctaacagcgcgtccttgcaaatcatcccataggtcacctcttgcggttgataagtccgttgttattctagcttgaatagctgtcaattgaatattatcatttagaattctgaatttgactgcttttgtactaaaatgacttaagtgaacttttagggactatcttggttggtgcttgatattagtcagcgtggatgcctctggcctcctgtcccttgcagcttggaattgcttcttgaaatccgtagatagttgctcccaggaagtaatggaatggttggtgaatttattgaaccaactgctcacttctccacttaaagaagttggtaccgaaatgcatagcaagttgtttgagacattgcttgctcgcattatggtgttaaaattattcaggtgagccacaagataagttgtcctgtcatattgtgcgacatgcgggtttttgaatccttgaggaaattgggaatttaatatatcaggatgaaaatgttctatttcttagtcttaatcgtatcttgataatttcccatactctccatccttgtatcgcctaaacttatactccaattgtattactcccagctggatgggatccatgggctattgttcaaaatgtgattgcctgtctgcattctcatttaattgattacgaatatctagatcatctcccttcaaatgctcgaacaagtcaggttgtctgcgattttaatgctcacaaagatcagggtcgcgacgtctttcgtttccttggtcatagttgctagctgaccttgatcctgaataacattcggattggtaactttaagagttgatgatgatctcctaatcatctcgataataactgttatcccaatttttaccaacttgaagtggcatgcttatgtagacaatatcaatgccacatggaagtacaactcaccaacaaggagttcaattaagcaccttatccaatgggggtcacgacactcaaaacggaggacgagcgacaaagtagccacctcaagggggctagtcgaccacctctagatagctagcttttggacatcacaaggtttgccagcctacaccctacatgtgcatggccagccaggattgggcctgatagaactttggtgcatagccttacacgtggactgtacgcgagactgtgaatttggccttaacaacccaataaagtagatggaaaatacttatgtttcaggggcattttagtcttttgtattttaccaatttaatatgtaaatatctatttattttatttgttaatta

SEQ ID NO: 387527 - DNA, 1117 bp, Cannabis indica
aatcctcccactaagataagatattttgattctatatccagggactttagtggtattaattactatcataacaaatattggaatacatacaggattaagaataagttcttctaatttgctaatttgtttattatattatatcgatgtctaatcaaaatatgtggggcatagagattctgtggtgttttaaatataatcttgagttcaaggtaaaagatgtttgaactacatatatcaataacttcttccacccctatgtgttatagagattctgtggtgttttgaatatagtctagagttaatggaaaagaactttgaactgcatatatcaataacttcttccacccctatcaaattataagatcttttataaaacaaaatcctaataattatttaagaatggaaaattattcataaacattcatttttaaattttatgtgtatatgtggcattatctctttgcaaagattaatacaccatagattttctatagatataaaatacataaaaacatgataaatatataaatataattcagggcatacaagttatagaggataaagctcaatttcataaaagtaatgcataatgaaatccttttaaagagaatcttttttattaatgtcatacccgaagttcggtaagcacatcagaggagggcacgtgtcgagctgggaagaactcaaacacacaaacgacaagtacgcttcgcatggaataactcgttggaaatataattcgcagggtaggtttataacgcgggtggctgaatagccttctgcgagacaaaaacatatgaatagctaatttatgtattgacgagaaaccatgtgattgcatacgctcatgacgaggcctcaaactcactgcgtgaaagagaaagtgacaacactaaaaatacttagtgtatattatgcgatatacaaactgagtatagatagtatagcgaggcgtttatctcgctaaaagatgttttgcattcgaggaagatcttctcaacctcaaagagtataaccatcatggttaagacagtattagtctcgagaagctaaaatgacatgcagctgctcgatatcaaagtgatcttggctctctcctcagcgaggcatccctatg

SEQ ID NO: 387528 - DNA, 1010 bp, Cannabis indica
gctttattacattctttattttttcgagcgttataccatattaatggtttgttatttttttcttttctttttgtcatactttaaaattaaaatcattgcattctatttatagaatctttcataaatgaggtttggtagacctcaaatataaattgaatgaaatgaccgaaataattaataaaattttctttttgagtttttggatatatatcaatcaatcaaatattcaatataggtacactacacactagtccttccttagaaaaactactcattaattaattatgtagcttctcatttttttatggctaacttttcaaatgaaatctccacaaccccacaactgtatttttagactaataaataataataataataataataataataataatataatataatataatagtttgtagttattattcactcaagtatatttatgttctaacatgtagaatagtacttggaagttggaaaataatggagctatagctaggttaaacaaaatatatatagttataatataatatatgtatgtatgtatatagacagtagtactagtctgaagaaaacacatggtgtatccgtaaagctcgtaaagagaagaagtacttgaattgaatatatataactgatcaaccatatataaagatatatatagtcacggtggtgcaaaaacgaaagtgatgacgtgggaccaatattatgatgacttggtcatcttctacgtatcaatattttcaaataaataaagccactcaagaggaagactattatagttagtttatactatatcatcatatacatacactatatatatctctctttcataaagatgaggttttagggttattcactagtaaatgttaaatttggtatcaaataattattaatacacaaatgataaaattctaatactataaattttttctattgaatcttaatattaaaagttacactaaaattatattctttattattagtattattttattaaattattaaat

SEQ ID NO: 387529 - DNA, 1086 bp, Cannabis indica
ggagtggtttttaacgttcaacatttgatcatgacaaatagacgactttgtatgactcttttgatggtatgaggtaggaaaaggatgtcttcttccaatgttgtttcccgcaaaaatatgatcgacgctatcaattttttgtggaaaataaatggcatggtgacaatagaaaagcgtgagaggttaataaatttttgttttgctttttcgatctcagggataaatgaaatgttctagtggtggtccttggttgttgaaacatcaacttttggcactagaaccattaaatggtgtgggagattactcaaaattacttttggaagggttaagttttgggtctagtacagcaatatggtggtctctgataatggtatcagatggaagcaaatagagaaggaaaaaaaaaagagccttataccgtaaaaagaatagaaaagaaaatttttgatgtaaaaataataaaagtataataatatgaaagaaaaaaaaaaccttaaaagtagaagaaaagttattaaataatcgtatatagagtaattccttacatatgtattatatacatactgatattttattaacgtacctaactctcttgttttggtgctcttaaattcgaaacaaacacgtgccttgtctttaaattatttggtttggtgctatatatttatttcaaagactgtacataaacatgatgcacgtttaacatggaaatatacagatataggctttggatgggcagttaagggcttctccaaaaagttcgaggcgtgtttggttggatatagcctaagaattagagaagagctttttaatttaaatgagctcataagagagaaacttcatgaagaacgactaatatttttgttggcttatttcaaaatataagtaataataaaagtgtacgtattatttataaatattggtattaggcactttaaaatattttaatattatatttatgtagtttattgtgagtacataataatttgtcatattagttttttttaaaaaaaaaattggcagctaaatcatctcaattatcgtttcagttaggggtgttcacaaagtatccgatccaatccaatc

SEQ ID NO: 387530 - DNA, 721 bp, Cannabis indica
caaggcagtacaccggagcacacaagcagcagcagtagcaggacacccgcccatatcaagacctctctcactcagccacttctccattcttcaaccgagaacgtttaatatcattatcatcaccatggccttcttttagctatacgtactacaccaaccagtgctttggctactttgtttttgcttttgatattattgtgttgttgttatttacatctcttttgaagttgagttttttttttcctttccattacttggatgattatattaagatgagattacgtaccaagtacttgaaatattcagatataattaagtaagcatgaagtaaagaacacaacataattttctgttacatggttcgggtgtttcactatatatttcatggtacgtaccaaataaattttgtttcgaagcaattcactgagagcatctctaacgacacactaaatttagtgttacactatcatcaaatttagtgtcaaaaaatatttttactccaaccacaacaccaaaaattacactaaaaaaaattaaaaacatattaattaacaaaaattacaacaattattatatttaattaataatttaaataaatttactaattaaattaaagataataatacggtaaaattggcgaaattctataaactaaaatatcatattgcaataatataaatattaactagagaataaacattatattcgaaaaaaattaaat

SEQ ID NO: 387531 - DNA, 2583 bp, Cannabis indica
caatttcgccacaattaatttataataatcaccaatgattatatataactataattaataaataataagggtgatgttttctgtagttgttatatatttactaaagtgtcggataatagtttgttataagattgtcaaaggtgaaatgagggtcatcccaattgaactaagttcgaccaatcacatgtacatggtttggagtggcttgggatcaacactcttatcaaagttaatgtactattttgttgatttgatttgttaccaataatcaaatttgtgttataactatgttattcttgagaaatgataaaagaaactaataatggtatttgacacttttttttaacacgttatcgtttatagtgcaatcaatactacaaaaaaaggcttatcatggcagcactatctcgacgggcccgcacaataggtctgaattttttttaaaaaaatccagagcgtagcaatcttggcgggcattgtatgtttcgtcgttattgacattttttaagcctaaaattttaccaatctcggtgggtcaatataggctcaccattggtcccttaaaatttcttattgggccgtgttatcaataacgacaggccaatatagacccgctgagattggtcacttaaaatttctcattggaccgtgttttactaataacagtgggccaatataggcccgctaagattggtcactaaattttcccagcccgcttatatatttctttttctctttctctcttcccccctttcttcttcttccccaatttattttctaaaaccagccctcctctgaaaatggcagccattcggtctgaaatttcttcaagcaaaaattaattttttattcttctatttcatcacaaccattccatgaagaaaacgtgaggttgaatatatactattgatttatttttttttaatatttttatcctaatagtttttaatttattttagtttaaaaagttagtaaaataatgaaatgttagcttgtatttagatgttttaggttaaaatatttttggggtaagctttatacaacacaaagaaagctactgagagatgaatttaatttttgaggaagtattggtggttaggtaatgtcaaaaaggagagatttttggctctaaaagcttgggatcagatctgtcaacccaagtcgtctgggtgtttgggcttaagaagattcgaggatatgaacaaagctttacctgccaagatagcttacagccttgcaaaaaatgaagagagaccttgggtcacctgtttgttgtgaaagtattgcaagcatgaaaactttgaaaaagtgcaacaaaagagtagcgattcttatcagtggaagtgtatcttggaggtgagagaaacaatagcaaaatgatcaatctctgtcgctgctagtggtgaattcatggttggaccttcaagagtttatggatacaatggatgaacttaggagtaagtgtttcacggttcaaacaatagctgatgtgtccataggcaacaattggaatgaagaaatggtagttcaaatttttggagaagaagtgggaaatcgtatcctaaaaaattccaagaattgcccatccttttaaggaccaaatcttttgaaaaaacaagaaaaatggtcagttctcaattaaagatgcttattgtgtagatcaagcttggaggtttgctcctacaagagacatttggaagttgatttgggatgcaagaatccaccccataatctcaattttcctttagagaattctcacagaagacaaattgccttttattttagacaaggagtgttatttgtgtggtgagttggaagagtgtggtcttcatctttttagagattgtaactttttgaaagcgttgtggtttgtggggatgtttcctatgcagattaggattataccaggaagttcgatgattcattttatggacaatttaattacaaactctcaagggataaacaagaatgaaatcatcacatttgcaagttgtctttttgctgaactttggcatcagagaaatgagctttgcttgaaaggtgctggtgccattctcttaattgttattggtaaggtgaatgatgctctgtcagctttcactagtttatctaatatcaacaacaattaaggaagtgaaatggcagtaacttcttgtctattgagggaaatgacaacagccttttgtcctagtgagaaagagttaaacaatgtattgttcactgatgcagcttgagttaaaggggaagctggtatatattgttgcaatgaggattggtagagttgctggtatgtgggttgttagttctaacacaattagtgtagattcttctttggaagcaaaaattagggccttttttttttttttgctttctcatgggcagatgaggatgggtggaagaatatccacatcctctcaaattctaaggttgtagtccaagctttggctgagaacaaatgctccctagattggaagggctcaagtttttttctttcggtagttaatttaattaagaagtttattatttataagttcttttttattaatcgtagttttaacttgtttgcgaatagtgtagctaagt

SEQ ID NO: 387532 - DNA, 782 bp, Cannabis indica
ctaaattcatcatgctacagaaatagttaaattattagtcacaaagtaaaaaaaaaataaattacaaaattttaaaaaaagtctataaagagtttacttaaactgataaaaaaaaactcttaccaatagtatattcggtgttgtaatggtcttcaaggagtttgggtttaccaaagaaaatatctgatagaatgcattcaccacatgatccaattcttatacaataaggatttaaaataaatacatatattcatgttatcacaagttatgattgtatattaaaattccataataataaatcaaagatatgtgtatgttatgtgtatcttttttagaataaaaagtattgaaaataattatatagagagacaaaaatataatgaaggatggagaatatataagaatgatcttattacttttcatgaatctcaagaccttaaaaaaatgaataaatcatgaacaattcgaagtcattgaggacagtcaagttttcaacataaaaaaaatgtttatatgtctccaaattagtgagagaaagattaagaatatatatatataaaaaaatagaaaaagaagaaataaagagaatattaataatactaattgaagattgaggtcttaatactgctcattgttcattgatgttactacaggatggagaatatgcactaagaaataaaagaaaagaaaaaaatagaaaaaactaaaaagaggaagaaagaggctgagagagatatataaaacaaaataaaaaaaaaaaaataaaaaagtgatatatagat

SEQ ID NO: 387533 - DNA, 871 bp, Cannabis indica
gaattaacattatcaataacatttttactcatcccatctaaaacatcaataaattattcttttagcactatgatcaccctttttatcttgttaaaatatttataaaaaaatatgaattatatgtatgaacgcagaattaaatttatatctatatataaatacaataaatagattaaaataccttccgtcattaattctttgagtttcaactccacaaacttaggatcaacaaaagaaaaccaatactgatgttagtgtggatattcggacttccaacctctctctaactctcttagatggaattactattttacacagaatgagtagcgagcttgagactgacacgtatttgtgtcatattaattattagaatattttgacaattaatttaaaaaaattaaatgaggtaactaaaatatttagtaattaaatctgaccataaatagaattttcttaagtcaaatataatcaatatcaaatcaaatcatacatttgacttattttatataaaatattctaatattctcttacttggtcaacatttatattatcgctcaaccccaacgattcttattatataataaacacgtgaattataacgataagtactcactttatggagagtatttatcttccatgtattatgataatatttattacataacaatgtatttaatagggttgtacataaatttttgtaaactgtccaatccgcccaaaccaaaccgagataacccgatgaaaaatacaaactgaaaaacccgacgaaaatataacccgtcccaatctttatattaggcgggttgaaaataatatcaacccgcccaatctacccaaactaacccgattaagaaagtttatatatatatat

SEQ ID NO: 387534 - DNA, 754 bp, Cannabis indica
gttttaaggatgtggtcccatgtaatttaggaccatatgaaattgccttgtctttgtctcaattggactaaaatgatcaactagttacaatgaattaattatttagtcttagtcatactagattgtatatatatatctttcgaactaggagtttataattgattataattttttgataacaaaataatttatgattagaaaattaattaaatttcttgaaacgcacagcagcaaggtgcaagtgtgaatcaaaagtctacagctgccgtagaaacattacggccaaaacttaaggtaataaataattataagggaaatgtttatttttatgatttgtaattattatgactatattttggaaaatatattttataaaaaggaatccaaaaaagaaagaaaaaaatgagaaaaacagttaatctctttagggtaattaattattatcttatattgtttttcttacattttttaatttttttcataaaataatttattttttgaaaaaaaaatatatttttgtacaaatcgaataaaaatccatataatatgtaatttccactaattataattataggtttcagatttttttttaggctaattataatttatgtctctaaactttgacatgtactaaatcgtccctttgaacttttaaggtcgttaaaaatgacccctgaactattgagattgttggatttaaggatttttttttcaattttagtaaaaaagtctaacatgaatgaaaattcaaggg

SEQ ID NO: 387535 - DNA, 1241 bp, Cannabis indica
ggattcaatcactgctgcaagaattacaagtacctattcttcatagtcctatcatttgggttaatgatcaaagtgtaacagctttggcagataaccccgtcttccatgcggtccaaacatatcgaaattgacctctattttgtcagggatcaaatcattaacaagcaattgtctgtccattatgttcctgctcatgataaggctgctgatgtcctcactaaagctcttacagcagaacgttttctttacttgaagttcaaactaaaaaatggtgtccacaccatttcgtttgcggggggtgttaatgtaaaactaaattagaattctgttattttttgttaatgttgcataaaataattcaataagttaatttccttttcttaatttttaatcttcttgagaagcatatttgttactctataaatactctgtattgttctgttattgtactgagctttgagctttgctttcattgtttctttcttcgtctcttttttaaattcatctctaaattttacacatgactagaattacgatttttctgtaacaccaacaatcaaagagaggaccaccatctcaaacatttaaattctactatataagaaagctgtcgagcctaacatcaacgagcaaaaggcatcaaatcgcgaaaaaagacgacaatcaactaaaaaaacaacacaaatgatcagaagccacaatatgtggacataatctacaacaagagagaaccaaaccaagcctatatcctcttcaccacaaatgtgcaaaagaaaagcatagagagatctatctagggtttttccttttcaataagaaatatagtctcaatcttttaatattttatcttatatatatgtacctattttttaaaatttaatgatatataataacgtgtgaatatcccatgcattaattagtattctcagtacttaaaacagtacttgaaaaataataagagaatgtaattattattgtaaatctcactctcataataaatacataataatgagatttatattagctaaaaatgtccccaaccgacaaatatgaattatggattttattcctatttttatcaaaataatcaaagttgataactccaatgccataaattattcaaacatgcatgacctgtaaattaaagtacaacacaccattcacttctctcttcttttttttgcctaatattattctaatatttaaaaaaaaacgtagtacaaataaataaataaataaat

SEQ ID NO: 387536 - DNA, 1573 bp, Cannabis indica
ttcattatttctttgagacgtctgctatccccttgcttgcgtttactgcaaagttgtggcaccctgattcaggacacctcgtccatcaataggaacgtcccttgtttcccctggttggttctcatagggtgagtgagattatttggctgatgttctttgatgttggatccttgtgcccttccggttcgtgaaccacggagccttcttcgctgtcattgtgcaagtttctcttcttgcactagcagtgcatcattttaagccactctagatgtagccatggcccgttccaactcctcatttctttgattgaattccagtaagccttcaacggagttgtcgatcttctaactccacaatggggacgtatcttgtgggatcatatgcatttgaatcccttctctcaggaatttcttcctcagggtcacttctcttggagttcctctcaataggagcccttccttggttggtttgagtttgtgtcccctgggctcttttccatgtcgacgtgttgtctcttctttcatgaccaactcgtcatgttgagtatttcccatgatgtatgaaataaaggggagatgtgttttgagtttttttttacaaaggctctcaagtgaaaacactaaactgttaattcggatttttgttaacaataaatgaagctttgtaaataaaagttatttttttataattaataaatatatatatgaaacactaaaagtttttacgtgacttcgtagctaaaatctacatacaccacgagtcattattatttttgagtatttcttggttatgtatatggattatagaggaataactatgagtatttatttaattctcataggggttttccttcccaaaaagattgatttctttccccatagattcttatagggtttttactatgacagttattctttttgatcttaataagataacgttcatgaaatgtagataatctccacatttcatgtttacaaaatgtggataaaaagaaataattattgataaccgtcttttgatcttatctggaagtagtcttttgttgctgaggtaacacattccaagtatggctcgtatctttcaacggtgttcaaggatagcagtttgcattttacgagatgttagttaagatatttattctcgctatagcctttccagggtagctcttagaattagtcttttgagattttgaaataagttacgtttttcttatttcccttaatctttcaacatactcatgagtatgtgggtcattgggttgcaagtatttaaggatatcattatctaacttttccagcgatacaatttcaatatgttactcctgagaagacttctattgttatcatctcgccatacgttgcttatctagcaatcttactatagttgtgacagaaatggtacgttttacgatatgaatcataacgataggtcctcattatatgtcgagtattatcttctttgtattacgatatacttattatatagcaatgtactttatgtgaaatataattaaccgaacatgctctaaatattatatttattctggtcttcttacgataattttctcagatga

SEQ ID NO: 387537 - DNA, 660 bp, Cannabis indica
agaacttataagaagaagaacctaatatgcattggattgtaaaataaaagctcagaatcactagagatagacagatcaagaagatgcctcgttattctcaacattcgaatcaacggaacccccagtttcgggctgtgaagcaccatcagcagaggaggaggaggcggcagccctagctttgacgacatcaagcattcgcttactgacctccttggagtaaacctggagaatctgaatgccatcatcctcggaggcagaagcggagctagcggcggatgaaaaggcctcctcttcaatgatgcgggcggtgtaggaggattcttcgggaggagtggtaccgtagcgattagagagaacggaaggggtggaaagggtctcaatgagacggttcaccacggcgtctcgagtgcgctggctcggtggccatatactgaatgtggcttggctgctcggcttctttgtggtggtcgattctagggactcattcgccggagcctccattgttgagtcttgatctgagactgtgtttgaagacggaggggttatggcggaggtctcttcgtctgccattgttatctcgagtaatttcttcctacttcaataatggctgaaatgaaatgaaatagagattgtgtgtgcaagtggtaaaagtgtaataaa

SEQ ID NO: 387538 - DNA, 1563 bp, Cannabis indica
ttgaccaaaaaaatacggattggttcggatgaacacccctaatcactcctccaccaagtccttctcaacgatcttatgacactaagccccgagaccctacaaggggaaaggggcctactactcaaactgatggaagtagtatgagatactacttcgagatcgggggctacgagatccagtagggaaggaccaatgaaccatttcatactcaaaaatactttcaagataaaaagggtgaattgtgccgttactttgcctgtggccttgattgccagcaatatgagtacttccctcaagtacatggagaggagttgaacttgagcaaccagttcaattctcttcacacttgtgatccaaatgaagactactttgagggaagtagacactacaacactctgtatgatcactaccacagcgaatcatcccaagatgatccagagttcatcctggagacatcaccagagctgcctccacgatctcgtggtcaggaggcaacaacaagtccaagtcgaccaaagcacatggtcaacttggaagacaaagagacctgcgtgacctcttaactaggagatagttggtggaagtatgagcttctagaggaggccctacctaggtaatagaagttccaattgggatgcaaaccaccacgtatggggtcaaccaggcagaatttaatactttagtggccttagtgaaagggatcacgacccctaaattgtcaaagttcaaagttgataaagagcggctcaccactttttgaaagaattaaagatctttctatcccttcaaagttcaagaacccttcctggcatcagtatgtcgggaaagaagatcaactatctcacattcgctacttcaaagtacaggcccatctgcaaggtgtgagagatgatttcaggtgtagaatcttccctgccacacttacattacaggcctagctcaacggtggtaccataagctctcccctagatcgattgactcatggaaatatctagtggattcttttggtaactaattggccctttcccgacaacgccagatcaaactcaatgatttggtggatgtcaagcagtaggaagatgagcccctcaaggactacatccaatagttcttacaggcagctgctatgactagaagtcttaacgaggatgcaagggtaatggcacttgcatctagactcaaggtgatgagtcctctgtaatctaaccttcatcttaaggttgtttacaccgtgaatgacttcctagataaagcagacaactttattaagttataagaagtcatcacccaagccaagggatctcaaagggtggcaagaagaagtcacgagactccctatccactaacactgaggcacaaggcaatgggaaaagaggcagaaccaatggaggtaagagagctaacaatggtggtagccaggatactccccaagtgggaacaagccatagactaggggcaggcccttacgagagtatgagcctcactttaccactcaatcctcttggctcaaagagaagagatttatatggtcacatagtcaatagtgttgtgtgggtttttatg

SEQ ID NO: 387539 - DNA, 903 bp, Cannabis indica
ttaacaaataaaaaatctaaatcgtgaacttttataaaatacaaaaatcaaaaaataatatttatatatatgtatacataaaaaaaaaaaaagctaaattagcaaattttcttcccgaactttgacatataccaaattatgccccctggactttttttggcgttaaaaattctccatgaactattgagattgttaaatttaagtacttttgtctaatttcattcaattttactgtttcagtgattgtttatgtactaaatcatactcgccagactttgatatctaacaaatcattccccttaaattttgatatgtactaaatcatgtcccctgaactttcatccatgttagaattttttttactaaaattagataaaagtccttaaatttaacaatcttaatagttcaggccaaaaaaattcagggggcatgatttagtacatgtgaaagttcgaggagaaaaattgctaattagtctagaaaaaaattagatgtgaacgaatataggaaattgatgaatatatatagttaataactaaacccattattatcagctacgtaacaggattattattaattatacaagtaactctcaaattaataaaacgctaattaaaaaaaacaaacctaattaattaattaaggcacaaagataattattaaattctcttatttcttcgttttatcattatttccttcttctacgtactttcttatgcatttacatatataaattagggtaaataccattttggatcctgtgttttgcaaaagttactaattggaccttgtgttttgttaaatgacaaaatggatcctgtattttttaaaatagtacaaataggaccctgaattgattttcaaagtttaattataattcgatctaaaagtgatatgacaaaa

SEQ ID NO: 387540 - DNA, 1520 bp, Cannabis indica
taagtgtgaactagatagtactacgtataggacacatattaactttaaaaaagagaagtagggctcaatccattattgattcatcactagtacacacgtgatccgtacaagtcaattaaatcagtgatccctacacaatacaattcaatttcaacgtgtacattaaacaagtagggctcactccattatcgatcactcctacaatgcacatattattgatcattcttatggatatagagttaagtggtgttgttatatatattgctataacatatataaatcttataactacaaagaggatttcatcttcatctcagctttagttattactaccgtttcaaaaaatacagtaatggccgatggagttttatccaacgttgctggaagtattgttgagatgctgggttctgcagcattcgaagaggccagactgctttatggtgtgaaggacgagtttcagaaacttgttgggacaattgaagtaatcaaaggcgtacttcttgatgcagaagagaagatggatgttgatcatcaagtcaaagcttggctcaaacaacttggagatgttttcattgttgctgatgacttggtggacaagtttcataccgaaccttccatgtctgggaataagtttaccagacaggtatgtctttttttctccagctctaatcagctagattttcgttttaagatgggccatcagattaaaagtataagagaaaaactagatgctataagcgctaataggagtttccatttagattttcgtccaatagaaacgagagttggtagtggaagtagtatgagggagacctactcatatgtgagggaagaggaagttattgggagagaggatgacaagagagagattattcaaaaattggtggaaatggattttggggaggatgtgtcattcattccaatggtagggattggagggttaggaaaaaccacactagctcaatgtgtttttaatgatgaaagagtccaaaaacattttgaaccaaaaatgtgggtgtgtgtttctgatgtttttgatgtgaaattacttgtggggaaaattttgaagtctcttacgtctagcaatctagaaaaccttgacttgcaacaactacaaaataaacttagagaagagctaagtggaaagaaatacctgctagtgttggatgatgtttggaatgagaatggtgaagaatggggtaagttaaagatgttgttgaagtgtggaggaaagggtagtagagtcttagtaactactcgtagtgaggtggttgctaggataactcagagtagagttgagcgaattaaagtaaagggtttgagcgaagacatgtcctggtccttattcaaaagaatggcatttaaggaaggtcaagagccggtggagggctcaaaaggaaaggagctaggattggaggttgtcaagaaatgtaagggagttcctttggccataagaacaataggaagattattgcaggaaaggttatggcagtctggagacccacaaaaggagttgtcaa

SEQ ID NO: 387541 - DNA, 1896 bp, Cannabis indica
ataattatatatatagttagtaattgatttaaatttgtagagattatgggtgacgttcttatctttagtgaattgagagatactaagaagattcttagtgaattttaattattgaactttctaaaaaaaaaagtcttgtcttatgacatggtgtgagagtttcttgtgttggtctggtcttcgtttttggtgattattgtgtctcgttttgttgattttcgaacatggctagttcaagtggggtaggaaatggtggcagagaggacgtctatagcttttagattgaagaagaggatttagaagagttaacagtagggaatgaaggagaggaagaggggattgatgacagatggtgtcttgtaggaagatttttgtctaatcggatgatagactttgataaaatgtagaattttttagcttcgttatggcaaccgggaatgggaatgtttgtcaaaaaacttgatgataaccgattcttatttcaattctaccatgaagtggatattcaaagagttgttaatgggagtccatggacatttgatagaatgcagttgatcatccaatgtttgcctgtgggaggggatcaaaattcgttacagttaaatcaccttgatatatgggttcaaattcacgatgttaaaccagggtgtatgaaggaaaggactgttcgaggggttggtaatacactggggaagtttattgagtcggatccaaaaaaatttataggtgtttggagggattatcttagagtgagagttactcttgatattaggaaactgctgcggagacatatgaagttaagtcatgaaaatgctagttggttctgggttcatttcaaatatgaaagagtgccaaccttttgtttcatatgtggtttaattggccactccgacaagttttgtagccgattatttcagcagcctttagaccagattgtgaaaccatatggtgattttatgaaagcattgccacaaaaaacttacaagaacatcggagcaaggtggctccgaaacaaagggtggcagtcgaaggggatcactggggacaatgcacctggacaaagctcaaataagccgaatatggaaagaaatccttcagttgacttggtcgcaaatcatgtccatgaaaatctgctgcataatggtgagaatcatggcatggataacattatgatggaaggtgatcaaggtgaggaattttagtgtattaaagagggagaagtcaatggtgctatatatgtcaagaataaagaaaaggagaaattgaatgaagaaaattctggtttgattatctatgatagtaagaaaaggatggttggtgaagagtgacacttgggtcacgtggggcaagcctaaggaactagtggactttcaaaaaactcatcagtggcgggccttggtactggggctcgccagacattatgaaaatattaagttggaactgtcgtgggttggggccgccacgtaacattcagttccttaaagagttggttgatcaaaaaaggcctaaagttttatttttgtgtgagactttaagtaataaggagaaagtagttgctttgagtaagaagttggggtttgaagggtgctttgttgttgattcccaaggtagaagtggaggcttggcgttagtgtggaaaagtgaggaagaagtggttattgattcctattatttgaaccatattgattgttttgttcattttgaagggcaaacaaaattttgtttttgtggcttttatggggagcccaaccgaagccttagaaaaaatacttgggagttgttatgtactcttcatgcaaggttttaagaagcatggtgtattatgggtgactttaacaatattctgcaaaataaagaaaaaagagggggtaagccttatccgagttggcttttgga

SEQ ID NO: 387542 - DNA, 813 bp, Cannabis indica
tgttgcatccactttgatcttgataccatcaatatctggtttagtccatagctccaatctgtcacctaggtaaacgggtcccaaggatagaacattagttttctcttgagctttcaaccattgatcaagataaacttttgcagattcaacaacttttgaaactgtacaaaaattttcctggcaaataatatcatttctagcattccacaacgaccaacatatcatcaaaacacgagcagcaatatcagcccccacccgattcaatacatctctcagccaagtgccaaacaaaacaacaccatcaatttcacccccagcccagcaaagtgctagcacatacgagagaaagaaacacgagacaaagcaatggaagatagtctcattatacaactcacagaaagggcagactaaagggacttgtacctttttaattctaagttgtactcgtgtaggaaggcaacccgtgatagctcgccaagctgtatttttcacttttagaggaacttgctgtaaccaaaacatttttcaaaattcaacatcgacagcattaccaacaacttcatcatgaattgctctatatgcacttttaacaaaatacaagccactactctccaatccccaataccacacatcctcatcaactatattactcaaagagataccaagaatgtaaagcccgcttagttaatttggaaattagcagttaatcttgattaattatgaaaattatttatagctatttaaataatttattatactgttattatggaattcagaaatgcattgctatgttattcagtagttttcatattt

SEQ ID NO: 387543 - DNA, 1477 bp, Cannabis indica
tatatatacatttatatgtataaatttattacaattgtatatatatttatagtatattgaccatatttgatgtgtgtattctattaaacttttgtaagagaatttataataatctatgtattatgcggttagtaattttttaaaactgtaaacaaaataaatgtgatatttaaaaatgaaaataaagttatttataaattagtgaagtgatttggttaatggcataagtgtaataaaatgataatattataactaaatattaagtaaaaatgaacattgtttaataattgacacttaccgtaaaaataaagagagtgtaaaataaagtcttcttagagctactcattgaattatttttttgaataagagaaatatttttaatcaattctagtttaaatatgttgcattcaagaccatggtattataatgcaattccctaattagaacaaactattaaatgccctacaaatagaatattttttaaattctctaccttaaaaaaatcctaaatatatatatataaaaaatttataaagtgatttgaattacaaaaaggcaaatgtcgacgtagaaggacatccaaccaataagtcaattttttagccaaaaggtatataaaatcagaatgtgaattgtagcaaaacaaagtgacttatataaggctaaattatctaaaaatttagacaaaaccacttgataccattcccaaaaggcacacagtctaaatgaataatttaaacaaacttatcaaataaatagataaagtataaagttgattagcccactttacaaacaaaatgttaagaaaaatgtccaactatttttctttttgacaagaaataaaaatttgcaagaaaaatttatcttttaaaactccttgaataaaatagtgtccccttaatcgaaattaatatgtttagtcaaacttttagtagggctgagcatcggtcgacttggttggtttttctgtataaaaaactacatttttaattttcggtttaggttggtgcaatctgaaaactgactgaccaatccaaaaatttccttagaacagaccgatgtaaatcacgatttagtcggttcaaaccgcctaaaacagaactttgttgttttttttgaatctataaaaataagaattttcttatttgctgtcaatttctttaatagaaattttattggattgctcgcaatcgagattttacaatgagatgtttaatctgtagatggttgagctatgtgaagtcggttataagttatggcaatactagttaatgtagtatcatcgacattcaaaaaaaaaagttaatgcagtataatatagtaactaaaaaactatttaaggtactttgcacatgttatatgtgttagaaaaattaatataaaccccaagatcaatttgtatataacatagaacacaataataagatataataattaggtatgtgtacctgattgatccatagcaattatctctgtt

SEQ ID NO: 387544 - DNA, 1149 bp, Cannabis indica
aaagaaaaataatcaatgatgaatgaaaccaagtttttatgtgattagagcattaatgagccttaatccacaagtcaatattattgctataagacaggaaaaaccttgtgatttacacaagtgtttgagtcctagattttgcatgagcactccaagattgagattctaactctttgtaaaaataaattttcttatatttatagtggtagggttcttgcccacttataggatacatacaaacaatatattgactttgagcttatctagtgaagtccaacccatggggcactgattgtatgctgacgtggaggctatatcttgttgatagttgtcaaattatgtcctattttttatggataataaagacacattaacatttgatcgtcaattactatctttctatatatacgctatgctggagggttatattgcttggatgagtcatctgtccaacatccgagagacatgattttgttaatggatgtcatccattatcgtgattgggcttgttgttgggcttggagtaactgagttgtaccgcttttggaattacacgtgtcaccatctaaaaacacggataacactacccgcaaaaaataataagataatagggtaggatatgggtagaaattttttcatacggtagggtatgtgtagaaattttttcatagagtcgtagaataaacgtacccaacccatgctttactggttgctatcccaattcaattttatatttaagaatttaaaatctatgaatatttgatttcgcttaattctcaactcaacaagtatggcaaaaattttcttattcaataaaactcgatgcttctccatagtgcttgacatgaaatataaaattacgaaaagattttagaagtgttgtttttttggccaaagagatatgattggatgacatataaaaaatatacttataaaagaaaaaaatgttataaaatgtgagagaaacgatgatgtggtgagacatttttgtcgtctcgacaaacgacatgtcgtattcttagtctaaatgaatgtggtcacatgcaacacacgtcgcacgcagggacggagggactttagcccatgtgtgggctaaagccctcactcaaatatatacattaaattttttatatatagatatatacatat

SEQ ID NO: 387545 - DNA, 1995 bp, Cannabis indica
ttaactaattagtcattggttaataatcttatttttggtttaaactcaaacctcttgcttataacgagctacataacttcttagttattgttttcagattctattttgtttttgttaagagttaaaattttacattattagtaattggttactaatattattcatgacactcctccaaatttttacttttaaaatcatattggttgatagtgataacttattttggtttggtgtcaatttggaaagtcattgtataattgaatgagataagttgaggaataatttttttgttttgtttttattaataaaaaataatcttcatgttatattttattaaaatataccaagttttatgcgtaggttgcctaatataacattactctctatttaagtctagtatataatttatattaacttaaggggtctaatagaaacatcatctataaaagtggtatattttaaagaatatgaaaatgatggtaaaaattaaaacaaacaaagtaaagtgggtatataatataattttctttaattgaattggggtataattgtatgatctaccttttcttttgtagatatgttggtgggacatagtcattttttatgtatttttttttttgatattaaagatttattgtttagtttttcgaaagtatctctttcttatgtaattagttacaatgttggattggtttaatatgtttttaggatagacaataatttttttttgttttattttttttttggataaaatgaatcttttcacttttgccttggattttttttttttttttctaacctataatggttacctttaaaaaaatttaagtgtaattggaagtaatcacgcaatttaatatgtttatttgaccatataattagagataagataattggagagttctaattactttctaattctcatgccctcttaatctctcatgccctccatgagatttacttgtaattccttgaattggtaattattaccttatatattcaaacacatatttaaaatagtgtattaaatattgggcttgggcttgaaggtactaaatattgggcttaccaacaaacctctaaggaaagtccactattaagaatgccaaatttgttttcattttcagttttaagaacataattttgatcataaaagaggctgacctaacaaattaaaaccattaaagccactaagctagcaagggagggatgggaaaaaaaggaagatcataggttcgaatttaggatttttaagctattatttcatttgattataaaatatcattacgctacactaaaaaacaaataaaactattagaaattatatttaataataactagtaattatttgtttagtaaaaattgtatttggtaaaggggtgcaatatttatttatgaaaattgaaggtgaatattatatatataaaatatttagttagataaattataatgttaaccaaagacattgtaaaaacctcacttttccaaaaaaaaaaaaaaaaaaagtttgagatgtttttttgcaaaaattgaaaatctattacttgcatcccccttcaaatcaaatatttaacttgtctaataaagtagtgccaaaaggaaggcactataaataaaattgacattttaattgctttataaatttaataaagaaaacaaaaaaacaaacaaaatcttatcatcattgtcaaaatagagattcccatgccatgacaaagacactctcattggctcattctattattatatatggtagttggtaacatctagatttgatcctataaacaaattaaataaaaaatttcaattaataaaatgaaacaagatcaatgaacatactctcttacattttatttacttatttttcttcaaacttatgagaaatgcccatgtttctaaattaaaagaaaaggaaattagctcatcaattttataatttattatcatcacaaaaagtgaaagaaaagataattttttttttaaaattttccaaaa

SEQ ID NO: 387546 - DNA, 1954 bp, Cannabis indica
cagtaaaagtctcttgtatatgagaccgtggtttcctttcctgacggtttctctttacgcatgcaatgtatgctatatatcgcaaccccctcccctcctctctctctctctctctctctttctttttttttttcttataaatataatatgactttagagtgaaggaagtacaagtgacaagatcactaaaaccagtaatttaatttataattaataatttaatactagctagtagataaaataatattaatgctttaagatgatgattaggataaatggataatgcatacagatataataattttgaagagtaacggaaaacataattatagttaccgcattggaacaataatatatgttggtcttcaatatattccaaccaaacattccaaataccttttaagaaaaaacataattagtatcatattgtaccaaattttgtttacttatttgtgatgtaaaatcttcgtgtatgaaagctcttttctctctctatttttttttatttttaaaaattattggaaaagttcttgttttgacttgcatttgaggaacatatgtgttatacattatttagtttgaaaaaattatggtataagtttcaaaaatttatatttaatgtaaataagtattctaatcttaaaaattcatgttttttttttaatttgccagatactaataaaatgtcgcatgttaatttttttttatttagtcaaaatcataattttaactaaaactacaaaaagtattttaaaatcataaaattatttttttttcttacttttttttttttttcttctttgtcttattcacccagccaccatcttccacaaccacaaccatcttccactctctttaaagcactctaacaactcaaaaaggattttgaattgaaaaaaatgcttagaaggaaccaaaaagcgactcaatgacttcttttaatgagtagaaaatgttcaaaatctcattaacagccacaaacttactctatattcttagagattaaagaagaagaagaagaaactctttgaaaatgggttgcaaatagtagctcctgctgaagaagatggtaaggaaacaacatcacttcctgaaacattctctcaagcttctcgattggggctttctttagttaggtagattgacccttaggttcccaaatctgacccatgttgatttgctttataggtctttgatttcgatcttgaattttgatattttgttgaaccacaaatattttcagttcaaatttgttcttacttttcacgtttctcgagacctggagaggccatctgtggcctctattttggccttcagtgaccaaagctggcaccgccctacacaactgaaaaggagagaaggagaaagatggacaatgaggaggctcaagggtggtaggtcagggtttaggttttgagttttttaggatttgttttgagcttggacaaccaagaacagctagcgtcgggcctggctgtggctgttcaacgaagaagagagaaagacgagagggacagagggtgaactcaatagattggggacaaaaggactagcaggttttggattttgggaccttgttgtcaaaattatatacgcaagtataagtagtcatacaagtaataaaatgataagtaagatcgtctccacagggattgcaaacaaaaatatgttgtaaaatcaactaattacaacttaaagtaaaaagaaataacatgaaaatgagtgaacaatgattcaaaattaaaatgacagtaattaaacttgctaaaattaattctattgttgctagaaaaatgctttcaaaaaagaaagaaaatataatatgataaaagtggcttgaatagctaattccttctagtcaggttttttcccaggtattacagcatcggttcagcattactttagcattttgcacagagataacataaattcctctaggcttgtgagaattttc

SEQ ID NO: 387547 - DNA, 1396 bp, Cannabis indica
ctctctctctctctctatcactcactcaaaaagcttctccaaactcatccatggtgtgatttttccacctttccccttccaaatccccaaatgggtattcaaaaaacccaacctttcatcctttcactcactctgttcctctccacaattttctccggcgtcacaaccggcgccgactacaccaaaatggtctacaaaggctgtgcagaccaaaaattccaagacccaaatgggatttactctcaaaccctaaaaaccctcttccaatcactcctaactcaatctcaacaaaaacccttttccacaaccacctccggcgaaggccaaagctccattacaggttggtaccaatgcagaggagacctaaccacagcccaatgctccgattgcgtgggtaagatcccagatatggcaaccaagctctgcgatcgagctgtagcagcacgagtccagctccacgggtgttatctccggtacgaagtttatgggttcaagcaagtttccgagtctgaattgctttacaagacttgtgggtcgattcatgggaaaggtggtaacaataataatgggtttgagcagaagagagatactgcttttgagatggttgaagaaggtgttaagagtgggaatagtttgttctatacagggagttatcaatctgtgtatgtattgggacagtgtgaaggtgatttggatggtgatggttgtggtgattgtgttaagaaagctattgagaaagttagtagtgagtgtggtgattacatttctggtcaagtttatcttcagaaatgttatcttagttatagctattatcccaatggagtacctgcaactggaattgttaatgggaatggaaatggaatatcctcaacaaccaccaatgaaggaggtaatattttttgttgtagggaatatacttatttacttggtaacttgtgtttttttcgaaattatattttaaaattatgcatatttatatttagtaacatcaaattaaaaggagaattattttatatatattatttgttagttgcaataagagtttctataggattttttgttgcgatttagattgcagaaatttctatgtagaattccgtaaaaataaaaaaaaaaaaaactattttaaagtgtaaaaatgaaaaaactctaaattaaaatttaaaaatttagtttgaatttaaaatttgagtgtaggatactaaatttattttaaggaatatttttatttagtaacttttgttttctttttaaactaggtttatattttgaaattgtacatatttataaataaaaaattaatcataaaaaaaaatctttttttaatgagtaatttgcggcaaaacccccttaactatcaatttacttgcaaaaaaccatccaacctcatattttg

SEQ ID NO: 387548 - DNA, 2492 bp, Cannabis indica
tgggacatggcaaatccaccaagaggatccatcacattgaggtttcaagctacaactaatttagggtacacttattgggtttactctaccaatgccatacccaaaccttggaaggtcggggctgcttattacgccaatgttaagctcatcatcactaaataaaactaaaattcatacaagaattaaatgcttattagattgatggatctctttactacgtactaattaagttctagttaatatatagatgtgtagagaataagtaattatgaaaattatgtgtttcatttatgttttattattggatgttgtttttcttttcaatgctttaaaagagaataatgggtccattggactttgtacgtactttaattggaataatagagattgtatcatcaataaagcttatgaaatttgttattatattttataagtttttgctaccattattatatagcattactattaggcatgagttttgagatcgaagacaaatctgaattgaaatatagaggggatcgaggttgattatgacaaatgtgcacctcatatttgaaactcgtgcacacttttttttctcattgcacaaatttacacccaatgtctacttataatatacttaggactcgtttggtaatccttgtaaaagtcgtattatattaaaggtaaataataagaaatactatatttggatcaacctttgtattgtattaattaatgcaaccataatttttaaacaaaataaatcgcattatttaatacattaaaaataatctatgttagcttgtaatataatatttaaatgaggatcccaaagttaaatctagacctcggtcccaaaccccaaaccgagacttcagactcggaccccaaactagatccatacccgaccctggtctcaaatctagatcctgaacaccatcctcgaatctacatccgaaccccgactaggccccgacctaaacctagacccagcctcagccccgacttcgatcctgaccccaaacctcagaccccggaccccaaacacgaatgcgaacctcagacccaaacccagacccaaacatgcacccccaaactagctaggccccaaactcggtcccgaaacccagactcagactcaaatctcgaaccccaattcatggccggagtcagagttggggtcgactttatgtaaatagtataagtttacacaacctattagtatgattaaatatatactaaatattgtactgtattaaataatgctactacaatacaatacaatctaacacaatagtatacaattataatacaatacaacacggtgtatcaaataagtccttaaatgattaaattacactagacaatccatgttagcgtttcagaatatgaattaatgagcacgttaaatttgaaaaactaaagtggagactgggaggtattgccagcaaaattttgacctgtgcgttaagttgccaactaaaagtggagtgggatgtcttaaaggaaatcaaaggactggacaggaatgccataaccttgctccaactacggtcaacagggaaaatacctccggtcagagttcagacaagggaaaaagcatcgcccaataggaagtcgcccaaggcgaggacgaagacatggatccccgacttggggaaacaattacaaatgttaggccaacagaagaattagaaaaagtggaaatcaatccagatatcctgcccacgaagctcaaaactggtaaaggcttgctgctctaaaattagccttaataaaatttctgagagcaaactttgacgtttttgcattgtcacatgagaatatggtcggtatttacccattgtcatgtctcacgccctgaacattgatctaaactttcgtcgcgtccagcagaagagaagactactggacaaagaacatgcacaagtactgaaagaagaggtagaaagattatgcataaaaaaaattcattattgaagctttctacccggcttgggtggctaaccctgtactagttcccaagccaaacaaaaatggcgagtatgtatcgatttcactgacctcaacaaggcgtgtcccaatgactactttccactcccatgaattgatcaactcgtgaatgcaacagccggacattgaatcttgagctttatggatgcctcttcggggtataactaaatcataatgcatccacttgaccaagaacatacaagtttttgaactgatatgggtttatactgttataaaggggtgtcattcaatctgaagaatgctagggctaccaatcaaaggccagtaaacaaaatgttcaaaaactagatcggacggaatatggaagtatacgtggatgacatactcatcaaatccaggatggttgggggcatataaaggttctgaatgaatgcttcaaaatccttagaaagtacatgtaacaccctaaaaaaattaggcacgctacccaaatatttatgaaaccctaatcccctaatcgggattactaatccaaa

SEQ ID NO: 387549 - DNA, 675 bp, Cannabis indica
acaaagaactgggttttgctgaggtttaaaatgggactttgataagctattctttcagagcttgggtttgtttggtttctctctccaagctcagtgtacaatattagaggaagaagaagaaagagggcggaagagaaagaggaattatggtatttagttttttttttaattttttaatctttgaagaaaaagaaattttttaattttaaaataattaattttttttaattttaaataataattacgtggaccaataaaaattgtgtcacatgtacactatgtatacgtagacatttcaccgtagcagttaaccgcaaaaaatagatgaaaagagctaagtattgggggttagttgcaaaaatctgaccacttaaagagattatgctgcaaataactctttccctttccaataacattcattgtccccttcttctttctctctctatttatttttctctcactttttttttaattttaaaataattttgagctactttgttacgcggttgaatctaaaaaaaaattattgtgatttatttcttaatgtgaatcattttaaaatatgagaattatatatttttttctctattttcaaaatcaaagaaacatttatgttacttattacaccaatcatatattgattaattaccatatataatggtagactatatgaaa

SEQ ID NO: 387550 - DNA, 774 bp, Cannabis indica
ttttttttttttttgcttgaaatatggatccatggcagaaacataatctttcattacattatagagaaaaaaaaggtcaattttacttggtttgtattgcagtagggacaaggtgtgtcccactagatgcctagtttaaagttaaaccgcttgtctaatctgttgacggagaaaagggtccatgataatcagctcctaagttctcatgtgagcacccatttttgtttttatctgtattttatttatttggtattaaaagacagaaccttgattaaagttgggttgggtgtaccgagacaccaatcctaaaaagccattttaaaacatattatgatggccaatgctttaacctcaatcattctagttttcctgtttgctgtgtcagaagttgcaagaggatccagaacaaagctagctccagtccatggccaccggggtcgccgtttttctgctttgaaaccttctggggatggggatgatggcatttgttcttctatggtggaaaaccatggatatgtttgtcaagaacacacggttctatatctcaacttattgcacttcaatcaactctgcatagtaacagattatgttgacttttttttctttctttcttggtttattccaggtaaccactcaagatgggtacattcttagcattcagagaattccaggggtactgccacagggcaaagcagaaaacaatgtactcttttgcaacatggtgttctgatggttggtagttttttttttttgttttttagttggtctttttta

SEQ ID NO: 387551 - DNA, 892 bp, Cannabis indica
gattccattctctaaaccacttaaataaccgcccttaatagtttctcatatccccccgagccacatgacatatcaaatacttatcttacttccaaaccacttatcttttatcaattccttaagcaatctatttcgtcaactagttttctgcataacaacacacatcacttcatgatcatagtagctataaattactgttttccagtcaatcctaatttgtccaattttccattgaatcccacaaatttccttattagactccgtactcaataccttactaattattgctttgcactgcccatacttctcaaataacaacaatattaataagtattcctttacgtattaatcagtcataaagctctactaggctatcttaattaatacataccgtattaatcagtcatataactaggctatcttaattaatacatactcatcacatactacaatcaacttaactcatgcttattctatatgtacgtctaacaatgtaacgccctgaacctcaggaacgccacgtgtgtgattttacaatcttattatcaccaatctactagcttaggaaaagtgtggtttaaataaaatttgataattaaaaataaacatataaattttctttctttaaaaataccactaaagtacggggatcccctgtttataaaatttccttataacatatatcaaaaccatcattaccaaaataaagttacacttccaaacataaagaaaagaaatcgatcttgcttcccggaagccaagacaccatggctgatatgtacattactgggagacctctgactcatggccaaacgcagcacctaatttccttacctgcaccatgaagcacccgtgagtcacaatgactcagcaagaaaagctactaattaga

SEQ ID NO: 387552 - DNA, 1162 bp, Cannabis indica
ttcttaatttttattttgagtatgactaatttgagtggttgaattgggttcaggtaacaaagagagtagagactggcgaaggagaatggaggagctggaattggagatcagaaggagatataatggtgaatggtgcatactttgtggcctcaggtgaaggcgttgaggttaagtatgagaaggcttatagtgtggagcctaaatcagctgtgcttatcgatatgctcacattacatgctggtccacttggagttggtagcaggtatatatatatactaatgcattttttttcctcatcactttttctttctttgattttattttccattatgaattactttttcttcctttctttgattaatatccctataaatatataaacagtagtaagtagtagtatatagggtatatatataagagataaaattttcaaaccaaaagttggatgcatgctaggctggctgatgatgagatcctccaataattttatatggttggactacatatgaacatgtactcattagtcgtatccagtccctttcttgaaagcaaaacatatataatttgtcgtcacctttggtgacatcactgttactatttgtctcataatgttttttctactagtgtttcttcactatttataaccctaatacaaattctagttaggatccacttgccaatatttccattaaataatcctatctggatagttattaacataaattaataagagtttttgtctaatttcaatgtatcatttcaatttatgtttagtcactaaataatgacaatatttagatatgtgagatctaataagaactttcttagtcgtactacttgatttaatctgattgcatttcttgatgagtaacgatttgtgcatcaccataggatgatgcattataagtggggtttagtagtttttagaggaatttgaggcgtaatttttatacactagcttaatttctttatttttttttttttgggtataaacttcttttaagtttatatattaccgttaaattttaactagaataatactgtatctactttgaggttttatcagatgtatataatagttatctagttgatatatttaacggtaatttttaattgtcgtcaaatttgcaaaataaaataaacttaagtgggccaaaaaaaa

SEQ ID NO: 387553 - DNA, 1394 bp, Cannabis indica
aaaaatactatagaacaacataaacatttctagaccaaaaacaattatagccacaaaagcttgaagctagcaactatcaatacccatcaagggttccaaattgtgacacaaacatccaaaaccaaaatctacaaactatgaataaagcttactactttcaacataaaattttctcttataaccaaactattctcatcgactaaattaaactcatcacctatactctaacttgtaattgaagcaatgtacattttcattcaatttctattctcttactttgtcgtttccacctaacatataatacccaatcaacttcatctcagtgtcaactatacccaaaagcaatagttgatgcccaaaattaacaaaaccaaataatatccaattaaaaagacaagcaagaaaaaaaaaatggaaaaattgggaattaatgggtcatcaaggtttgaaaaagactaacataatggtaaagtgcattatcctcgcaaaaaaaggtgagacttttcaagtccaaagccaatgccttgtctaaaccctcaatcagagcttccaactctgccgcttcagagctcaaaaccttcagattcttcctcgaatggaaaagcaaattatctttaccatcacaaatcgcaatcccagcaccagccaccaccaccttcgaatccctaatcatctcctcgctcaccaaacccttgaagtacaatctcaacacctctgacccaaccatcgaagaagaagaagaggacgaggcacccttgctattattaccgtaaggtttctcaaaccaatctccgtaactcgaccaataatcctctggcaaagtctctatttcagacgcaaccttctgatcatgaatccgacggtccagatcctccctagccattctccattcctcactcgatcgtttccgatcaccgtactcctgcatgtaacattccaaatctctcaacaaaagcgacgaagcaacgcccaaaacgtcgtcgtctttgacatccgcagccggaacgacgtcgtcttcggtgtccatcttcgtcgaggaggtggatttgttgttgttgtggagaacaagagaggaggtcatggcttcttgcatttgaatatggaaagccaagtcgaggtcggagtctagggtttgagcggccatgagttccttcctttgctcgtccagtgcgagttggagaatgtaggcttcatcatcatccatggctgccattgttagttgtttgaaggagaaagagaaggaaaagggtcgtggaaattttcagtttttcgtcatggagggagacgaagtagcttcttccacacgaaaccaaagaaagttcactctttttatactgaaattttttattttttttatttttattgttgttgggtggatttttttttaaaaaaaa

SEQ ID NO: 387554 - DNA, 1924 bp, Cannabis indica
gaagttttttagttacataggcacacttttatatagaatagatatatatgtgtggtagttcctactaaataaaaaagtctctacaaatgttattttttgaaagttgttctctcacggatgtctatctcggaagaaatctaatggaatgatagttatgcccggatgggagttcccggatgactatcatgcccactccaggtccagtcttctaggtagctagccaactccaggatggagttctagttagctagttatctctcctggaatagtagatttggatagtcagatgatgatatcttattcgatagcattatcagcgcgtgtcattggcccgtgagtccataagcttatatatgttcctggaggctctcatacttaagctgacgtggagacttcactcaaaaaggaattggttaagtagttagttattgctaactaacttaacaacctcatttcttgcagccgccgactttaggatcttgatcctaaggctatcaataccaccttgacttgttatttcgagataggagatgaagaacttagttcagatgttattgagagtttgagagagaaagattgagaggtacagagaaaagagagagattgggtttgggtgttgtaagaagaatcttgtgtagataaagaagattcttggatgtaagtgtgagagttgaaacacttagtgagaactcaatagagaatcacgtctcgactgcattgtacctattcttgcttaatcaataaagaagaattacgatggtgtttcacaactagagtagagtcatcgatcacatctatctatcggacttgaaccagtatatagtttggtgctaattttattttctgcatttactatttttgactttacgtactttgtttgctcctgttttacttctgattgttattctcaatttgttaatcttgtcatttctaatcatttgattgtttaaaatttagttgatttgactttgcactattagtcgtaattttttcacaaatcagagcttggtaatcgatcaagattccagaatcaagattctttccgctacaatttttgaagaaactttgaatgtcatcaatgacaagattcaaattggagaaatttgatggcactggggattttgcgctgtcgagagaaactctaaaaggaatcctagtgtaccagaaagtctccaaggttcttagagacgagaagttattggcaaaaaaaccaactggaaaaccataaatggaggagatgacatactacatgatgatcatgtagaatctataaaacagtgtttgaagaaaactcatcgtagagaagacggcgaaagtcaggccatcattttgttgagattgctcccaatagcataccaaaaagtaaaggctcctatcaaatatggtagaaatgtgattgtaatgaaggacatacttgctgcacaaaaatcaaaagattttgaattacattaaaagtatacatcttaaaaatatcaaaagttgcacatcttttcatattcacatgtacaatatttttattaaaaattcatattcataaaatcattttaaattaatatgcaaataatgtcaatatttacactcttaatattatcaacaattagtactcacgacaatttcgtataaatttattttaaattaaagtgatgtataaattaataataccaatatttacaatcttaatattattcataataactagtgacatgggttatcatataaatttagggattattttacaaaaacataaaaacaacaaaaaaattacaaaaatacgatttcacggaattttaaatatttttacgatttttttgattttatttacagaaaatattgtctttttatgttgtactcttgttaatttgttattggttttttgttatatgtatgttattttttgttgttattttgatgttattttgatgtt

SEQ ID NO: 387555 - DNA, 1638 bp, Cannabis indica
cgtagaccagataagacaaaaattttaactcttgcaatacaagtgacatagagtcataagtctgctcggtacacgttaggcgcaactatacctagtaacgaaagcagtagggtaaagtaataacctacaaaaaacaaaacatatttacatgtgtaattatttaaacttaagaaaaaatattcaattttaaaagataacaaagcatgataactccaagattaaaagcacccggccaaccagttgtcttgaaacaaaatacaatattttccaagtttaaagcctcttggtcagcatattgtattaaaaagggcccataagctgaaatgagaaaaaaagcaataaaaaagagaaatttcaaacacctagagtcctcggctctttgtacgggttaggtgtgtcattagcggttgggttctcattgccttggttggtcggagcattggtgttgactgccttgaattattccttgtctttttgggcttcacaaaactaagatatgtctctttgttttaattgaggtaatcaaagtttgcttcaagtttttccttccaaaattcataaaaaacatccagggcaaccgtctccaagctttccaactccttttgaaacacctcctgctcggcaccaaattctgtccgctaagatttgagagtctcctccaaaacattcttttccttagtcgaattggaaagaagggtccaaaggccttccctctcgtccttcaaagaattaacatcgttagccaaagccttattgcccgcttcaagctgagcagtgaatgacatatcattcatctccttccttaagtcctcaacaagcttgttggcagccaggagttatttattaacctcgcctagttgggtactcttctgctcgacctctttcttagcttcctccaccacctttttcaagtttgtggtggttgttgtagcttttaaggtcgcggacttggctcaggagtacgtatatgtcatcttcaggttgagctgcacaatgaagtaaaattaaagtctctacggatggaagcatggaaaataaaaccaaaggaaaattacttacttgggtggattccttcagcaaactacccatgaaaaactctatagacatgtcctcccctttggccagttggtcattcaccttgggaagcactcagtcttggtaaaactaaagcatctccttccccttcttagtctcagagttcagcacggtaggagtcactgagggtttgggtagcccaggctcatcagtacatcctcccttagaacctttggaaagggcagtcgtcgactgggatttggagttcctcttggttgatgggattatatctgacaccacctccttagaaacatcagcaggagggacacctgagctcttctaaaaagttggttgaggagtcttggtgcttggaattatgcttttggctggcacatcgtccacctttgagtgctttgctagagacttccgtccggagcatcccccgacctcttcttaagtgcgtgcagcatcctctaagacataattgcacataagtaacacaagaatgtcagaacaagcatgattcaaataagtaggggtgatcgcagtgcaagtggtgtagtttttgaccattttttcaaaccaactcgcacatgcagtttt

SEQ ID NO: 387556 - DNA, 702 bp, Cannabis indica
tattaataattaaaaaaaaaaatactaatgttaacatattatgtaggaaacattcacatggtcattttgtctaatccaactaattaaaatatagcttaatgacaaatgtacaacttttaaatgaagaaaacaagaacaaaaatattagaaatagaaataaaaataggaaaggggggaaataattaaagcaaaaaaaatttacagttagttatatgcagatgctccaagttgttatattttatatgtttttgtctactactttaatgaacataatttatcatggtaagctgaataccagacaagtttacagttttcaagtggtaatttcaatgtaacgatctatattattcaatattataataataaataaaaatgggctaactattattatagagagattagtaaaggtttgaccaagcagtgtggctgtttatataggacaaagatcaaagtcaacggtgggagaggtttttggtttagaattactaaatatattctaatgtagatgcacagttttgtcattttaagttaattatagttttagagagcttagattcttgtcaggagaaaactttttttttctttctttatttgattattttaattgccatgttaatagaaaaaaacaaattatccactaggcctgcccatgtatatattttaatatattcaaaaaattaaatatagggtaactcttaggta

SEQ ID NO: 387557 - DNA, 916 bp, Cannabis indica
aatttgtggctaaaagtaaaataattataaccaattacaaatcattattcttatgttgtaaaaaatcgattaaaagtattagttacaaaataattaatcataaattgttgctactaaatgtgttttcaatcgtaatatttgttgtaactaaaactaaattagtaataacttgtgtctaaatgttatattttagtcacaaataattttttattgtgactaaaaattaagtcacaatcatatttttttttttggtgcatatatcaaataatgagaatttaatgcaggcatccatgtgatttttttgctcatgcatgcatgcatatacataaatgatatatagatacatacatataaatataatgctatataggtgtaatgagaaagagaaacataagtgagtgggtggagatgtacaaagctgacataaggcagtttttattgtgtgtgagagagagaaattggagatgacgaattcacaatagtacaacaaacaggtacgttagctacttaataatcaatgacctcttacctaattaatgaaactcaaaaataaatcatgtaaacatttaactatatatataatacttagttgtatgagttcaactagcggggatagctcagttgggagagcgtcagactgaagatctgaaggtcgcgtgttcgatccacgctcaccgcatattttactttaatcaaataaatgttttttttttttttatttatttatacaacagtgccaaccaaccgattgaatttttattcaatttatcacttttttttgaatgatgcttaatcaatgagagttgaaatataattctcattgttaaaagaaaaagagaattaaaatatgatgggaaatttgatattatattgtaacgtccccgcttcaaacttccattgggatcttacacccacg

SEQ ID NO: 387558 - DNA, 4089 bp, Cannabis indica
aataaaaatgttggatgacacacctaaatggatgaacccaatttcaccgtatcttaatattagaacacttccaaaagactgaaatgaggcttgaaaatgatgagaaaagttgcacggtacctaatcgtggatggtgtgatgtatagacaaggtttatccatgcctttgctaagatctattacaaatgaataagttgtacgactttgatatcccaatttttgcccacgtgacgtggcatgcttacgtagacaatatcaatgccacatggcattacaactcactaataaggaggtcaagtcagcatcctgaccaataggggtcccgacactcaaatgggatgacaagcgacagaccagccacccttggtcggctagctttaaagggtatgttccatcaccaatttttcttataacttcctatgggccttccgagtttggtcctaagaccccactccaggctcatgagaggcagggaagacacttcttaaaataaggtcttcgtttcgaattttctactcttgatacatttggagttagacctgtgactgttcttgaagctcctcaattaaattcaaagattcctgaagtaaagtatggttttgagttgggtcgtaggtgtccctcttgtgtaggcactgtggattcaacttggattacggcctcgcacccataggtcatggagtatgaagtgtggcatgtagaagttctttcagtggttctataggcccaaagaactcttgaaagttctttcggcccgtgtgctttacaagcatgaagcttctttttcaaagtggtcttcagaattttactaacggcttccacttgtctgcttgcttgacgtctggcaatagcagaaaattgatgattccatgtttggcacaaaaattagtgaattgatcactatcgaactgctttccattatcagacactatcttgtgtggaagaccatatctacactctatatttttaattacaaagtgtgtggccttcttggaagctactatgtttatgggttcagctttcacccacttagtgaagcagtcaacagcgacaatgatgaatttgactcctcccttatcggttggaagtgatcccactaagtctattccctaaacagtgaaaggccaaggactgttcatgagggttatctccgttggtggggcccatggaacttttgagtaacgctggcattgctcacatttgtgaacatattcagtacaatccttcttcataataggccagaattagccttgacgaatgattttcttgaaaagactgtgtccgaatgtgtgatctccacaaaatccttcatgtattttgtgcatgacgctacttatctctgttctagctatgcacctcaaatacggcattgataatcctcttctatatagttttccatccatgatcacatatctggggacttaatactggaccttctgtgaagcagctctatctccaggtagtgtacctgtctccaagtacctgagtattggagccatccaggaagttgagtggtcgatggcagaaacccctagtattttcgtgctcatagtgatcaaatgtgcgatggggactagtccatatttctctacttttggatctattgataattttgccaacatatctgcaaaaacattcttatccctggggatttgctttacagaacaatgattaaaatgttgcaacagctctcgagtttttgctatgtaactatccattttttctccttttgtctagtactcccaagacactttcttgactacaagctgtgaatcacggtagactttgatgtgtttagcgccgacctcttttgctagttataaatcagcgatcatagcctcgtgctcagcttcgttgttggaagctttgaacttgaattgaagtgcactttgaagctggagggtctgtggagatattaaaatgatttcggctccaaaacctttttcatttgatgcctcgtctacgtatatcttccaaacttctctctcgtggaccgacatttcaagatcgtcatttatcccagtgcactacacaaagtcagctaaggcttgacaattaatcaaaattctaggatgacattgtatgtcaaattgactcaattctattacccacttcaggagtcttcctgatgactatggcttctgtaaacttgatagagagggtggttggttagtacccttatggcgtgagcctaaaagtatggttttaacttccgtaaagcaatcagtaagcaaaaggaaagcttctcgatcataagatatctagactctgcgtccagcagtctcttgcttacttaatatactagaagtagtacctttccttctttttgcactaaagctgcacttatggcatgatctgacattgccaggtacagattcaacatctctccatcaacgggcttggacagtattagagccttcactagatgttcttttagttgctggaaggatgttttacattctactaaccattcaaatttgtgatttcctcgaagtacgttgaagaacagtatgcacttatctgtggatttggagacaaatttgctaagtgctgttattctccctgtcaatttctagacatctttatgcttcctgggtgaaggcctgtctataagagctttgattttctctgagttcacctcaatccctcgtgaacttaatataaaacccaagaacttccctaaggaaactccggaagtgcatttctttgggtttagcttcattctatactctcacattatggaaaaagcctcttctagatctttgtagtggttcttagaggtttcgactttactagcatgtcatcgatgaacattttgtttaccattaattcgtaagtggctccaacatttttcaatctgaatggcatgaccttgtagcaatagattcctttgtcagtttggaaactagtgtgctcatgatcagccacgtgcattttaatttggttgtagccggagtatgcatccatgaaggttaagagttgtaatctcaaagtagcatcaaccatctgatcaatgcgcaaaagtggaaaacagtctttaggacaagctttctttagatctgtgaagtctatacacatcctccatgtcccattaggctttaggaccaaaaccgaattggcaaaccacatgggatatagagcttccttgaggaaatcaatgtttatcaacttgtctacctctatttttcctgcttcttgcctcgctagatctaaaggtctctacttttgtcaaattggatcagcattgggatctatttttaatgcatggcaaataacacgaggactaattccagtcgtatcagaatgagtctaggctaacacatcactatttgccttgaccgtggaaatgatcttttccttcatgcaggaggtaggttcttccccactcggataaccttggtgggatttccatcatttatgcatacttcttccacttcctccattggttttatgacacgttccatgcaaattcgtggatcaagctcatcttcttagatcaccccctgtgctggttgggaagatgtcctggcttcagagttatttcctttccggaccataagtacagttctggttgaaacaatgtagcaactttgcgtacttctttgatctcttttgatagtccctatgcttacggtatagcttgagaattttaagcacagatgttggatgaatgtcactactccaaaatctattaaaaatggtcttccaagaacaacattataagtagtagggtattcaactatcataaatgtgttgtacttgaaggatgatattgtgttgtttctaggaacttccccacttataatcatcagaagttgtatttttcaaatagcgattaacgtatctccattgaaaccttgcagttgaattggacatggtagcagattggctttcaccagaccaatggcgtggaaggctcctttaaaaatgatttttacagagcttccattatctactagcattttggaaactcttttgtttgttatttgagcttctattaccaaagggtcattatgagggaagtgttgggttttgtgccctaaataaaaaccatttcaatataatcagatttgctaattaataaagatca

SEQ ID NO: 387559 - DNA, 1705 bp, Cannabis indica
ggtaatgacaggaactgggctctagcaaacggtccttggtgcgttcgtggttatactttggctttgcaagattggactccgagtgtcgacgggccgattgtgtttaattctctaagagtctgggtgcaagttcacaatcttccccatgagttttactcaaaggctaatggattacttcttggggggttggttgggtctgttataaagattgatatggaggaggacaaaccagcctcgtggacaacattcttcaagatcctggtggatatcgacatccttaaacctttatgttcagggtgcttttttgatctaaattctggtgtgaaacaatggttgcaagttaagtttgaaaagattgggattttttgttaccactgtggtcggctgggtcatcaacgacgtggctgttcgttgtcgtcgccggtgacggtggcaaagtgtgatggaattcctttcccaatgtatggtccgtggctctctacgtcctccgcgtaccacgacgttttctctggtccatcatttggtggttcgagttctgtctcttccatggccgtggtgaagaaaggtggtgtgttctgtcctttaatggcgtctccggctccggttgctggtgaatcgaaggatgtcactgggttggttcgtcgaccgagacgctctttgatggtgactaatcgtgcagcagctaagcctggggagctccagcgattggtgtggcatcctaagcagtcggctgcaggtggtaaggactgctttgcttcttcgggtaatagtggtgataatgggattcggatacagggaaaagccatgctggattttcttctttgaggagaccacgagtggaaggtacgaatttattttttaaatcaaatgatggggccgttgagttgtcttctcatgatggtgggccgtctccgtgtgggccgcctttgaagatttgtggaccagctgaagagaagttggatggtgggcccaaaattttgaaccaaggtagcttccatcctagtgggccggtccaacgacttgggccgattttaataagtggtgggcctgttttggaggaatcaaacttcattaataattctaatgttgggcatgtggacccgatttcttcaaagcctactcaatctaatattgggccggttcatttggaccaagctcttggtgggaaagttgatctcacaacttctaagcccgttggtgagtgtgtaaatcatgtccaaattaatgaagagcaagctttgtctcttttctttaaagctcaagaggaaatgatgaatgatctcaaacactttggcaagcttgatctgtatgagattcgcaagataggaggtgatattggagtcccggcttcttccgaggttaatgagaggactactcctttcaagaaaaggaagtttgaatcttcggcatctctttgctctaggccacataaaatccaccgcaagcacccaggtgtagtccgagactttccctgggactccaagcataaagagaatgatcctgatatggtatttgatgagccttctgaggatagttctaactctccaagccgatctggtattctgaagaaccccttgattggttcttttgtgattgatgttgatgtttcgagtgggtctgcttactctcatacccctgtggaggagaatgtggaatctcctccacaggagccatgagaggcattgcctggaactgtagagggtta

SEQ ID NO: 387560 - DNA, 2196 bp, Cannabis indica
tcttatatatcttccaattgtgatatgtagatgttgtgctgcatgtagccttcatatttgttaccctgccaaaaagggctatcataatattatcactcattccaacttttttcatcttttagatacattggaaatgatattgtagaagagaatttatcaatcccactacacaaggaattggatgccttagaaagaaattactacttgaaaaacatgcatgatatacataacattttctttacatgctctctgctcttaaacataacttactgcaaatagatattttcagccacatgatagttcctacatttcaggaaggatgttgttggcaattataccatgagatccttttaccatgatgtcttcacccttcaggttatgacctatttttgcatagtaaatgatacctttacataattggcaggttgcctgagttggtacttatatgagattgttccattaattttatcgttagtttataaatacggcctgttgtgcatatctaacttttgtttatttatttttaaagcatctttattcaaaggaatcagtagccaaaagtttattgatcagtcctctttttccatcctctccacaggaaagagtttccttataagtattctgacactttttattttaactgaaatcattcttcagagtttagcaaaaagcttgccgaaggaatgtgtcgaaaagatggaagaaccatcagaggtaggttatttaactcctttcctctttgattttcatattatgcatcaagtttgagatgtagttcccatatttcttctaactcttgatttataacatatgcctttgttaccttgctttgcaatgccagtgcctttttccacatgaaattatcaagcacataaaaacaccagtgttccttgtcaacccagcttatgattggtggcaggtaatttcctccaattccaaacttcatttgattactatggattatagttctccattaatttcttttatgctaattgggtaatcatcagatacaaaacgtgttgataccagatacatcagatccccatggctactggcagaaatgcagacaaagcattctcaagtgcaatcctaggcagattgaaatactacatggtaatagctgaaccaagtcacattgttgtagggatttctaataaattttatatgaaaatgatgctggtatgtaagtcatgcacttacatgcaagcaattttctgaaactagtgaatgattagaatacataatagttgccttaccaaaagaaaatacataatagttgcagatcctgtggaaacataaaaatatatgaataaaagttcagaagttcatacgtaaaattcggtccacttcctggagatatcttgcctaatactccattagaatcctcatctagagtcagttgctgaagtctcatttgattattttagaattctcaagtctttcaacttagcatctagctggacactaaaatattacaatgtttggcaatgtacgtggtttactgtaattgacatattccatgtaggtttcagaaattcacttttgaagggcctgagtgatttccagaaaaataaggatggtggaatgtttataaattcttgttttgctcactgccagacatggttgactgagacatggcattcacctaattctcctagattaaacaataaggtgaggaaagtttgtttgagccttatctgttctatgaaaatctgatgaaacttcttgtgttggattcttgttaagcatttctaatatgcaattgaatttatcaatgtggaacagagtattgcggaatctgttggtgattggtacttcaacaagagagtggttaaacaagttgattgtccatatccatgtgatcccacctgcattcatgtcgacttctcacagacttaagtaatctacatgggatcttgtcttcctttttttttttcttttttgagagagagagagacagagagaaaaatgttcctatgtggtgttaaaatactgtcttgtccattttttactttgtcaatgtacattattgtgtagaccctatttgactcgacagacattagttggataaaacatataggctatattgaggcataaatatataatgttttagattttatacactgaaatacttaggtggcgtttggtaacacttttttaattagttttctgtttttaaaagtaaaaaagtgaaaa

SEQ ID NO: 387561 - DNA, 812 bp, Cannabis indica
atatcgctaattaatcgcaagacgaatgtcaagtactaaaaatagtgaggaatctttatctcagccaccagcactaactttcattcagtctgtttattattttttagttgaaaaaaaaattagttttgttttggttaataagagaataattgacggatttttggaaatatagatttttctttctttttttttttaaaaaaaaaaatatgatttaacacttagttttgtagaaacaaaaaaatcattccaaacccaatctacatagtgggcatccatggaagcccattaagattctttttttttaccctcaataaccagtccctcttctcacaccaaagaaatagattaatactatttacacaaatacaaaatttaaatttgatatttaccatttgtttctccacttgataaactcacacttcatcacccaaaaaaaataaaggggattttttttctcttgatttaatcataaaatccttttttggcttcaacatatttttgaacataataagtcaataaaaaaatatgctaccatttagtgacaattttttagtcacaatatagatattttgtgattaaattttttgatattatatatggactaacataattaagtattactcacacaatattaatattaacatttaaagaaaattatcgatagtacatagtattatcatcaattaaataggatagacataacataaaggggtaagttgaaaaataccacttttattaattaattgatcaaatttacctctaattttatatttgattgaaacatacctctttttatatgtattgtacccaaa

SEQ ID NO: 387562 - DNA, 634 bp, Cannabis indica
gagtaagcttagcagagaatccagaagcagagttggtgtaactgtaagccagagcctccttggccgcggcttcgcacccagaacagaggctaagattccaatgtgataagcctttggttcctcgttgttttggggcttttctgtgtatacaatgtgaatcgatgatgatgatgatgaattctcatcagccattgccatattaatccaaatcaacagtgaagccaagaaaaaacaaagttgttttcttttatgactcatcctcattttttgttcttcctcgtaaagataggtacacataattgattgaatgattgattgatagatgtgatgtcgttaaattttagttaagtggttagaattggtttttttctttttttttaggaattttgtttatagcttttttatcggtttggtttgttggttgaatttattttatatttggctctggctaataccagatttgtatctatctatttttagactatgtttgatctatatattgattctataagaaaagaaagtgtaagaaaaagataatcaaggacagacctacctgggcgagggagagaaattacccacctctaaaaaaaattatcaacacttttttttttttttaatgaataagattaattat

SEQ ID NO: 387563 - DNA, 2415 bp, Cannabis indica
aagagtccacttctccctttgaaagttgtaactgaccttgaattgactgaattgtggaggaagagagataagcactaaatgcacaaagcaagtcatccaaatgcttaagcataagtgcctttaactttgaagcaaggtgacacatttccataatatactcccttatattttcctagccctaagttcctctaaaagatactagttttcgcttgatcactttttgcaaagcgtttctcaatttcagcaagaaaagttgtggcatcaatgacctcctcagacatcgcacccctaaaagcctcaggtataccgcacttaatgatcataagactcacgggatttgaacgatctcacttcttataaatcttcctttgctcggaggtactgacatccgtaagagaagccggccgattcatccttaaggtaaggtcaagatccatgcagccaagaacaaggaaaatattctccttccagtctttaaagttactaccattaaggactggaaccgaattaaggttagcatatacaaaagcaacaactgaaaaagaacaatacaattaataaatttacatgctctaaaaaaataaaacaataaattcaataatggtaattccatctcaagataccaagcacatcattaatatcaactctttagatagtaatataaattgtaatagcgatcaaaattattgaacaataaattatgtacaaacagatgtaatctttagactaacatataattcacacaaaaaatcttacaattgtcacacatttatcaccacaggtatgtatgaaactcggctaaataccaactcacctttgggttcgttaataaatgcatggattatgtacacactattatctctatattttaaataaattaatttacacaaaagtgatcactttattgatattttgtttcaatttatttaacaaaaatattatacatagggcccccttacgtcttcgctatttttaaacatacgccatcacctcaaataactttggtagcgaatttttataaaaactgaagacaaactgacctaaaaaccgaagagaaaggcccttttctagttgtgatagcatatgataatatatagtctttgctaattaatatatacctttacaggataagttctccatttcatatacaaatgacgagataaatattatgtatgatcggttgattcattatgtgaaagccgaagcggagcgacaacagttgccttgttaatgagtgtgtatatatctcaatttattgttactatatagatttataaatatatttagatgattattagcattaacctaattattgttactatatagatttttaaatatatttagatgatattagtgttagtttaattattgtcactatacaagattttaaatatatttggatgatattagcgttagtttaattattgtgaccatacaaatttataaaaattaaggtaggagaaaaaattacaaaaattctacatttttctcttgtttttctaatgtaacgactgaaaaaattgtcgttgaagaaaacattttataataaaaaaacgtaatcagtactataaggcacggtttaaaatcgtcgccaataacagggtataggagacggtttaaaactgtgcgctactctgttataggcgacgattttaaacggttgggattttcacattagtaattattttgaaccgtcgcttattctgcccgttttgcgacggtcatataggcgacgattatagaaactgacatgaatactttaaacgactgtttaaaaatatatatatatatatatataaaaatcatttttgtaatagtgactgtacttgcacctagaaaaagatgctgatgagtttcaacatgttgctaaaaaattaaacaagcaaaaaatggacatccttaatacacctaaattaagcatcctttctcttattttaagcctttgaaaacatgcaagtcaagtaataaacttgtacttgagagcactctacctattccaaatcaaggaaaaagcaaaccttccttattatcaaggaacttctatggtacaccttataaaacatgcactcaagcactccttacaattctagcatggagcatatttttaaatctctttctttttgtatgatcgttaatgttataattatttaagatattttataaaaattttaaaaaatttaaaataatatacaatattaaaaatactattgaaagaatatatactttggaagtttgtcctctcttatatctctaataaaataataaactatatatttttgaatttgtgttataataatatgtgaattaaattatatatatatttttacaataatttatgaaataaatattagggaaatttacacagtttactgtgttttcccattttatttcttttatactgttacactccaaaaa

SEQ ID NO: 387564 - DNA, 1638 bp, Cannabis indica
agattgaattggataaacacccctaataatactattaccttacaaaaaaataattatacaacggttgaaatgtcttatttttcactttaacatctcacaggctttagaaagcgatggccaatggcacatgaccagatgaccttctcaattttctataaactattattttctagggggcatttttcatcaatagtgttataattaattttttattcattttaaaaagtagaaacagcataatggaaacaatataacattaaaatgaaaataacttttataaagtagaaacaatataacctcgaaatagaaacaacataatctcaaaatgaaataatttatataaaaataaaaacaatataacaaaatgtaaaagtgaaaaaaaataaaaaatacagtatgcatggcaatagaaatttcttttatatatttttatatttgtttacataaaataaatatatttttttttactattacatatttttaattttgtctttataatttttattcacgcatacctatttatgtgcctaagaaatttatatttttttctcccataaaaataatatttttttatcaatggtcaatttttaaaaaaagtttttttttttgaaagagtaatttgaatcacactttgacaatcgtcgatgcagaaaaacttccaatcaacaagctaattgtctagccaaagataaacaaagtcagaatatgagtcactacaaacaaagcaacttatataagactaagttatctcgaaaatttagacaaaacaactcgagctagaccacattcaagaggcaggcatctgaaaaaatcaatcaattagacgaaaactacttgcagaatacatagatataaaaagtggattagcacactatacaacgataatattttaatttttaaattaaggataaaactcaattaatattttaacaataaaaatcttatctttgaagcttttttgacttagcatgtcaccgttgtatcgaaactaatttcttatgcccaactattagagttaagttttccaaagcagaaatatactagtcaattaacatgcaccggtcataaaaattgagagattaatcaaacttaacaaatcaaaatctaactaaactattttgcccaaaaagtagcaaagtcaattagctaacaaataaatgataaaaaaatgatataaaataacagaaaaattattctaaaattgttaaaatatgattaaaatcaagatttaaaacttatctgtaaaaattgataatagtattttttgaggttgtatccatgagcaaacgagctaataatatactgcaaactagtaaaataatatggtacaaaagccaaacaaaatggcacaaacttaacagtgagactatagattgtctttagcatctttgaggtttgccatatctcatctttaagtctaggctaattagtaatttttccccctacactttgacatgtaccaaatcgtgcccactgaactattttggccgttaaaaattcccctcgaactattgagattgttgaatttaaggacttttgtctaatttcattcaattttactatttcagtgattgtttatgtactaaaccatactccccagactttgatatctaccaaatcatgcccctcaaactttga

SEQ ID NO: 387565 - DNA, 2579 bp, Cannabis indica
  modified_base (576)..(576): a, c, t, g, unknown or other
gctctctaaaatatatctcttgttaaaaattcctcttaaaatataacagttacataattatgtcctttctattaagttttttttcttttaccgttaaaaattaacttttttagtctctgaattttgatcaatacaaaatttatcccttttattgaaaaaaaaaattaaaaattataatactctattaattctgaaataattaataacaaaattttaaaacttaataaaaatagtaaattaattaaaaatattaagtttatttaaaaaaatctaaattattcctaagaaaatattttcaaactttcttaaatttataaacacatatcttaaaaaatcaaactaacaaagtacaatacataatttaaactaactaaaaaaattttgaagaaaaaatcaaatttaattatatttataaattcatatgttaaaaaatgaagaaaaataattaaaaaaatgaagaaaataatttacataaattattatttttaataattttttttaacatgtttatcaaaataataagaaaattagatgtaaataatagtaaaacaacattcaaataatattaaaataacntaaaaaaaaataatatacaaataacaaaaatacacaataacatacaagattagcaacatcaaaagacgataaaattattgtaaaaatatttaaaattatgtacaaccgtattttttaaattttttttgttattttttgtattttttaaaataattcttataagaaaaattatagcaaatgactccaaatcctaggattatgatagttaatgtccttatttcaaaacttggagaatgactcttttagactatttttattatttatattatttttttccacataaaacaaatcaataattttttttttcatatttgttttagaattagaagcaaattacttaaagattaaggtatatttatattagttttgcgaaaatcttttttatttgaaagttttgtcgatttttttaattttttatgagttgttgtggtttgttggtattaatagtggtctatataattttgttagtatggtatacatatattgagtattaatttagtattgttataatttttttgtggtatataattttattattacagtatattaactttcagtgatacgatatatcaatactattgtatatatttaataatgggataattacacaagacataattttttgtaaaaaaattatatttttacgtttaaagaatttctttttatatttttacgatttttcataagaataacacaaaatcaacaaaaaaaactacataaaagtaacaggaaaataacatcaaaacaacaacaaaaaataacatacagataacaaaaaatcaacaataaattaacaagagtatactatataaagaccgtattttctgtaaataaaatcataaaaatcattaaaatcattaaaattctgtacaactatatttttgtaatttttgttattgttttattgtatttttgaaataaaccctttaataatctaatatatttatttatttttgttaaaatataataatatgtcatactaaaaaaattatatagtttaatttaattattatatattcttttaaaaaaaataatacgtaataaatatatttttataattttattggctaatttattatatttggtaatttttttttaaaaaaatgaatatttattaacttagataccgtttggtaatacttttgttttttaatcttttagtcacaaaataaaagtaaaaaattttcttttaaaaattttgtttttgaaaaataaaaatgcgttttgtaatcacttttattttccaatttaaaaaaacagaaaacaaaattgtgttctgtaaagtttatttttatttatttatttatttatattttatttaagtcgagtttacgttcgaggtcgaattcaagttcgggtcagaagctagattcagcaacaaggccattggggaaatttgggtccgggactgatcggagttcaaaatattgtttaaaaaaatattaaatgtgattttttttatttttaaaattttgattctcaattaaaaaatttaaaagtgaaaacaattttataaaacatgtttttgaaaaatattttcaaaaaagttgattaaaaaaatgttaccaaaaacttccttaatttttaaatttagtgtcattttcatctaccttcgtctaaaatttcaaataaaaaagagtaagcatgctacaaaacagtgattgggccaaatcaaaggaaaaattacattctgccccatcttttagaattgtttttgcattttataacaaaataattaattacaaatatacatacttatatttttttaaaaaaaaaatgtttccaaaacatgtaaaagatttttacaaacatataaaagttgtttacaaacaattaatctgtatttttataaataaaatttgtacttttgtagtataccgtatttttcattttcttaaaaaagaaaagttcggtattattgaaaactatccaattttaaaggatcatttacaaaaatattggaattccggttaacttttacaaaaatactatcacacggaaaa

SEQ ID NO: 387566 - DNA, 947 bp, Cannabis indica
gttgaactcgagtccgatttgtctctacactttgaccagactattcgaagtacatcaccagtggttttctacgttttttgggggatgctgatggactgttgaaagcttctatccttaaacatatttctttatttttcaattaacgatctgttaatatgactgcgcacagctttgctagagcgtcatattctttttcagatctaagttttcagtaggagggatgtttccactgaattacagtcttgtcttttggctgatttagcaaattaataaaattccaatttgcattacaaaaaaagtattttattagtataatatatatatatatttaattttaataatatatggatgatgattaatattgaaattatttgattaataaaatcttaaagttattacttcaataataataataataaaaagagtctgattaattatgtaatttatattaaataaaataaaattatttatgtaaaataaacagaaataaaaaaaaaaaaagaatatggcttgataaaattatcaaattaattaatttggaattattaataaaaaacgcaaaatgtttcaggaagtacttaatttgaactctaaaaagattatgtattagttaattatagtaggattaggattaataatattatgttatatatataattaaagacacgaagaagtacttaatcacatcgatcttgatcttctttctttctttctttctcaaattaatttcatgatgattgaacaacaacgtcgtaaaagaggaagacctagtaatcctcaaaaatccattaatcataatcatcatgagatcatgaagaagaagaagacttataattatgatcatcataataatgatcatgaaatgatgaagaagagagacaaagatcatcttcaccacaaaaatcatcctaataataatattccttctcataattataatcatcatc

SEQ ID NO: 387567 - DNA, 2142 bp, Cannabis indica
gtttatcctggtctattttcgttgttttttagtatttctaataggttgaatttgttcatattaaatcacaaatagacatgtagatagagttacgtacgtggaaatactattctgatttttaatgtttcacaacagttgcattacaattgcataaacattttgctaactgttgtttctccacatattactattaaggtacaactaattatcgatcagtaacaaaaaaaaaaatactgacaaatagtttcttatagatacacattcacatttaatatttttagttgcaatcaagttgcatgttagttgaataatagttttgttactacagtatcatagtattataaaaatagagctaggaattatcaaacacgtgatttgaaaaaaaaacacgattgttgtataatcgtcataattcatttagatcaaataattattaagtttgaagaaagggatatagtcctcattttaaaagtaccacttcacttgactaaaactgatgatcattatgtttggtctaaagagtcgtcacgggtgtactcagttaaaagtgcatataatctactacaacatacccaaggaagatggcatgggaatgatagtgagctgactgttttttggcagaacatgtagaagttaaaaatcgctccaaaaacaaaaatttgtgtggagggctggtatgaattgtttgccaacaatggtccaattgtgttctaagcatgtgaatgtgagctctttatgtttgtcaaagtgaagatgagactatctttcataggttggtcttttgtccagaggccacactatgctggaatcgggtgggaatcagcactagtagtacaccaggtagcacttttcttgattggtgtattacttccttcaaggctttggatgtggaaaaacgttgtgtcttagtcatgctttgttgggccatttgggaagctaggaacgccctggtgtggaacaaaaaggtaatgcgtactggtgacattgttgtttctgcaaaaagatatcttgatcaacggagacatgcttaaaactctactctagaggcatcatggcctggaattcacgcgggtaatggggctaagcattggatttttccacaagttaatagtatcaagatcaatgtcgatgtagctctgtttgagagggagaatggctttggctttggcgtggtggctcgagattcaaacgactttctggttgagggttgtactaccttcttggttggtcaagtagaactggaggtagcagaggcaatgcgagttcgggaagcactttcttggatcaaaggccatcactggcagtcggtgtctcttgaaactgattgtcttttagtcgtgcaagctctgcgagtcactttttctataatttctttatttggacatgtaattgatgattgtaagcatttgcttgttttactgagaaatatttctgtgatttttgtaaaacgatcagttaatatggtggctcataacttcgctaaagctgttatattatatcctgattgtcgtttcagttggagtctgttctaactgatttgctaccttgtttgatagttgaagttaatggttaatgacgatgaattttccattaaaaataattattaaattttattttaataaaaatcaaactcaaattattattttaaatcattttaaaaattatcagatcaaaatatctagttggtaactttatgtggaaaatagtagttacatattaaatataaatttaatattatagctttgatgttagttatttatggtaattgtgaaggcccaacccaaggcccaagtaaagcccaaaataaaagaggaaagaccagagacattttggtcgatcaccaccgcaccagacggaccacaccactctccttcttcttctttcaatttcatctcatctcaatctcaatccccattttcatatttcgtgctataatttctcatcaatgggagccagtcggaagctccagggcgagatcgaccgcgttctcaaaaaggtccaggaaggcgttgatgtctttgacagtatttggaataaggttctctttctcgaattcgttttctgttgtttggttactcggaaacttgaattaattatttttttttgttttgttttcaggtttacgatacggacaatgctaat

SEQ ID NO: 387568 - DNA, 824 bp, Cannabis indica
tcccttttgggaaggaggtttgaagatgtgtgtaccccccagtcatctttcacacaaaattaacacgtgcatgcagagtcttgtcaaatttttgtggggcatagttcagcttctgcgagggaaggctacaatggcataaaaattcaaacgatgactttgctttaaaacaccaaatggtgaaacaccactgtttgtgtgacagactttaagcagtccttctctttcgggaaggagggttgaaatgcttcatacccctagtgatctttcacgcacgaaaaactacgtgcatgaaagagtcatgtagaatttttatgagggagacttcgacttccgctagggaaggcaagagatgcataaaaattcaagcgatgactttgctttcaaagaccaaagggggaaacatcactgggtgtgtgacggacttcaagcagtccttctcttccgggaaggagggttgaaagtgtgttgtacccccagtgatctttcacgcacaaaaaactacgtgcatatgagagtcatgtcaaaattttatgtggcagacatcagcttctgtgagggaagaaaaaagttgtataaaaattcaaacgatgacttttctttaaaagatgaaagggtgaatcatcactaggcgggtgaaagacttcaagcagtccttctcttctgagatggagggttaaaaacgtgtctaaaccccgatgatctctcaggcatgaaaaactatgtgcatgcaagagtcatgtcaaatttttattaggtagacttccacttccgcgagggaaggccacagttgcaaaaacaattcaagtgatgacttcgctttaaaa

SEQ ID NO: 387569 - DNA, 2526 bp, Cannabis indica
tatttttatttaattttctaaactcatgaaatcatgagccaaaaagtcaaaacgatatttcataattgatagtatactcacatcaatttttttttggtaaggaggctcacatcaaaaattttaaatattctttatagacaaattgtgtctctaataaacgtcaaacaatagaattgaaaaaaaaaaataaaactatatagcgcatgcatagggaccagaatgaaaacatgttttgcggatgagaaaaaatatatatccttttcaatctatcaataatactaataatatttcttcccaatcatatagtataattacctaaagagttgatatatatagttagtatttattattattattattattatgcaactgaaactgtatttttttttttggctcaataggaccagaagggaaaccatgtacaatggtagtaaggactttgcattggacagttccccattactggatttggggtttgccatttttccttttttattccacaaggtctgcacagttcctccatgaaaggcccaaccagagcattttgagggtcctcctttgctctcttttctctccattaatggtaataataagctaacaattatttataatcaactcccttgaataattttctgaaagtaatgtacagagttcatatgtatgtatgtattgatgatgtgatgttaactgaacgatatattatacatcttgacacagaggcaagcagtttcaaagttcatagaatcttatctgctaaagaagcttcctttggagaagtatggactaaaaccagaacacccttttgtggaagactatgcatcttgccagatggctcttatgccagaaaaattcttcccagaagctgataagggaaaaattgtgtttaaaaaagcatcaaattggtggttctgggaaaaaggaatcgagtttgaagacaagtcgaaaattgaagctgatgttgtagtccttgcaactggctatgatggaaagaaaaagcttaaagctatcataccagagccattccgcagcttattggactacccatctggtcttataccactatacaggttaaaattactaaaaaagaagaaaccttttgatattgattttcatattttgttacaagtttatttatctctgttttttacaggggtacaatccatcctttgatcccaaacatgggatttgtgggctatgtcgaaagtatttcgaatctgcattcatctgaattgcgttccatatggctatctcgattggtggacaagaagtttaagctcccagcagtgtcaacaatgcttgaaagaacacttaaggaggtggaagttatgaagagaacaacaaggttttacaagaggaactgtatttctacttacagtatcaatcacagtgatgaaatatgtgaggaaatggggtggaatgcttggaggaaaaagacttggttatctgaagcatttagcccatatcgcagtcaagactattttaactgataagattgaaattaagttaccataccataaaatgcagtcaaaaagtttctgcagcatttagtttctacgtattaagctaagcttactatgtactatgagatgagtctaagagtaggaagaaaagaagagaaaaaaataaattttagggaaagtaaatgcatatatagtgtatccagccaaattaatgatattatctaaataatattgacttttaaaatctccaatggcatttctctttcatgttagaatttaatagtgccgcccactaaacatgtcttttggttgagttgagcactagagtagattgtgaaaattgacagaaatcagctacttgcagatttgtcaatcaattggtgtggaaatatgacctcatggtcggctaatattagctaacaaaggcaaataggaccactaaaatggagcaaaacaggaaacatactttataatcctaggaacctatagatgcagctcatttggacacagttcggccgccgtggtagatttggtgtcccctataaaactctatggtggagtttggttgtatcgtgaacattatcccacatagaataaatagtaaaatattgagccatatataagaatatggactattttactcatcaccaattggttttgagattaaatctcattattctcgacatggtaagagaaccctaagagatttggatgaaagaaataaaataaaatttgaagatacataaaagaaattattaaatattttctcaatccaccaaaatgatagaaaaattattagaataatattctaatactttaagatgcaagttgattttttttcctaatctttctatttctttacttctaaccaagcgtcacttagtgattagccaaagtattgactaagagcatctctaattgagacaacaccaattattgtcaaaatacacacattattataagatattttattattattttctctctcatttctcttaaaaatactatggtctcacattatattgaattaatgaatttttaagtaaaaaaaataatatttttctaa

SEQ ID NO: 387570 - DNA, 713 bp, Cannabis indica
ctctctccttttcattcaaattgcaacaaaaaaaccgtaatttttttcacatccatctctctttctcgcctctttctctccctaaaataaatttctttcagccaccagattcacccttctccttttcctgagcggtgcgtcaacctctgtccgttcgccataaccgaagctccaactccacccctcatcgtcgattgcagctccaccgtcgttgtcatcgatcctcctcgcgtgcccaactcttcctcagtctacaagcatagccaagcagtccaccatttctccaatatttctctctcccgatctccctctctatctcctgctcatctcccactctaacttttagtcttagatctaatggttttttcttctcaggtgacttcaagattggattgagaaactttcagggtttgagcgcacgtgaggaggatcaaaaactgatataggcaatggttttgagtttgttattttcccttggattttgttttttaaattattttttagggttagttttttattttgtgttcatatatgttaatttttatgggattagctagatctttaatttgtattgtatttgtttatctctgaaattttattgaattttttatttatgatgaatgaaaatgatgcttataccttacaataattaatttggaatttggaatttttatttggttgttttaaaaattttccccaataacagaaataag

SEQ ID NO: 387571 - DNA, 864 bp, Cannabis indica
caggagggaagaaatattacacacttgttgatactttgactcaacgtgagcctaattccatgcttgctacaatgttcagtggttggcatactgtgtgtctagatcctgaaatggtatttaattttcaaatttattccatgaacatgtcattactctcccttcaaattcttgcttcccctatctttgagtggtggtgtggtataatatttttccacagaaaccatcatcccacattgatcttttttgggctcaaaacagattatcacttttatgacgtagaagaaaaagattacaaataggaagggagatttttttcatccaaataagctcattgtctagctttaggatatgcatagccaatccgtgagtgttgttattattacttttatcccacaataatttaagtggctgtacatcggttatgatgactcttggtgtggtggtctaaagtaacacttgtaaagcaatcaagctcattttaaaaccgtataaaactagtcgatttgaatattaaaaacatgctttgtagattaacattcgcattttgataccagtatcatggtatgctaataattttatataaatggcaatggaaaaagtacactacctactgagagatgtatggttgtgtgtgtgtgtggtagtgagagataatttattagcatatacatatgctttgtgatatgcaatgaataagtttatgctttaatattgattttgaaaagatcagtcattaaacttgtcgataatttgcagggatgtgtatttgttgatagggatggaaaacatttccgacacatccttaattggttaagagatggtgctattcctacattaaaacacactcaatattcagagcttttg

SEQ ID NO: 387572 - DNA, 1257 bp, Cannabis indica
ttttaattatgttatatatatataaatattaccaaataaagttaataaataataatagaccatgcttatatgtctattatacatatctagataaggtagttagctcaactcaataattcatccaattaatatataatgaatcactattatatatatatatacatatgtatataatatgtcaaagaaaaaaataaataaataaaaaaaatgttgaagcctcaatttcagaaatcccaaacccttctcaactcgttctgtaataagccattattcatccatggaggaaataatctttcatcctttcctgtttgtataattaggccaatatcccttaaaaataataataataataataataataataataataataataataataatgataagatcatcatcaaacagaagaaccttgggcttggtttcaatattagagcttcatcatcaaaagatgatgatattaagtggattagggttagggttattgtgacagtccacccaactgtgggaggcatgttatctaaccttggtttaaagagaggccttgatgatactcaagatttgcttggaaaatccctccttattcagcttcttagttctcaactcgatcctagtaagtatatgtatattcatataaatatatataaatatataaatatgttgtcaattagatttacatatatatgcttattgtatttttaagagaaagtaaatttgagggcatttttttttttttttttaagtgtattatatgtttattaattagtagaagtcattcatttttaatttgcatattcatggttataaaaaatttaattaaaattatattatcaagtatatatatgatcacatgttttaagtgagtaaaattaggttatatatatttcaagcatatttttatttatatatatatatatatatcactacaaaattttttaaattatagctagttaaaacaaaatttgtggctaaaattaaaaatattatgaagaattataaattactatttttatattatgactaaaaagtccatgactaaaagcattagccacaaaaaagtcacaatttattgtaactaaatatgtttttagtcataatatttgttgtgacaaaaactaaaagtacttgtatatctaaatactatattttagtcacaagtaattttttattgtgactaattaaagtcacatttagtcacaaaatatttatgttgtgactaagggctcgtttggaacgccgtattaagtcgtattgtat

SEQ ID NO: 387573 - DNA, 734 bp, Cannabis indica
ttaaaaaaatgatatattgtttaaaaagcttaggctaacttgaaacccaacccatcccaacccgatctcgacccacccaaactcgaaacctgaaaaaactcggcctccatacgcgcgggttcagtccccagatttcaaaactcgaacccaaaaaattcaaactcgaaaacctgaaactcgttaaaatccacccaatgtgcactcctaattaaatatgtttgtgtgctacattaaaaagtaatactgatgttaaaaccttgcatttgtgccatactcattttttttttaaataaaactaaaatagataatatgaaataataatatgtggcattttggtagtaaatttaaagagttcttatcatattgttggagtactcttaaaagtaagagtgttaaaaaaatagccataaaataaaatattattttttagaatatgcggagagttttgacaccattaaaaagagaaatgttaaaagacatcattggtgcctagcaatttctttactgtcatattactgttggtgtgattaagtatctagtcacatataccacttacacacactttcaactcagaatccatgcttcctaggcaactatcgtgcaactacgcagcaacccaacacaaccgaaatgaaaattcaatgagaaagagaacgaccattaattccggtgacttcacctgagaagacgaccagaatcaatcaaaacaggagttgcttcgaatttataaaaaa

SEQ ID NO: 387574 - DNA, 2280 bp, Cannabis indica
atttgttagtttttgtggtcttagggtattgtaacttctttaatttatatatgtccttagtatagttttgttagtagtgtattgtcttagtcttattcatcttatttttaatcttccattgtaatctctctattttttctaacattagcgaggtggttccttcaatgcttaaagagcgagatgaacgaatgttgcagtcattctttgaacatacgagtaggtggatcagttagttgcgagctcttactcacaagtatgtgggtcaattagttgcgagctcttacgagtatgtgggtcaatgagttgcaagctctttgtttacttgtcctgaacaactttcattatgtattctgttcatcccgagatggacttgttgtcttaccaatcttatttgttaatagttattattcttatcttgcttttgtctatatggtagcaagtttaaatatttctatcaactgtgattcttgaggcgagttatttattgtgcacgagttatcaactatgaatgctagattatggcatgagctttgcctgattaggcaatgtgacatatagatgttaggctagactataaacttgtttgattaggaaatgtgatatatatgtgaatgtcaggctatggcatgaatttgcttgagtatgcaatgtgatatgtggaaactggtattcaggttgtgcctgtgaggcaaccgttataaattcatgactataaactaaaattgttgttaggtttcttcctatcagcgatcctaattaggcatgggcggcagtgacatgtgagtgccaagctatggcacagactgaaaccgttattaagttttttcctgtcagtgatgcttgtttaggcacacacggcagtgacatgttagtgtcgagttggggcacaggctcgcctatttaggtgatgcattcttgtcgaggatcctgattaggcatgggcggcagtgacatataggtgccagactatggcacaagctcgcctagctaggcgaagcgatatattggtggcaggttgtggcaaaagctcgtctggttaaacgatgcaatacattggtgcctgattgtggtacggactcatctgattagttgatgaaacgacattatgtatgatgccagatcataatatggaatttcttaattaggcaatgcaatatatgattatttttatttccatgcatatggctagttatattatctaattttaaatgttattgtttaattattctataatagtgaattgaataattagttattccatgtattatctcttattacttttcttgctgagtccttgtgactcacgggtgctctgtggtgcaggtgaagacaaagaaaagctagaacagccatgatgtgacaattttctccaccaatgtacatattgaccctactggcctgcgagccaagttggcaggagttgttattgggttgtttttgccatgtattttgatttagtattttgactttttgtaaaaaaatgtacgacagggattcccaaaacatatattagtgtctttatgatgtctgtttttagcgttttattttagtgaaatttttaatattataatagattttaataattaattattttattagtactaaactagtttataaaatcacacatgtggcgtacctataagatagggccatactatagaattaactctagaattagacaaattaaagggaagagaatgatctttgccaaattgacaagcatcacaaaaatttctcattttattcttgaaattttttacatgactcaattctataacttgatttaatgcacgagttgatggatggcctaagtgcctatgccaaacaacaatcttagaaagtgaacatctaccaatactagagtgattaacacatttgactcttggaaataacagccgtattcaaaagaaaacataacttggtttgagtttgatcagactttgtggaaagaaaacatgaaaactaagattgaaattattgatgtggaacaggctgatataatccatttgtaagcactccttaaatcaccaccctccttgacattttttcgttcactaaacaataaccagtataaaattcaattagtatatcatatagcatatgggagctgttgggttttgtgccctaaataaaacctatttcaatataatcagatttactaattaataaagattagaaatcattctatgttacatggttcacatgatttatttcaagattatgtttaatgtataaattctattaagtccagaacatatataaatatgtatatatttgttc

SEQ ID NO: 387575 - DNA, 1560 bp, Cannabis indica
cagcagagtggagcctgtctggcccactgtcaccgagctcctcaagctcatcatcatccatcgaaggaagtgctctctataggcgcctgcgagctgcctccatggctctctgccccgcagttgagccaactccccgaccgggcttcgaggcaccactgcccgaaggtcgttccctcctaatcgaagaatcatcaatcatgggctgcctgaatggtgcaggccctggaggaggaggaggaggaagagatgatctagcagcatctctaccatgggtggtctaagccaccttggccctcagatgacttgaaggctcatcagaaggtccaccagcaagacctctcaatctagaggacatatttgcaaaaagaaagtagcaaagtcagaatacaagtcacaaacattcaatgtaagacaagaatgtaaaagatggtgctatcaactatcgaataccatcaccctcgaaagaggaattgtctaaatccttaacaatcgctttgcccttgcctccagatgtaggcaaggggtgggtgaaggctgaccaagcctgttcaaaggttccccatcgtcatcatacctacctaaggggcagttggagaggacaatacaagttctgtatctcctcatcttgactagtgcagcctccttaatctcagactcagtgataggactctcagccccctagtcaacctaaggcacctatactgagtcaatctctggatctacatcaacatgaggctgagtaacctcctctaaaaatctgtctcgacccattattgccaccctggcaacatgaggatctcacggcagcgctctacgacatgttcgtttcattctgaccatgactgttagtcctgaatcacacaagataacaaagggaactatgcggctgtcacctcccaattcaacacataaaatcaccttcatagaagagacaaggggaggtgagaaacctgacaaagctacaaacacagttatagtccactatacccaagggtaccttctaggtaaatcacaatgtacaaggctgattatcagcgaagtactgtcttaagtacatttacttagacaaatagtgagtcctaagttgtgcactcgactataatggactcactaccaagtctcacacagagttcccaaagggaaccacacataagactacaatcgtatatgcccccaaggccatcacaagaccttagtcaaggtcaacagaggacaaaaactggctggccgcttagaaccttggtcttggctggccagggttcccaaacctaagaggtcggccatgtcccatgacccagcctagggccggctaggaacctcacttcaaagcataggcaggccaacctatagggtaccacccttggccggccagaccccatggtcgccacccttggccagccaggtcttaaacaagaccttcttggctggccaagaggtgtatgggattcgagcatgttttttttcaagaactcaaacatgttctttgtgactcaaagagccaagaatcacaatgaaggtcaaaatcagatctttttcatctagaaatcacacattacatat

SEQ ID NO: 387576 - DNA, 702 bp, Cannabis indica
gagtaaagtagatcgatttttagaagaaaaaaaatgttgtattcacatggctagtactatgaacgtggtagatcatttcacatatcatatgtcatatatttctttagaaaaataaagaaataaaaaacactactagtctcgctatttttttttttctttaatgtagtcttattctagttttttccacatataatttagatatagatattttcaatgaattaaagtgtaactttatattttgaataacgattagcgagttatttttttttttttttagacaaaattagcgagttattttgattaacgattaaagagtaattttttactaccctcacggttatcagagctagcaaaagtattttataatgccaaataaaactccctttattgtcggcgaagctagtagatgctccgctaaatgttagcttttgtgggtgcaatttagtagtttcccttgtaaaaattaattttcttatagtgaacgtacatttgaagatatttctttatttttatgatatattgtgtggtttctcttttatataagaaattgtatgacatatatttctttttagaattcattagagttatgcatgaatttattaaatttttaatatatattttaaacggtacatttaaaattatttgatataattttattgtcaaattaatatttatatatataatttaaaatttttataaata

SEQ ID NO: 387577 - DNA, 499 bp, Cannabis indica
tggagacgatgacgaagagagaatgaaagttgagaatgtaaatctaatttctttgtgtttgtttccaaatttataaggtattatgaataagtaaattactatattatcctttgtctaaatataaaaattgagtagataaagagggttattagtgatattttactcaaaatactataataatcacgtgtattatggagacgaagaagaggatacagggaaaaaagagtaataaccgaaaaaacgataaatcttgaattaaatatggaggtgccttttgtttctttataaaatataggaaaattctacaatacaccccttcaaaatggatatattgatatacccctatctattttagcatctgaaataattttttagtcaaattttttctcatgatcatgtacgttatagttatttaagacatcctgcaaaattttaagaaacttgaaaaaatttaacacgacgaaaattttattcacacagtgtgttgcacgcgtgacta

SEQ ID NO: 387578 - DNA, 1611 bp, Cannabis indica
tttttagtaaatcttttcaaaagaatattttgtgagataaaaattttcaaatgtttcttatttaatatttatatttgtatttatttattttgcagataggacctataataactcttttgtgaagacaagaaggtaaatgttttgtatatataattattctatttttcagttaaaggtataaatttattaggtcacatgccaataagtttccaatagtttaaaatcaaacagtttttatttattagtttactttttcattttcttttatctatcattaatttttattgctgaaagaaaactgaaaagtagagcttgaaagctaataatgttatgttagatttgatacttaaaaataaaaataattctaacttataattttaaatgactataaattattatataatgaatgtttttggtgatttgtgtattttaatattatactttttttttttttatagatatctcatgatgtggatgatcagatttatttagaagaaaatgtaataaagatacattcatgatctgaagggttttgttttttcagattgttttcgtgatcaagaatttgtactgtttgtcactgtatttcttttagtattgtgtatctgagcttagtgtacgtaagccaataataaaagtgtcttattaattttcttttgtttagaatatatgtagtaataattaagggaaatttataacaatatatacattatcaaattttattacattatatgtgcaaaaaaaaacttatttacaaaaagttgtagatttctttaactatatattgagaaacaatattctcatctttatgtaaatactatatatatggtaataaatttgtatatatactaatttaatttagtactagccttgttattaattagttaatcttgatataatacgattttattatattattaatgaattaatcttagtccttattgttaaatattaattcttgtctttggctgaaacttcaaccttcgggagatcttttggatacctagaaccttcaatggtgtggcacattcggtggctcaatgggcaaatcgaaacaacaagtttggtttgatcgatttggccagttttgacgagttcttgcaattgtgttctgcatatggtcgtgtattttcttagtttgttctccctgagcctattttcattttttttttagctagttgttagttttttctctgtgtttttgtttagtttctgttcttggtgtctgttctttggcctagggcctgctttgttttgctggaacctttaataaaataaaatattattgtacgcggaatgtattgacttataaataatgatcaaaagttctttttcttgactagctatagttgaatgatcatcatatatgtatgtaatacctttcaatatcatccatatacaatagagctattataattacaaggatagaactattataattaaagggctaataacttgaattttgacctgtatttgaatttttttaatattaaaaatttctcataaattattaaaattgttgaatttaaaattttctatccaaatttgattcaattttattaatttttttgattgcctatgtactaaattatatatgctttccaaactact

SEQ ID NO: 387579 - DNA, 1038 bp, Cannabis indica
ttaggttgatgtagctttcaggttttagccatgctaataagtaatttgtttcagttagtggcagtgcgagaggaaagtattcttctggaagacctgggtttaggtctgacagttttaggggtcgtgggaacttcagcggcggacgtaattatggtagaaacgaattcagaaaccagggtgagttctcagggcgagggcgagggtcagccgggcgaaatggagacggttatcagcgccagaatggaagaggtgggcgccaaggtgggggaaaccgcactgcagttgctactactacttgaaatgaaacattggtggaagaaagagattggtaggcatttttttaatacaaatgagggtcatttttttttcctttcttaaatcttttttttttctttcccccctctgtttggataaatgaggggtagattaagattaagattttgtttcctactgcaactgccaactatttatgtcaagattactgagattattatgttattttttttcccctggcttattttataaacggcctacatggcttggagaaaatgagattatggaatgtattctttcataagatatttgccacattgtcctctctatatataaaatatattatatatatctattctatataaaatgtgcctatataactgaaattcttggtttatgagggtgactttttatttttatttgataaaataataaaatattatttatatataataaaataataataaaacaaattctattaatatttgaattgatatttaacatatttcaattctatatataattacaactataactttaaaaattaaaaatatatatatatatataaaataaattgaaccttaaaccgcatatacaattagtttgttgagagagattaggaaaagaacgaattatatatggaatttttttttaccaaatcgtcccccaatttcaggttttgatctaattgggtcttctttttattcgtaaatcatcccccaatttttaagattaatttttcattaattatttattgtattcctt

SEQ ID NO: 387580 - DNA, 558 bp, Cannabis indica
agttgatttgttactaaatttggtaactgaattactcatttaataaaatgatgactacttcaatttaaaaaaaaaaaaaaatacttggaggaaaagtcttatattatagaaattgaatgagaaaattgggagggattggattgagattgttgggctgtttttgttgttgctaaagggtcaaatggcgtagatggtggagtcaggagtgaaggcggcttccgttgctggctaagataagctaggctttagtttggctctttaaaattaaatggtcaacgtcaaagtctactctacccttcttcttcttcttcccttacaaaatgggttagctaacttaataatagtcaaaaactttttatttttcttttataataataataataataataataataatatgtctttgcattttttttgaaagtaataagcacttccttaattattatccttcaaaagtgaggataagatattagcagggacaaccatttactaatgtagtttttttttttttttttgacgtggtgaacaaagtcacacatgataaacaatgcagcacac

SEQ ID NO: 387581 - DNA, 598 bp, Cannabis indica
ttttttaaaaaataatatgtcaactttcctcattcttataaaagttaacaaaaggaacttaattatgataattaaacatgaatggatgaattaagaaaaaaaaaagaaactttatgaagaacatttaatgatcttattcgagcagcttgagattcacaaaagtgtcaaagcttgagaaaagtatgagaaattattagggttttaatttttgtcaatttagttatgtaggtaacattagaataattttttaaatataaaaaataaaatagtaagaataatttaagtggcgtttagtaacacttttttaatcagttttttgtttttaaaattagaaaagtgaaaatatttttcaaaaacatgttatatgaaacaattttcacttttcaattttttaattgacaatcaaaattttaaaaacaaaaaaaagttaatttcaatattttttttaaacatttttttttcttaattaatattttagactccgaccagatccaaacccaaatctcccccacgtgacctggcgctgaacccgaccgctgacccgaaccagaatacgactctggacctagacccgacttaaataaaatcaaaaaatgaa

SEQ ID NO: 387582 - DNA, 1127 bp, Cannabis indica
ttaatatgatattatacaagcttaatactattagtagttacaacatactgatattacattttaaaatataatttacagaacatgttcacggcgggtaccgacacatcatcaagcacagtggaatgggccatagcagaactcattagacacccaaaaatcatggcccatgtccaagaagagctcgatcatgttgtgggtcgagataggcttgtaagtgatgcagacctaacccaactgacatatcttcaagctgttatcaaagagatctttcgtctacacccgtcgactccattatcccttccacgaatggcaagccaagattgcgaaataaacggctatcacatccccaagggatcgacccttctagtcaacgtgtgggccatagctcgtgacccagaacagtggactgacccattggagtttaggcccgaaagattcttaccaggtggtgaaaaggcacatgtagatattaaaggaaatgactttgaagtcataccatttggtgctggacgtagaatctgtgttgggatgaccatgggcttgcgcatggtcaagctattgactgcgaccctagtacacgcctttaacatgaagttaccgaatgagctactccctgaaaaactgaacatggatgaagcttatggactcactttacagagggctgcaccgttgataattgaacctcaacccaggctagctcagcacgtgtatggcgcctaatcaaaaaataggcgttaaaaataaaagtttatttttgttattcttattatttatttacggagcaaaatacatgtgttacaaaactttgttatttcacaatgtagatagctcgagtttttatatcctttgaccttgacaacaaaaaattaggtcaaagtcattaagaaattaggcaatatagctgcttttcgtgcggctaatttagtttttttagtattataataaatagttatttaaaaaatataattttaatatatagtaaaattataaatatattatcttatttcatattattataaataatttatttattaaaagctaaatgcacaattttattaattattatttaaaattatttattaagaagtttaaaatttattatatgtttaaattgttttgttaaaaga

SEQ ID NO: 387583 - DNA, 1436 bp, Cannabis indica
ttttatttatttaattaatttttagaatagttaatatatttactctctctactttttatattatcaaattatgctccttatagtatacaatttgttaataatactcatcaaaatttaacttttacagtaatgtagtcattctttgatattttattcaatgttatcgtgaaataagtaaactggtgaatggtagttgataaatggatagaagttaaatacccttaacgctttttatgttaatgaataatagaatataagactttttttttttattatataataatgtatatttagttttaggttttaaatcattatagtaaaaatggtctaatgtatttaatttatatctatatattaactataatttatggtgtcactcgtttcatgataaaattaaatagaatatgatagaaataccacattactgtaaaagttatatttcgagagatattattaacgagttgtatactataagaaatacaatttattagtataaaaagttcagggacaaaaatattaattactcttttttttttttaatcttatactttatttattcattgatttttttttttgaaatgaaatatcaacttcattgaaataattagcattatgaatagataagattttttaagtcttccgaaacatgaaaattagaaatactaaaacaagtgttgaaatgggagttcctatcaacgtaatgtgccacccgatttgctgatcgtttgataaaatgtaactggacattatgtaattgtaacgccctgacccacaggagcgccacgtgtgtatttttacaaacttatctctaactaatctattagtttaaggaatgtgtagttttattaaaaatcccattattaaatttaaaataaaactttcatacaaaatactgtcacaatacggggatcgcctatttataaaaattcttttacatccatttaccaataccgttgctacaaaagtaaggttatacttccaaacatagaaaaggggttgatcctgcttcccagaagccaagacaacggttgatatgtacattgctgagagacctctgactcatggccgaacacaactactatctttcttacctataccacgaagcacccatgagtcacaatgactcagcaagaaaagctactaaaatcaaaatattgaaaataaaagtattcttatcataacatagtatacgtgctcatgattcattgcataatcaacatgcatacatattttacaatctatgcaaacacattcattacatattataagaaagtcataacaactcataatcaacaatttcatcatctcactaacagatattcattcaatacataatcacatactaacatgcttatacaatttcatattgttaatcacataatctcgatatttcattaagcacccttaccactcgttaaccacgagctacgtatgtc

SEQ ID NO: 387584 - DNA, 695 bp, Cannabis indica
aataataataataaattcatgtggggtgcaattattaaaaaattcacacagcataataaaaattgatttttttatatattacattttcatgattattttttatttacaattttacagttttgtgatgtttcttcctctaacttaatttgcataccaagtgctatggagggctgagattctgagatagtattcaatgaaataaggcctcaatggctaggtacattaagatgttttgtgggtgaaatggattaataacatctacttgaagggccaaaatttttggttttataagtctaagtttgatattagttgatattggaaaaaagaaaaaatcataaaactaataaggggcattttcatcaaagagaaggtgttggattatggtgaagctgtgtggtgtaggctaatatccttgaatattgagatgtattctttatgcagtcatggctggtgtcctttgcaacatttaaattaatagaaatttatgtattcttgaattgagatgtatgaatttaaatcttgcttatatgattattaaaagtagtgttgaagttagagttagccttgttcatgggcataaactttgacaagcaaattatggaatttgtaaaaggataattactgaaatttctaacttctttatttttatactgtggggcggaattttttttcaaaaatagtgtgtaagtttaata

SEQ ID NO: 387585 - DNA, 626 bp, Cannabis indica
ggagctaaaccaactgtgaattcagaaaattggttgtcgaagtgggtgactgtgaggcaagtcccgttcacggcaatgctatcgccgaggttgactccctcgagtactgtcttggcaccgattatcatgtcgaatccgccatgttcagcgataccaatttgcttgacttggcccatttcttcaacaattccagtgaaaaggcatctgattgcggtgtttcggttgggacgaagagatctagaacggtttcgatgaaaggtgaggttggagatgaagagagtgagcgttgaatagccagagaaaggattaaatttgaggtttgctttgggtggagtggtggttagactagccaggactgagcttctaggaagagagattttcgttgtagagagtacggaaagacaaatgggaattgccattgttgtgtcgcccttcctctctccccaacggccaatgttctcttctctttttacttttcactgttaaaccctctctctttagggccgtttggtatgcaggttttatttcatgagaatgggtttaacattgcttgcatcatatcttcacctctactctcccgttcgttttttcttttccactgctgttttttaaaactgcagaaaaaa

SEQ ID NO: 387586 - DNA, 576 bp, Cannabis indica
aaaatgaataaacattttgctttctctctcttgttatcaaatttctcaatcgaagttctcctaaccattgaattatctcacaaccatttcctccttacaccagtatattttttttttcattaatatatactttttatctaaaaaaatacaaatatactataaaaaatgatttattttatgttttgagagtaaacgaactatttttactctaggattttgtgggtattgggcctcaccgactacgacgtttgagggtggtttttttgggtctttaagcttgaattgagatatagatcactttaatatgtcttttttagtttgcattgtgtttgtagtttttttaagagtatgtgatatagggtttcgataccctagtggtcagaaaaatcacggtagtggtcggaaattttttggtagtggtcaaaatgtcaagtaaacgtttcgaaccattaattttattttgaaaataatattgtctaggaattctattgttgaaaagctactttatattagtgtatatataggattaagtgggttgcaagttagatttttttttaaatagttttcatatttttt

SEQ ID NO: 387587 - DNA, 945 bp, Cannabis indica
actgatctgagatgcagctcatgttcctcttgtgattcagaataaaccaagatgtcattaataaactcaatgacacacttgtccaggtaattcttttatacttgattcatacagtccataccaagtacggaacgcagccttggcccgacgttcaccctgatggtgtatcttgcatactggacattctagatatgatttgaaggaggatccgtggccctgacaaccatctctatttgcccaaaacttcctattaccccctgatgttttggaagcttcaacctttcgcttatgatcagggttaccaccgtcggtccccttactgaaattaccacccacaggaagattcgatgatgtagcagcatcctttgcattctactccttagtcacatgttgctctgcctcctcagctaacaaggctagttcgaccacttttttatacaaagtgtcttgagtagtggtaatcttcaagtcctgactggttatggaattaagtcctctcacatacttttgtttcctggtgaaatctataggcaccagaccaccaacaaatttagacagtcaatcaaattccagagtgtagtcggccacatacattttcccctaagtcagtttcacatagtcctccatatgagtcgttctcacagcgatgttataaactttttcctcaaacagacccttaacatctcaagtctgccccactatgtcccaccagatgcgggcatgatcttctaacataaaagggacccagttcactctttttgttcccgtcacccctgtattatctagaatacaggtgatagtactcatccattgctcagcttaaattatatcagtgcctcctagaaacattcgaggttccagcttcacaaagcgctcaaatactgaatctctatgcggcagcatgaacccctggttacccacaactggcataggagctggtggtaa

SEQ ID NO: 387588 - DNA, 1542 bp, Cannabis indica
tagtagttaagcttctataaataaaaatctttacccccgagctggctaagaattgatttcatgtaaattcttttatttgtaaattgtgtgattgcattctcttaattctgttagaactctaaagagagaaagagtgagggaattgtagtactttgagaggaatttcatgaaatgagataaagtggcgtttgtagttaaatcttacgtgtttgagtttcatctgtgttctttgtctgtggtatttgattggtttatttttttgatctcattactggaataagatagtgatcttgttcgtgttttgtggtgaattttgggatcaattccacaacaaattggtgcggtgagcgtgaactcagaataatgggatcagcaaaatatgaagtggagaaattcactggacaaaatgactttagattatggagattgaagatgaaggttgttctggtccaacaaggtcatgaagatgctctaaaaggagatgaaggtctcgatgtgtaacttgaagacagggacaagaagatgattgttgaaaaggctcctagtgcaattatattgagtgttggagataaagtgttgagacaggtctccaaagagaaattcacaacagggatttggtcgaagctcaagagcctttacatgacaaagtctatggtaaattgtctttatctaaagcaagctttatattattttaaaatgcaagaaggtatgtctgttgatgaatagttatatatccttaacaaactaattcttgatttggagaatataaatgtatctattagtgatgaagaacaagttctgctattattatgttctttaccaagatcttacattcatttcaaagagacattgttatatggaaggaattccttgacccttgaagaagttcaagcagctttgaattgaagagaactgaatgaaagaaagaaatccaagtcaaatgtcaatggtgaaggattgatagttagaggcaaaaagtcaaaacaaaaaaaaaatctcaatgacaataaaatgtcaaaatcaagaaatggtaatgggaatagaggtagaaatgtctaggcataaggtgctaccactgtcaaaaggaaggtcacacaaaaagactttatctagataggtagaaaggaaattacaagaatgaaaaagaaggtgaatcagggaatgttgctattccacataatgaagaattcctcactagaaatgtttgataacagggctgagtatgtagcgagatctcaattttgaaaaaatggttgaaactcaaaaaaagtatggaaggaataaagtgcacatgcaccgaaaaatggaaaaattgagcgtttaacttgctctgagttgggtttcaatggaaaaatggttgtaataaccgataaaaatatacatatattttaaattttatttgttatataatttgtgtgagaataagtattttatttatttctactaatagtgaatagagataattgcttagaatagtattgatagatttctaaacatagttaaaattatagtaaatgtcaaggtaaaattatggtgttttta

SEQ ID NO: 387589 - DNA, 886 bp, Cannabis indica
cattaaaattaccagaaaatatgtttgaaatattagaaatcttcattttccacacttaaattctcagtcgatgtttgctctactccttccaaaaagttccaaatgaaaataagatgatccaactagtaaaaatataaagaaaattaagcaattaatataaatcaacaaaaaactatttctaagactgaatgtaaccaaaaaaaaaaacttatctgactaaaaaagttgttctatagcgaaacaagcatattatttaaagtcgcaaaattcaaaaatttccattccaataactctttaatttcaattactcaatatctttatgactctaataactaataattaaaatactcaaaacccccacaaatattataaatttagaatagtattattagaaattattacaaagatacttggaaaaaataaaacatacccattcacaaatcaatttgaaattttatatgtaattgtataaaagttcattcataattatacatagtaaaaatttactattgtaagaatcaaataagcaatcatatataaaaagaataccatgatatatttgttaaaattaagcaacaaaaactgaaaataaatttttttattaaataataataataataattaaaaataaaattaactgccgcaaaccgacagagattaaagtcaccagaggatacaccgtaaccaccacaccaccacaaagtccacaatctccgtcttacctaccgcaaccaccatcaaccattaccaccgcaaaaccaccaactacaccaaatctgaagccaaatataatctataatgaaattattttaaaataattcaaacactaataccttacagtttgttaaacacagttatttaacactattagcagttaaaagttagg

SEQ ID NO: 387590 - DNA, 1210 bp, Cannabis indica
aaaatatattccaacagatagaccttccctgatctataaactagtcttccttggagtggatctctgatgagatcctgcgctcttcgattggtactctaattgaaccgccttatcatgtcgctgacttctctattgtaacgatccaactccacctaacctagtgagatcgaaggatgtactctttgtcatccatccatctcaagtattcgcatctctactaagcaaatacattgcaatcagcagctcgtagttcttcacttaggtcggcttcacagacgacctctctcagtctggctaactcgagatcttttccctagtccacatggggctcgccaatatcttgcttgccgattcctagtcctgtctctctaacatagtatcggagatgagatcaagttgttgttcctatgggctattccctaagggtccttcgttcagtcggaggagatgcaagtggagggtcctccctcagaggcaaaggcttgttgttcagatccatcgggacgttcgtgtcactcttgccagctgtagtgaccagattcgaagtgcctactgtgatcgtaagattgaccacatctgtggtgttcatgggaattctagtagtggctggaacatggacatcaggatctacagtcagagggtcttgaggaagacccgatgatgcatatggtgcaactagagttctcctcgtgttaaccatggcatttgatcagatatgatgtcaacttgctctcgatgaaactaccaaactcttgacctcaaaaattggacaactgacagtggagtcgtattaaactgaggcttgccatgtgttacacaattagaactagaaagtaaaagaacacaagtatttttatagaggtttagcccccttagttagtgggtaatgacctactcccattttagctgtattgataccgagagataacactattcagatcactattggtggaatctaatatagctctcttgaggttacaaagtaggaatcaaagatggcaaatcttaagtgttgagagatgctatagtgggcgagtgagagagagatgaagtgaattatcatacttagagctttacggcttaaaattagacttagagttttagggttaagttaagactctttatataggagagcttaaaccctaattagtaaataaaataagagatatttacatattaaattggtaaaatacaaaagactaaaatgccc

SEQ ID NO: 387591 - DNA, 1187 bp, Cannabis indica
gaatgaatgagggtttatatattacacaaaatgacttaacttttattgtttttttttttattatttttcttataagaattgttattattttattcaaaacatataacatttgtgtttatatataattaggtaatatggttgcttttcgctctttgagcttataataatttttttagtataatagtaaaaaaaaacaattatttatgaatataataatagaataaaaaaaaaacattattttactatataataacattaaaattacttattaataataacaattttatttattagatcttaattttattatttataggattaatgtatatatgaaattttagattgttctgttaaaaaaattatcaatataaaaataaagaagtgggtagtatagagaaaaattagagtgttattattatttaagtaattaaacactttttctctcgtaatatttatatctcgatcatttaaagttgtcatcattatatctcgcatgttgttatcatcgtatcttatttatagtcgtctcctattattctcacaacgtatttttatatacataatttgatttttttaattgtacgtaaaagataataaatttttaataaattaaaaaatctataaaaaaaatctctatgtactgaaaacacaatatataatatttatattcatagttaatttattttgactcttaattatcttttaataaaaaattaaagaaggaaaaattaaaagagatgtagtgtgcaaccattataaagagaaaatataagaaagaatatgataaggataaatataaattattaatatttataaattataggattagagttagcatatttattaaattcttttgagactttttgtagtattttttttttaaaaaataattattcagactttattagatttagttgagatatgttcacaattgatgacacaactaatttgtttgaagcttttgatttctctttataaaataacaccatataatcacttcttttctctatattgcatgcaacctttgaccatttgggggtatgagagagatagaataagttgtgagagagaatatgtgaggattatatatattgttgggaatgtaaataaagtttcacattgactagaaatgggaaggatcattgttgtataccaaaatggtacgttttacatttatcaactcgcaa

SEQ ID NO: 387592 - DNA, 863 bp, Cannabis indica
tttatttatttatgtatttaattctagagtttatctattactttaaggctcatttattggttaacgaaaatatggattaatacttatattaggcaaaaaataacaatctaaactaataaaaataccattggcaatgtaggtatatttttcatatctcctcaaattatcgtatatcaaaaacctcacccactctctctttcttctatgacataaattctaagcacctatcagactattcttggaccaccatcagaccatatcgtgtctttatcaaccatcgaaccttcatttttaacttttagattacactactatcgtacccactatcctatcctatcagaccactatcaaactatataaaaaaaaaatcacagaaaacgcaaatttcatcaaaactcaatttttttaccaaaaaataaacaaaaaatacgaagaaactacagattgttcgtctgtccattcgacgatggtggtcatggatcgtgggttattgaccactcaccagatagaactaaagagagagagagggagagtcgtgggtcgtcgaccacgcaccagagagaactagagagaggaagggtcgtgggtggtgatgcggtggtttgatgggtgaatatttggatgagagggaaactaacatagcaagaaagaaagaaaaaatagaaagaaagtttctttgttggactttttgaaatgaaaaagatattttgaaagtatactaaaaaattgtcacacaaaatctgttcacatcaatattagtttaagtgattaattttattcgaatagatacatatttaatcaaatttctctgaaactatttttagttaattaataaaaaacagagggttttttttttttttttt

SEQ ID NO: 387593 - DNA, 701 bp, Cannabis indica
accaacttggcagacaacaaagttttgttcactcccctaaattatatattgaccttagcttttccgtcctgcgatgagattaggcctcagctcagcccaactacctcctcatcacacaattttctttcttctccattctcatttctcaaggtatgtatgtaaaatagtggtgtgcgtgctcatttaaaatatttttagttacaatttaaatatttctgttcatcttttagacctattcattgttactctgattagatttttgctaaaggaacaagttttttgtaagagtttattttcagaggaaaatgagtgattgtcttattggttgaaaaaaagatcacaagagctatttacatgtttatactgttagttactagctttatctgaaactaacgctctcaccacttaaactaatcactcaactaactactctgttagctgattaacaactccttcaaacttagtatggctttagagtcgcacaaattttgtgtctaagttcggcaaaacaagagcttttggatttgctttgtaagactatctatattaatttggtatgaaatctaaactaatttagtataaaagtttttattcttttgtacaactaactctaataattcatactaaatattctactaaataatttattttacttaaatgatttcccattttatattatttacatttaaaaaaaaataaaa

SEQ ID NO: 387594 - DNA, 1188 bp, Cannabis indica
tcaaaagatttcaaactatatttatctctcatatttctgtaaaaaaaattttacgagcatctctaattatgctctgtaaatacactaattagctaaaatagggagtaagcctaaaaaaaataaatctaccatgaaaaattacatctctataataaagaatggataggaagtttcttatttttttacaatttttttaatattattttaatcaaaaacacaaatttttttttttggagaaaatcaaaagcattattatattttttaattatttcatcaaattaatttatatgtaataaatttacattataatagtatctgctacacaaatttttttatatttttattttatttttcattaaaacaattatctattcttctaaaaattctaattattcttggtatgatatttaagaatctcattattataactcaaaacaagcatgaaaattcctccatttgtgaaattggatatgaagtatgaaaaatgtcctctttttagtttggacaaaaaatggattgaaagtgaaacctccccaaacatatatcaataatgatactaattaaatattttactttcaaacattagttatgtattttgcaaaatactaacaacaatcatttgtctaaagttaaaaagaagatactaagaatctcaaacaacaatcaagtgattgcataaactatacaaaacttttatacacgcaatatcaataatttttataattttctataatatatatataataaataaattagattgatgttacattcaatgcacgaattataaaattttttaattaagtaaaattaagcataatacatatatttattttttttaattaagtacgtaatctattttttttgaatttttaaaatagaatttaaaattttgatagactttttttagctatagcaattatatttgtgtgccttttgaattgttgttgagttgaattatcttttttattattattatttcaaagttaaaaatatatacaatattttaagtattttaaattaaaataaaaattttcttatataaaatatccacatcattttaatttttaaatatatataataatattataaaattaatcaaaaatattctaataatatattctattaaaattaatataagaaatcaaaacacactttaactaaaaattctattacataactatattttat

SEQ ID NO: 387595 - DNA, 1095 bp, Cannabis indica
aactcaagcttggttcatcaatgacacattttgattttgggtgttttttgagttttattggttggaatgtgttgtgtatgctctgttaggtactatggaacgtttgatggcatttggataagttttgaacaagtttggagttgtttgggaaacctggtgcaaactggttaaccggtttaccaggtcttgcaaaaccagttaaccaattttggcagattccctgaacaacttgttttctcaattcttgcccattttagtgccttagttgggtgtttccctatttgctaggatattgtagttcctagtagtaataacagaaccttaagttgtagaattgggtttcctatattagggtttttgatgtgtgatttacccagttatgttatgtgattagggcatccatccctttcatagtgaggctaggtcactatttatagggacttaatgcatgagagatggtttcccttttccttacaatgaataaaaaaggaaatacaataatttaataattacaatgtgagaaataggaaactagaataggttgccattttcctcttagtcaatcctagggattgtcttcacgtgtagacacaacgagattattctctgaagtcgctatctcttgtaagtcgctcaggacaaacattcttctacgtagtcggatatctaactattatatatgtaactagtcatgtgcaagctactagggatattttcctccgtctaggtattagaaatatgggacacgtgtcatttgatcctattgccatgtcaaggtgcaaaaaactggataacatttgcccctaagtctatgttggaccttcctggttgcacgtggacttcactcatcgtagagtcttgtctagatgggtgacgcgtgtcctaggcgtcgaatgatgaaccgatatgaccctaaataggggtcttttaaatttcagctcatttaatgataattgacagtcttgcctcgaatcacggttatatatctacccgtgctaacggttactttgcctgtaatgagtacataacgtataatttgttgggaatttattttaccaggatcttagatctactcacaagtatgttgtttaaaca

SEQ ID NO: 387596 - DNA, 744 bp, Cannabis indica
atgtatgaccaatcactgccacatgaaagatgacaatgctctctcttttttttgggagcactactataagaggatgacaatgctctctattcaaaatactgaagaaaacttgtcaaaatgtattcctcaacaccaaagagtacaatacaagtgaaaaaaactattattttatttgtcatatgtgacaaaatttgacagaatgatcaatttacaatattgtgaatagttcaaaaattacttttaacgagctgaaaaattcaatgagtataataatgtataggtcataattcaaggacaaaatcctaaatagaaaaaaaaaaagtaatactattctatatttataatacatgccttttaaaattttcaatataagcaaaaaaaaaaaattattataatatttatgtatatatatttaaaagataatatgattataatagactaatatttttgagccccatcatcatcttttaaaaatggttaagggccagtttagcacagttgtgctgtgagaaaaaacagttgtagctgtgctgtcagaaaaagcagctgtagttgtgctgtgagaaaaaactactgagtgtttggtaaatataattttaaaacagctatgagttgaaaaagtatataagtgtttggtaaactaaataattaaatagctgttaaatatataattactaaaataggtataggtatgacatttgttatataatttatttaaataattttatacatattaatatattt

SEQ ID NO: 387597 - DNA, 824 bp, Cannabis indica
ttagagttggttaatgaacgaaatacatatatagtgaactcaaataatacacatacgtacacacgtgatgttaatatattgtgtgtatatatatatagcagtactattgttctttttttcgtgtttaaatctaggagcccaaacatcatatatagaatattatttatatataatccactaatgtgtgtataatcaaaactcaaaatctaaacatatatattgcggaagagatgagaagaaaaaaagagaaaaactcttattgattattgagaatgaacaacctgatacattaacaactaccactatatatatgtaacactaagtcggttaagacttaattgactgtataattaaccagtcaacttacaagtgtaacaaactaaacagtaaactaataaactaaaacttgttagttgttaccatcttggaaatgtgcagtcaaggatagttgaaggtaagtcgaatagtgatactagtataagttgaatagtgaggttattaattttgtcacgggtgaaatggcagtcaagttcgatatgtttagttctttcatggaaagtgggattgttggctatatggatggcggagtgagtaataatgattaattagcattcttttatgtttcagacttcatttccaaacttaaaagtgttgactgttcagaattgtaacaaaatgaagtctctgttatcatctgccatggctcgaaaccttgtacaacttgagagcttacatgtaaatgaatgtgtgaagatggaagaggtaatagtgagtgatgaggaatattctgtaagaatattttttatttaaggaaatctatttct

SEQ ID NO: 387598 - DNA, 1432 bp, Cannabis indica
ttaattataatttctttaaataagtgcacatactataaataaaagattttgttttttcagaaaaagtttttgatattattaagtattgttattagatatcttaagatatttaatacacgttgtaactagtgagttatcataatttttatttaaacaaaatgtgtgaagtctgatattaaattacattaataagaatatattactttttgtgttgaccgagatttttagcaagtaagtagttaaagttgtgaaaataattagaagagagtaaatacaaatattttttacgtggttaggacattaataagtcttagtctacgagtgactgatatttaatatggaggtgtttctttacagagaatactctactttatttttttcgatccccattctgaatgtggttttataacttttttcgagagattaaagacttctattgtcccaagtattcaccttggctttgcacaagtttcaaaattatgaaaatagggtatgcttgcctgcatatatagtaggttacatatggttttggtgagacaaacttttatttttcattgattgatgtgacagttcattatgtagtcatcactaatattatcgattaacgtgtaatcgccaaagaatatgttcaatgtgtctgacatgtcttttcatattcgtccatagacgttttttccattttgcatttaatgcctgtgaatagttcatcttcgaaaccctgggcccgatcgagctacactctgcttagccccggaggtgagaaaaaaatgttgacctgtccagttccaactataactccaggaggagccattcgattatatccactcaactcgtaagtttccttaagatatccttaagcgccttcgaatcttaagtcttgattgcaaggggtgtatgtcggtcagtttggtcgggttatagcatatttttattaacccaatataaatatcaggttgcaaatatttaatcgtaactcgcccaattaaaaattagaaaaagttcaacctgcccaatgattttgtcagtttggtcgggttaacccgtccaaatcgttttttacttacttttttttataattattattgttattttctagtatttaaataattagatttaaaaagaataaaaatatattatttgtatttcaagttaaaaaaatactatagtttaaattaattttatgacatttaatataagataattataattgagtaaacataaaataattaaataaaataataataaaaaaagtaatgatatggtataaattttaaactttaactttatatccaaatacgataaaaactattaactataaagtctaagttttaagttaaacattaaaatgtccaaactttaaatataaaatagttaaactaataaatgtaatttatgtaatataatatatacacttttattaaaaaaaaatata

SEQ ID NO: 387599 - DNA, 2774 bp, Cannabis indica
ggtctaaaaaaaaatgtaaccatatgttacaataaaaatgtaaccattgaatagtcactcttatataattgtaaacataaaaataacatagtcaatattaccatatatatataataatcaataattattactatatatattataaaaaaaaaaattgaaaaaaagttttaattatatataaaaatgtatgagaaaatgataataaatttttttgcacatatttgtaattaattaaaataatgtatacaaaattgtaaaatgccctttcttgtattgggggttgttttattataacagaaaatggtgccctttagagcatttccaagaaatattaaataagtagtgtaatgttatattttgatatttttgtagaaaaaattctttttcaattgtatactataacttatattaaattcgatacatgctaaaaaaatgagttaaatttgatatattttatagcattatattaaatttaacacataattactgtatattttttatttactttatcgtcatcagtaatgacttactttaacctactttttcaatcataatattgctattattttattaaaaaatatacatttagtttattgattatggcacctagtttttatgttgctattatgtataaatattgttattgggcattattggtgcccaatacctttcataagtagtctcacgattaattgacaatattgcttaaaagttattttcttaagttatatgagacttgatatttaattatactaatagcgacatgacactgagaagggtgttaagcactaatagtacctattaataattctcatttttttacccaataacatcatagatggtgttagctgttttagtggtttaggtagcttaggaagcgcagctagatgaagtatagataggtgagcgaggtgatactaacatagtaacacttgttagctcctttggaaagatctcatctgccctcttcttcaagcaattaatgccaaccaaaaggcaagactccaggccctatccattattgttcattaacaattttggcatttttgagttttttattttttaatccaaattacttacaactaacatttcctaccaaaactatagattcacatcccatatattttatttgtaaaaatttatttttcggtttcatttttcacatttttaatgtactctctcatatataaatataattatagagttatgatgatttatgtctaattaattaagtgaatttacacttaggttggaaaagaaattaggaaaatgtgagatgtcttatccagggtgtgaaagaatatacaccatacatacaatacatacataagaaaagcaactaaaaaagctgagacagaacgatgccagtgtggttgattgtggtgtagtgtgtgtgtggggttttaaattttgttaaacatttctatatatatgtagccaaaataagatactgcattcaaaaaccactaccccccaagctgcttgtactactactactacagcagacaaccagttaccacttgcttcataatctatacccaccaccacttgttcttaaaaatggtccaacatgacatagttgactttattagattttgtctcagaatgatactatgacagtcagtagttttgtgatctataagaaaataccagataagttgtgcaatcccatatcacttaagaaatgtcaagtgtgatgattctaaggctgtgtaggtatagaactacataattgaagatgacttagataagttgattgatactacttataatatcaacaaggtatatcttgttttctagtagatcatcacaaaagacattcacagttaagcgtgcttgacttgagataatttcaggatgggtgatctcttgggaagttttcaagaagtgtgcgagtgaggacaaagcacgctaggaacactcgtgttcgtctgaaggatcagtcgtcaatccaagaagcagccagagtgacatactcgtgtataagagctataaaactaggaggaaggcccaataaaacttgaagcggggacgttacgattggtattaaagccgatcgtcggttagcccgaaggatactcatggtatacatacagaagactcaaagagatccatctcactataacataagtattatttttgatatgcatagtattgtcaataataaatgcatatgcgttacacatatttttcttaagatagagcgcccagaattagagtcacatgaagtattagggttaatgccctgaaaagtctaaaagatatttttgattattaataaggagtgaacattttgatgtatgcatgaatattaaattattaataattatgattgaataatttatatataaatataagaaaattctttattcatatatgaggttgtgacttgtcgctgtacagagaactaagatcacttagctatgaataaaactaccagcaacatattaaagttatagaatttttaatcaatagttgttagtgcggttcattgatgctcgttcttcggtgcaaataatctcgattcagattactgatatagtatgacatcaaagtgaaggtgatatagataatatatattatataagacaaggaatgatatgaataaatctgtctttatctaacatgtcgtttattataaagacctaattcatattatgatgatgatgatcaataacatatcgacctaaattctgattaatcatgaactcctattcatgttattagttttttttattcactcgttaaagattcttagagaagatgatttttac

SEQ ID NO: 387600 - DNA, 3480 bp, Cannabis indica
agatggtagatggatgtcacgatttttcagtttcctttaggataggaaaaccaatcaccgcattcatgctgaatactggtccataacggcgaagtcagccatcgacttagccagacaggtgcggttcataagtaatggggaccttgatcatcccttttaagggaatggtgtctccggtaaaactgtagatactcgaaatcaccggtcgtagatccttctcctgtagccccatcttcttcagagcttgaaagttaaggagattcacagaacttcccttgtccactaatatgcggtggacgttgtctcctccaatgttggcgacgatgaccaacgcatcggcatatgggtggtgaaccccactggcgtcactttccataaatgtgatgtcatcgcactcttttttgaacagtttttcgagcctctcactcaaatcgtttacattagtgagtggcctctctcttgcctccttggcatatcgttcctatgattttctggagtctcctgcgacgtgaggacctccaataattgccaatatattgcgaggagttctcgatccactcgcgtaatcagtttctttcttatcatccgctcggggatgactttcctcatttctcttgtattcgccaaatttacctcgcctgatcagttcgatctcatcctacaaaaaccaacattccagagtagtatggccaatatctttgtgatacttacagaatttcttcgggtctctcttgtcgcgatttcccctgatcggcggaggttccttgaagactccattcttttcttcaatcacgtagatatggtcccgtgggactgctaattctgcatagttctcaaatcatggacctccctttctctttgaagatgactctttctttggaggggatttggccaacttcggactttgctatctttggggactacatcttctagggcttctccgtctggaatttttccctctgggactgcggatcgtgatcgcggtactggcgattcacgcttatcctttcctttctctagcttggccagagaattttcaatccttttatggggctctgccatatcgaagaactcgacttacgactcgggccttcgagcctacaactacttctagaagtcagttcttggcaagaagcctgttattaacatgcaaaccaacaaagacttgggggccttctctacttttgttacatcaacattaaaacatttaaaataatattgtagggattcatggacctcttgtttaatattagccagagtggtatagggtagtttatacatcatcgtggcttggaaatgcatgaggaaaaggtcgagaaaggcttcccacatcgatatagatgctttaggcaattggctgaaccaatcgtgagcattatcctccagggttgccgtaagaatgcgacatttcgcaagctggggtacctgtccacttccataatagtattaaatttctctaggtaatctattgggttagtggtacctttttatttcaatgactcagacagtcggaatcccttctgcaaccgagcttgtcgcacctccgtggtaaaaggagaggtcccatgcaatttgtatatgggctttctctgctgctcgatcatcttcaatgcctgtaaaagaatgccctgatcgattccccctggaagggtggcgtggccctgagtcgtcgcaggtgcagttgctacaacaactatattggctaggataacaaccccagtggtcgcagctggtgcgataggcggattggcgagattatttatcccttgattgcccaaacggggatcacaaggctcttcatcgttccggggcatctgcgaacgcgccctaaaaactgcgttaaggtgatcacgaagatcacctttatgaacctggtatcttcctccttgcggtgtttccaccaaacctgatctgatgtacctgctcgaggtgcgactttgcaaagacaaagagccggactcagtgtcattcgcctcattctgcggttaggttctactgtgagggttacatagttctagatcttcttctggttgtgcgtcgtggttgaagttctgtgtagactaatctctcgaggttggctgattcaaatcgagcccttcctgacctgtccttcattcccagcgagtacggttagttcgtcatctagacgtagttacctgtggattatccgagcgggtagtgggtactcgaggaggacgtcgagtactattttgcccgtcgattttggcctccaaagcccgcatttgatcatgtatcgccgtgtattgatcagtggttagttgaacaataccttcggataccacggcaggcgtaataggtggaaattgtcccactgtggcagctggtatggatgtttccccgatgtgagcagtcgttaaggaacaaattgagcggcgttatgttcgtctgtcccactttgccgttgatggtatcgacaggaggtactctgtttcttgggagtgggacgttcatcgtcccaatgtccattgttgacgtctccatttgtctgatttccagccattgtgattttccttctaaatcagcaaagtattactttcccacagatggcgttaaatattgttgaaggaatttttacaacacgaaaaaataaattttaataataataatatagagaatttatgcgagtactcaacccagaatggcgagtattcgaataagggacaaaaatactttagaaaaaactcgaaatacaaagaacacaagagagtataatagttcagttagatcacagtctggttcgtccactgttgcaacgatttccgtctcgttcatttcacggcagatcactcatttatataaaaatcaagtgccctatcaattacacaaggattgaattcattatcaatccgttcatacaataaattacaccaattaaactaaaaaaaaatgtaaacacaataaattaagaatagtttccaccttaattcacaacatacagcaacgtatgcgacttttatagagcgagttggttgttcatattcttgcataagctcgcaggcttaggatatgttcgaggctagtcgagtctaggatgtctgcgtgctcttggagttgcttatatggacatcttataacaagctgatagaactaagacatgcgagtctatattgctttatcaaggcagtttggtccatgggaccagcttgtaacatagagaatcgatctctacgctttcgttggagaatcacggtgatactcgcatattccttgatgtgtgcgagtttagaactgttccttaatccgcgtgttagacatttatatgtataaactgaaatatatgtatgtgtatataacatgcgaaataaaagaacatatacactatatgaatataggatcgaaatacctccgccattgaatcttttagctttagtcccatataagcttgttctacaaaaggaaccgattaatgtgggtaatcgggcttcctcgctctctgaactctctttagatggattttgc

SEQ ID NO: 387601 - DNA, 886 bp, Cannabis indica
ccaacagaactagtaacagatttcgccaataaataggctaccccattcgcatcacgcaaaatagtataacacgtaccacaccactgacagcagctaacaatgagataacatcatcaatactgggtctatagagaatattgcaaagcgaattattaacccaattacacacaatactcgaatctacttccaccttggacaaactaaaaccaagattaaccgcccactgcaagccaaaaactccgccacctccaccacacactcacccttgccacccaacgcccaagttgcccacacaaccccttccccatcccttaccacaccaccatacccagcaaacccacgcccagcagtaacaactgcattcatacagagggagaagcttcccatcccatgcggcctccaaagacagcgaacaccccgctaaccacacgccacaggggttgcctcaaaggctcgcacaccctgaaactcctctaaggtagccaaagcaaggtcaaccacaacatccaaccgagagaccttcttcccaaacaacaccgagttacgatcaaaccacacccaccaacacaccatagccaccctctcgaatgaggtcttcggtagctcgtcaaacaacaccagcaaaaggtccgggaaagtcccaaaacgacatcgaacaagcacctcccaaaccaacaattaaaaatcgtgattaattaaaacttcattaaaatacatataaatgccaaaataaataacatatatataatggggatcccgagtattaaaattttacaactattacaaagtgcgtaatacaaaagtgtcgcctagcgactatacaaaatataaccagatgtctcaaagatcgtacgctccaagcctaattgccctgacatatacaatc

SEQ ID NO: 387602 - DNA, 554 bp, Cannabis indica
ctgttgcggtaaattaacattatcattatcattgtcttctcgactcaacttttgccccaagatgaaggtacgctttcggttattctcgccttaaaattattacttctctggatttctcgttttgatattataatgttttagtcccttctcaattatctaagtgatgacatgtcacttgtaattgttcttgtgaggattagtattattctgtttggagtgagttattattgacgaaaactgtgatagaattattgttattcaaattatttatttaattgattgattttttgttctgggttcgttcttaatttgcaaactgaaggaatttgaattttgttgacaaatttgaatgttttctcatattctaattggccataaattcttcacacacctttttcaatcatttcattaataatgtgttttctgggagtaagttttaagtcagtttgagtagatgaatataaaatgcctatttatgataaaaatatggtaaatgtattattatttacctcatttttggtatttccattagtgtgtatataaccaataataat

SEQ ID NO: 387603 - DNA, 1297 bp, Cannabis indica
aaaaaaaaaagtgtcatttttctctataaatatcacctaaagcagtagtagaaggttgaactcttttatttctaatttcttatgttttaaaagagagtgtttcttttgtaaagaatagttattctactattcttttgtgacttttgtgcgtctttgtaattacttttatatgaagtaaattctaaagtgaagaatacaaataacaacctttaggagaatgttcatccaagtcttgtgttaggaggaagcaagcacctctatttttgggataagatttctattaatcttgaatcggaaggaagcaagcactattattttcgggagaagatttctacaagtcttgtatcgagaggaagcaagcattgatcaagtaatttgaagggatttcaaatcttagtgtcataaggagattcattcagcaaatagtagtagtacatcaagcctgcagcaaaatcattagaggcagtctatattttgtctaagtcaaattactttgtacttattgaaatttgactaataaatcttatctttgagcgtggccccgtgaactggtaacaatatacaagaattgatgccacatataaaatatcatatatcattttaatttctgcaatttaattttgatctattaggttcggtttctaatagaacaaattttaattttgttcaaataattttacaatacttttgcattaaaattgtttgttaatttcatttactaatcataaaaacaccaaacaaactcaacaacccatcaaactccataagttaacatgttaagaagatactacttattagtgtattgatttttgatgtttgacaaaaacataaaagttaagttttaagattcatgtccatattcaaattattggctccgttaaaaaagtacaatttgttaaatgttaaaacatgtattaaaatttgaatattttaacaaacaatgccatgaagaaaattgaaaaaaaaaatatatattttaacatttattttcaagtacaaaaattaatcaagagattgtaaagagaatcaaacggatataattcaagccactttaattcgggatcaatagtatttttcttctcaaaaagcaacaaatatagccatgtgactgaataaaaacaaattaatttcatggtcacatcatgacaggcaaaaatatattcagacatttttcagacatttttcagccatgaaattaactagaagcaaaattgcatttgaagcaaactacaatctttacttttatatattctgactcgcagtcgcattttcatatataacgacaagagggaaaaaa

SEQ ID NO: 387604 - DNA, 769 bp, Cannabis indica
caaaaaaaaaaaaaagattttaagagaaattaggtgcctttggcacgttttttaccacctatttctataaagagtggattcgtgacaagtcatttttatcctttttgatttttttttatttattttggtaactaatttatttttactattattgttgtgcggtatattaatatgctcaatagcatactaatgaggtacttaataattggatacttggatagtattttttaaagtgctcaatatcataccgaaccgatatggtagccaataattggttagtattttttttaatgatctttgtaataatgtggtaattaataattggttagcttttttttaaggtgctcaatatatataatacctaataattgggtaatttttttttttttatgaatgatctttttactatttttttggtaaataattttttgtactattattgtaatgtgataccttaaattgttcataccacaccgatatagtacccaataatcaattagcagttttccaaatcatttattaattaaaatttgtaggagttgatatttaaatacaccaataacagtatggtacattttgtatttgacaccttaatgtgtcccttaatattttcgttataaatatgtacatatctttattaaattcgattagaatttttttttttcaattaaacataattttaagaacatttttaatgggatatgtaaaaattatactatatttgagaaaaaaaaagggaaattatagtaaatagccccaaatcatagga

SEQ ID NO: 387605 - DNA, 556 bp, Cannabis indica
aaggaaatcatgacttcgagctactatgtatgcaagactctgcaagtggagcataagttgttctactttgatctgaaagagaatcctcgaggtcgatatctcaagaattttaagaaaacttttgtcacttgttccaccattattgttcttttctctctggtatcttctggtttctaaatctcttcaattactatgtcaattttgacgatcagatgtctttagcaagggcttggttctgatcgcgttcccatgaaagagacgacgacagaggaaatacagctgacgatttcaaaattgtcgaatgtatagacaaaaaaggaaaaaggtatagacataattggaccaaaaaaaaataaaatatggcaatataaaaatataaaatatattccaaaaatgtggcatattttaaaggagtttttacacaaatttataacttttttagtgtggggcaatttttttttcataaatactgtgtaagttttatattgtatattgtgttaagtttttactgttgttccacagttatttttttaattgttccactgttgttttaatt

SEQ ID NO: 387606 - DNA, 1209 bp, Cannabis indica
atttagttactacgttaaatttattttttttttaattttttaaataacaataaaaaagatagtatgttatttttttctttactaacatatccttatttttcattcataaatttcttcatcttcatacagtcaccaccaacaccatcaatacgccaaccgaaaccaccacccaccactattagaaacaactaacttggtttcataaccaaatcacacaaacaaaaaattaaacgaatctactaactaaatttaaaacaatctaaatccaacaaaaatacactcagatgaaaatctcatccccaaacccatattcgaaaactctaaatttcttttccccacaactattatcttttctcatatctaaatccaaagaacacaaaaatatcaacaacaaaagaatctaatatttagaccaccgcccaaatagagccactgtcgttctccctcagcttagacaaccagtatgatcccaagctccacctcaaactccacctcggtcctccaccgatgcacctcgaatctgatggcaaggtcattcccgtaaccattgacgcttcaagacagatctgaaagcatatttgaaattctgaacaaaataaaaaaaaaaaaataaagaagatggacaattaagatgggacctctaggttccttcacagatttaaaggtgaggtgtggagaggcagggtgatagtggtgttggcagtttcagacctcttggttcaatttgagtggtcggcctacaatcaacatggggttgcagaggttaagcgtgagagacaatgatctgtgcaaaagagagaaagggtaaaggttgtcattttttatatttatttgtattaaaatgatttattttttgaaaataaaatttctactttttatagaattttttacgtgcacagatcattgtcattattgtgccacgtgtacatcgtgtccaagtggacaattcaaccttaaggctgagcatgggttggaaatgggttgatcaaaccggccaacccaacttgaaataggccgaaaaatggttatattgagtggacagaaactcacatgggttgaaaagagcccaacccgcaccaaatgggttgatttcgggctgaacgattttcaacccaatgaacccaaaccgggccggcctagcccaactaaaattaaaaaaaaaaaattaatatacatatagatttttttatctttattctttacatcaga

SEQ ID NO: 387607 - DNA, 1272 bp, Cannabis indica
aaaaaaaaaaccaattacaaactctcatatatgtaaaatctatcatacaattattaattaatacggtagtggtggagctggagccggcggtggtggagagaagtgaataacaaaatttgatcgtggcggtggcggtggggaagctctccggcgaaaaaatctttggggtcgaacagatgatgaggatgaagaagaagggttgaatggtttagctatggccgtgtagttactaggattttgtgataaaagcactactgcatacatcaacaccacacctactaaaaaaaattttccacccattttttttttcggttaatatttcttcgtttttactcaaaattcaattgtctaagtaagtcatagataccgtatttatattattgcttaagaatacaaaagagtcagtttagatctactcaaaattaaaataatagcatattgtatggttgggtgcttataaaatcattttgaaggtccaacaaggaagcttcacatgcccaagactttgacttggtcaaataattataattatattttaatattcataatcttcatgaaactgaaaagattattttattgggtcagctaaataaaatgaagatgaattattttatgtattactttttaattttatttttcaaatttatggttttagttgtttcggtagtttagattgttatgtgaattttagttgtgatttaggaagttccgtgtaacaccctaactagtatagacgtgttaacgtgattttaaacatattgtgcagctcattgctaatcaacgaggttatcgaaaatcgtgattaattaaaatttacttatttaattaaaaaacttaaagtattacatattaatatttcgggatcccgtttataaaatactttacaaaagtttgctatacatataatcaaaagtttgtcgcctagcgactatacagcaaaaacctcgatgtcccaaagatcgtacgctccaggcctaaccgccccgacatgtacaatcttcacctgctcgtactcacggctcctcaactttagccttgcccttacctacacataaagatagcactgtgagtcgacggactcagtaaaaaaagcataacatataacatacaaataacccgggttataacctggcacccatacacccgatcataaccctaatccccatgtcccacacggtactgaatctagaacgctcataagacaatactatcaaccataatgtcagcctatactcaatatgctagtcatactctagccatattgatgtgaca

SEQ ID NO: 387608 - DNA, 1650 bp, Cannabis indica
attaggtctgaaatactctataattagtaaatgtaagcttagaatatgaaatctgggtgagatcaatggtgatcgatactagtctaagccttttgactactaaagttaagaaaaacactattgattagtgtaattgttgatcttagaacatctcgagtggcgattggaccgttgaataggttcaaaataccatgtaattagtctatgtaaacataaaatataaaatctaggtgagatcaatgatgacccgtactaatctaagcctttaaatactaaagtcattaagaacactattgattagtgtaattgttgatcttagaatattttaaattgcgatgaaaccattgattagggtcgaaataccctgtagatagtcattatgagcataaactatgaaatttgggtgataagaaatttaaaatttgctaccatagactgtttatgtgtacactcttgtacacgcggtatatttatataggtacagctaatatttttatttcaaaatttattttaaaattaaataaaattataaaaataaaaataaaatatttaaaaaatattataaatgttttataatttttaaataataatattaggtgtaccaatataaatgtgctacgtgtataagagtatacacataagtagtttatattggcagttaactgtaaaaataaatgacaccttaaatttactaacagttcactcgtttggaggattttattttaccaccaaaatttaagtttagaagattaagtacaaatagactaataattgaaaatactacaaaaaaatgcctctttcaacttactcctttctttctttcttatttatttttttttttttgaaaagataacttatgttatcttaaagaaaaatgactattaagttgggcaataaaaaaatattatatttgactcaatctttcactattttttttaagaaaaaaaaaaaatacaagacccgtcacgcatgcgtgacttcatcggagtccattttatataatgtatattaactagatatttataagtatttatctattttaattatacataaataaaataatttgattctttattgctttttcctcaaagaaatagtgaagtttgaaatcatcaagaatttaaatctgataagacttttttttattatttttttataatttgaatgtgatatcaatctgtcattttgatttgattatttgaatttattttgatcatatttgtttgatttataatttgtttgatgtgtttgtgttttttttttttgttaattaataaagataaataaaaatttgtggtaaaatggaccacaaaagatatgttacaagatatagagggttaaataatagttttacatcaaaagagataccgtgatgacattatatttttttggataattacgatgtagagatgatgctttgcgaggaaatgcatttcattagcgaagaaaaaactgacaacaaagtagagataatgtgaatgtcgaaagaatgaataaatactatataaagatttaattcttttttaaatttgactattttcttatttatcgagaataattgtgtttgagtatgttatgtttaaatgtttagagttattctttcacatcaaaacacgtatttttctttaaaaataaaaatagaaattactt

SEQ ID NO: 387609 - DNA, 1048 bp, Cannabis indica
tgatttttgtttcttcttttggcgtatcatatgtctgctgttcataattttattttttttgatcgatttattaaatttttttatggtttcttatgtgtcttctgcgaaagttttagtcttttcccttatctaaaggaaaacatttatttctttcactaatttttttagggtgtgaaaagtgtaagcatggcttaagaaatccatttgagaatagtaatattctgcttttaataagagatttttttggtgggtttctcttaaattctgttagtcactcttttcacctaacatgttattgcttaaattctactgtatttaaattaaaattggaagattttcttccatttatttctttagctgcttacccttttcataaatatatgtatgtatatatttatgtatgtacgtatttatgtttgtatgtatgtgtctgtggtgttacttggtaaagtataaaactatgaatttgaatgtgcaggcaggcaaaagatgttgtaaaagctctgaaaagaagattacaacataagaactcaaaagttcaattactctctttgacggtaaacttagcttgaatttccaaatctcttcatttcattatgctattgaataatctgttggtttatatgtgtattctaccagaaaccagaaccaagaatcttcttctttttcgatattttctaacttgtttattgaattaattggggttctgtagctattggaaacaatggtaaagaactgtggtgattacgtccacttccaaattgctgagaggaatatattaggggagatgatcaaaattgtgaagaagaaggtaagtttttttaatgttaagtatgccattttcatttcgtaatgagactagcgctaacagtgctcaatttatgctgtgggatccccttaataacgcattttattatgtggcaatgggtgatggactcccacatagtgttgatctatcgccattggtgagatatacagtgacctctgtttcttgagacactatttttaattttatttaaggaaatattcaactaggtttacattgcat

SEQ ID NO: 387610 - DNA, 1581 bp, Cannabis indica
tttctaaaatatattttctattttagcacaagttgttttcaaaaagatagaattttgttcacttataaaaggtatataattttgtgagcattaaatgtgttacaatttaatgaaactacacaaaattaaagaaactatgtttaaaaaaaaaaaaaaactaacctactaaaaattagctgtaaacaatttaatgaaagaaatttaatcaaagaatattatattttttgcacaaagaagaactaagtgtaacatgttttacatgatattgaaaacagtcttaccctgaagttgattgaacaagtcatcaatcatgggcattggatagatattgatctcaacttattcagttcttgataatcaatactcatccgaagggatccatctttttttttacaaacaaaattggagctccccaagacgacacactaggttgggtaaaccctagatctagcatcccctgaagttttatttttagctccttgagttctgtcgaagccattggataaggtgcctttgaaataggctctgccccaggtgccaagtcaatgatgaaatctatctcccagtgtgttggtaatcctggtaactcctcaagaaatacatccagaaattctcttacaactctgacatcctcatgcccaaatgtgttgggtctactggagtcaataacaaccgctaaaaatcctacataaccaatgtacaataaatccttagccttcaaagctaaaataattggaattcgagaaccctgattaaaccagacttaaattaagtgttcttcaccatttggctaaaaagttaccatctttcacttacaatcaatactagttgaatacttggacagaaagtccaccccaagtataatatcaactcggttaattccaattccactagatcaacactcaactccctattctcaaatctcattagcatagacctaacccactttttggagataaccaattctccgctaggtagtagggttcgaaaccctattttaatgagatcattaggcctacccaatttattaattactcttgatgccacatatgaatgtgtagctccagagtcaaccagtacagaggacctaagccgccacatatatgaatgtgtagctctagagtcaaactaacctgttaccatagaaggactggctacaacatctgcttgtgcaatggcacatacccaagctcaaatatgattttgcgtttcgattcttccttttttagtagagggaaatctttcttgaaatgtccaaccaagccacactaaaagcatgtattctagttacattccctaggatgatgcttcttacaacgtggacacttaggataggaatagggctaacgaccacccctgctttggttcccacgaaatcttttactctgacccaagccgcctgacatcgggaaagtcatcctcttctgatcaacattggaatcaccaccatccctaccataaccagaagtaagaagggtgatcgtcccaccaacacttggagtccttggggttcctgaagaaatgctactacatccttgttggaaattattttaccaggaacttagatctactcacaagtat

SEQ ID NO: 387611 - DNA, 1375 bp, Cannabis indica
agcttacattaaggctcaagctggggctgggagggctcttcgggtagaggctggtaaagagcgggtgccttcccagcctaagctactactcctggttcccaataagtgggctcctaatgccagcacctccggatccggtaagtctcccttagttattaatcatgttccttctgctcaagattattctcaatgtagacctatagagtttgacgaatgtctccttagatttaagatgcctcctacccgatggggtgatcatgccaagggcttttatttttcgaacctaggtcattttttaggccggtctcggatggggtctgggcctcccgcacctatcttctggatcattcaacctatctgtctcccagctggtttctccccttggataggtttcttagggatgacgaagctagtactatagtgcaagactttgctagggctgaattagattttatgggtacgattagttttactactttgtccttgtgcgcataatttctcgtgatcattctgacacttgtttgtttgtttcttaaatagctaggccaatgaacgagcttttggcgacccttgcccagacttacaatcccgacctagccttgcctctagcacctgaccagaaggtgaccccaggaaggtcttcttcaagtgctcccttaggccaaatcattctgatcgatgaggatggggaggctggataggaagaagaggctgagattccggccccacttgacaagaagcgcaaggacaagatggtggaggttgagtctaccaagaagcccagaagggttgatactctgactcccagctcagactcgaggatcccacttgaagcggaggaatatactatgcctctctatatagtactgactcttgttcctgctgatgaggagagacaacagctttggattgccaagcacaattatgctatggccaaatacacaaaggggaacgcggaggtggaggccttgaagaaggtcctaagggaggcccaaaacaattcctcacgcagtgagtactttaggaatgtttgggatctgaacatggaccccctgacggactggttcgaccgcttcattgggcctaccctcgctccttttgcctcagagctgacaagccactttgtctccaatttaacccaacgcccggccaagagatatgcagcctgcaattccacgagctcaatctatcaaattcaggatattagcgctgccatgaccgcggtaagtctatttgttggtgttcttaggctttgttttatggcgcctgaccttccgtacttacatatttctcctgtgttgccagattgctgtagagacttgtcacctctcaaagactttaattgaccatatgtacatcatgtccaaatttgggg

SEQ ID NO: 387612 - DNA, 2398 bp, Cannabis indica
caacaaaattatttttcacaagatcatgcataagacataaaagtaaaaacacacatcaaaacacgagtaatcaattgtcaacaaaaatttcaactcaacccatgactacaataaaaattaaaaaaataaaaactaatataaattaaaaaaataataaaaataaataaataaataaaattttcatttaatatacttaaaaaaaatcttatagcaaaaaatacttcttaattgatttatacaatattaccctgataattttccaatttgcctataaaataacccttgctatttttttcgaaactttaaaaacctaaaaaaaatcaaatctttctctctacatccccatcgcccaacacactcctccccttctttgcaaaataataaaaatatagagccctattcccttctctctagctccgccgcctacaaccgttgaggatagcccaatcatctctcaccaaaccaccattaaggacattcgtccaaccttctctcaccaacccaaccgccgtgaaggacgtctgcccaaccttctctcaccaaccaaaccgtcggccctcctctacctccctctcattatggattaatgggtaagtatattattttaaaatatttgttaaataattgtaaaaatatagtatatttttggtagatctatgcaattgtttgtgatttttcagttttgatatagttttcgttgaaatcacgagatatcattttttagagtattctgtgtgttcgtatttttttcgattgattgtcaatactcaaaaggttctcgaaacggatgtcccaaggtcagggaagacctttctcgaaggcttttcgataggttctaaattgtttatcgaaatggcaaatgattttacatttctaaccattcttgacatgttatctttgtgttctcaattgtttgtcaatggtgtgtacagttgtgtttttaaacttcattgccccatgttatcgatgatttatcgacgtgttctcaattgttcatcgatgatttacttatttttatttaaaacaattattgattacttcttcgcaagttctcgattatttgtcgacgttgtttcttattattgtcattttttgttatttttgttatgttgattcagctgtttgtagtttgtattaaattgcaggatcgcttgtgtttctggttgtattgtatattggtgcttggagtgttgagggattaaattgggtgtataaaagtgaaggaagtttgacgttgatagttgaaagcgacacaaccctataaaaaatgcgcaacattttctatgaagagttggaggttgacccattggattatgatttgaaattagagatttgttcgatgtacatgaaaggccaacttgttccacctaaggttatgaagaaagaatgttaactaagagtgttcttagagatgagggcgaccatgtcaaacacagactttatgccattatttgtgaccaaggtgaaaaattcagggaattcggagcctactcctgctgctaattctctccctcagagcgtggttgggtcttttgtccctaaaacagttgatttggtttgtgtgaatgtgaaatttgcaactaatatagatcaagacaatgaaatgctaggttttagtcagcttaatgagttagatgcccctttttttttttacaacaatgatcctattgtagatttgaataatgatgatgaagatgagttggtagtcgatgaagtagtagagtttccttctttaagattagattgtgcaccaaaaaatcatggtgcagagcaacaacagataccccgtaatgaaaatcaacatacacctagaactagtagtagttagcaatgtagattaggaggagatgctccccgtaatgcactatttccatcattctcgtcattcgaagtttgtatcaagtttaatgctcctatgtagactaaggaagatatattggaaaatcataatttgtctaattatttacaaagtaaggaattaggggagatgcaacttgaaaatttgtaggaaaacaaggaagaattgagacaagtcgtcgctaggtttgcacttaataacaattttgaatggatggtaaaaaattatagtaccgatgtgatgaacattacatacaaggatccatattgcaagtggaagttgaggagaaagaagaagatgtgatcaaaccactttgaggttactgtatttcataacgaatacacatgtaacctggatgctaaagcaggcagcaccatgggtggttaaccaatttattaaggggaagtacacccaagatgggactaagtacaaaagacatgatgagggatatgttcaacgattatgggatctcaatgaattatgtgaagccatggaggtgtagggagctgccttagtgtcgtatttcttttgaagtgcgtc

SEQ ID NO: 387613 - DNA, 839 bp, Cannabis indica
atattatatatatcaatatataagccgctcatattgacacttaatcaggtgacaccttaaatttgcaatcaattcagtagtttagagagtttttgccactaaaatttaaacttaaaagattacacatgagtaaaatagtagttgagagcatttagccatcaaaaactctctattatataaacgtttcttttaaaaagaaaaaaaaaatgagagagaaagaaaatatctttccatattaatttctttccttttatttttggaaagcttaacttaaaggaatttattattattattgttgttgttgttgttttaaaaaaaaaagattttttttttatttacaaacgtttatttcttgattaattttgtaaggtttataaatatatatttaaaaacaaggaaaaaaattaacatgcaaactttactttaataaaatatttaaggaaattagtgaaaaatgtacctattttcctaagaaaatataatggtgtttggtttgaggtaataaaatagaatggaatggaaatgaaacaattatcattccattcttttgtttggttgcatttaaaactattggaataccattctgatggaatggtctttccatcattttgatggaatgactattccattttaaaatagaaggaaaggtcattccaatacaagatttgaaaaagtttaataatttttttatcaatttttttatgcattttaaattttaattttattccattcctatttcaattctcattctcattctcattctcattcctattcttatattatttgttataatataatatagattaaaaatatttaaatgtgacatattatatattaat

SEQ ID NO: 387614 - DNA, 2472 bp, Cannabis indica
gtttatttttagtaattttaagtattgatttatatttatatacattaatgtttataattttgatattgtattttattaaaaaaaaattttattaaattataataattcatactaaaatagataataaatatttatcttttaaataaaaaaatatttaacttatttatttttataaatctgtttaattaattttacgaaattgtttattttgaggtttaataaacatattttattatttaatgattaaaatgtatggtttcatgtaataagttttcaaaatatataaatttttaaaataatttttttttgcacatcttttgtaattattttatttttgttgtacatttatgaaaaaaacccttaattgatttggaattcaatatgtaatttaaagtttaataatatcatatttattagagttaacaaaaatcttattataattaataatagtaactaatgccacatactaaattattagcaataatttttgttttctaaaaataaaaataaaaaagagaatgagataaaaagataagtttttaagggtttttttttacaatatagctaggtcatttttaaaagtatttttttaacctcgcatttaaaaattaaaacgcctatttttatacgtgtacaataatattattttcaaattaaagttaaacagataaatcatatttacttagaccatcttcaaatagttatattaccaaagaatattattagattaataaaaactaatgttaattttctcttttgaataaaattaataaaataaggtaaatgtcaaaaatttgaatttatcacctttatcttgtaaaactaactttatcttactttctgcttagcaaaaagactttattttactttctctatataaatattatagttcacattttaattcaattcgtttgttgcctaactcattatattggggctttggttttgtgttgaaataaaatcattcttacttactataagaaaaaagctaataaatttgaaactttgagaaaagcaagaaaactgtcacataacatctcatagattctgctatataaagagagaattacaatattccctttaaaataaaattaaaaaaaattgaaacaataatacaataaaatccacagctctcttcaacaatgagcatatatacaaattaacatgaaagagagaaaatgaaaatatttatttgaatgtaatcaagtttatctgaatgaatacaagagtatatgaagagaacctatatatacaaagaccaaaaggccataaaccgacatttaactaacccaactaacaagaggaataaacggaaaataacactaaacaaaataacaaattctaaatgtattaactaatgctgacaaatcctaatattctcccctcaagatgtaatgtatatgtcatatacagacatcttgcgaatatgtgaagaaagggtagtagatggtaatggtttagtgaaagtgtttgcaagttgaagagttgtgttaacaggaatgagtcggattgcagaagctttaatcttttctcggatgaaatggcagtccaatttgatgtgttttgttcgttcgtggaaagttgggttgttggtgatgtgtatggcggattgattatcgcaatatatgaatgcaggagcagtttgtggaataagtaggtcgttgagaaggtactgaatccatgttatttcgatgctggcagcagcaagagctctatattctacttcggctgagctgcgagagatggttgtttgcttctttgttttccatgaaatcaagtaatcaccaatgaatatgcagaagccggaggtggatcgtcttgtggtggggcatgaagcccagtccgagtctgaaaatcctctaagagacaatggagatgtagaactgtatagtaacccctgtctaggacaacctttgaggtatcgaagaagatggtgtatggcttgcatatgaggagtgcgaggtgatgaaatgaattgactcaaaatgttgacagcaaaggtgatatcaggtctggttaaagtgagatatagtagacgtccaacaagttggcggtaggcgaaaggatcgtcaagtggggtaccttgagtatcatcaagtttagttcttgggtccatgggggttttggctggtttactaccagtaaaactcgtgtccgttagaagttgtaaggtatattttcgttgggaaagaaatatcccttctgaggatcgagcaatttcaaacccaagaaaatatttgattggtcctaatgcctttaatttgaattgattgtgcagagatgcttgtagttgatgcagtagttgattatttggaccgactatgatgatatcatcaacataaactaacaaggcaatgaagttagtgcctgtacctttggtgaataaagtattttcggcttgagattgtttgaagccttccatgatgagggcatctgagagcttcttgtaccattgtcgtgatgattgtttta

SEQ ID NO: 387615 - DNA, 1079 bp, Cannabis indica
aaagaaaattacaagggtcaaaatgtcttttttccataaatttaaaccttattagaaaaagttgcataaagtaataaattaatgaagcacagtccaactaaaatggcatataatttaatgtaacaagattattatggatatatgatttatgtagtaacataatatattgatattttatttttaaataaaatggatattttcaatgattttgaaaaatcagccattcttttaaaattatacttttttttttcttctaaacattaagaattatttaattaaatcataattaagatgatataatatcacatgggtcctcaactattagacatataatataatctcttaattttattatttagtaaatataaatactaaatactctgtatttatggattcccaatttattttgctgtcaaatttttggtattaaatattaatgtgaataatgttaagggggcatgtgttggatattaaaacaatgaggccttctttcttctttatgttttttcttgactatttaatttttctatctcactttcttttcaatcaaacacaaattaaaattaaaatgacataaaaaaaattaaaataatttaattatatgttcttaatcttattttgaacatcttaaattattaaaaaaaaattaaaacttaagtaatcataatacctataacgtacacgactataaaaaataaaataataaaaaaactctcttaaataccgaaatagataaaaaatctgaaacaccaataaaatatggagaagtatagacatgccctaaaataaattataagtacaagaaccataaatcacacttttatatatataagtaaagaaatcaaatatagctaaagatagaatacaaattacaaacaaattaaattcagaaatctgatttacaaacaaatctcaacccaagaacaaatatcaatatggagtgagtgaggctaacaaaaagaaaaattaaatacataaacatatttatatatatatatatatttatataagtggcaaggactagaagaaccaaactaaagggaattatataacacttttcttcttcttcttcttctttt

SEQ ID NO: 387616 - DNA, 753 bp, Cannabis indica
taactagtttgattagtctaactatgtactagtaaccttatgaaatgtaatattgttattagtgaaatttaacattcagtccacttatttaatttaataaaattatagaaaactagtaaccaattataagaagtcatgtcattgaagtactagccactttgatactccataacaatattactactttaaattttggatatagttaatacataaattaactaccggttacaaataactaagtttaaacttaaagttaatatctacgtgatcattctcttaatggtatatatatatatatatatatataaatttttaaataaataaataacatggactaataaaaaattttcatgtgaccattaaattggcaccaaatatatctataaaagttccatataccttaagtattattattataaatattaaatttcggtactctaaatttactattattaattatttgaaatgacattacagaaaaaacaaactatttgaaatgacaagttatagcttttgtcagcccttgaatctgtcttttggtcatatcattatactgtatcattttaaatgacacatcgattgtttacgatctaaatctttctaaaaaaacataaaaaatggaggtgtgttatataatcttttaaccaatctgtgctcaaaaaatagaggagtgctacattaatctcttagtcaatgttaacggtctaaatctactgttaatattatattataatttcttagttaatttttgta

SEQ ID NO: 387617 - DNA, 1265 bp, Cannabis indica
ttttcaatgattttataaagagcatcacaaaagctgatgggccaaaaatcacgtgtaagagaaggagattttaccttagggatcaaaataaagatagtttcattaatagaggactccgaatatgatccattaataaaaccaagacaacctttacacacattcttaccaacaatatcctaaaatttctaatagaaaccaacctcatcccatccttacatgggctcttgctcaggtgcatttggaacaaggccactcaaacatcacctttagtaaacggtctcatcaacacaccattcatctcatcagaaatccgaggctagatcgaatcaagcaccaagtttaaagcatcatcaggcggtctattagaggaaaacaaagactgaaaataatctttaaacatcgtagtaatacaaatagacaagaactctttaatatgggaatgaagaatgtggaacgtccagttattcccaagaccttgaacgttccaaagctaaataattcataacgctcggtggccttgttctacatggaccacctcttcaaaactaaccacaacatatttctcaaacacaccaggtaaaagagaagatatcatgacaccagggacatgtacaattggaatcgactgtatcgatacgaacctcatgaagatcaatcggagtcaaaatgagctgaatgcgatcctccttaggaccacatttaagaacctttttaggactctaagacttagatttaagaacaccatatttatcttgaaaagaaacctttttaatttttctttgtacgcacctgcgatgagcttgatgtggttccatgcaagatatgcatgggagtcacgtacgtgaacagtgcctacttcaccttcaaccatatctttagaaatcccatgcattgaagagcccatatatattactagcacataaagtatccacgtcacccttagcatggtcacctctttatgcaccaactcatattattaggcacacattgagtgttagactccccaatcacaggtaaataattaccatgggccacgggtaaataaataatggggattctgttaattatggaagaagagtcaatacgtctgccaacacaggaattatgttttgaactttccaaacagtgatatcattttcaggctcgtttggtacgccgtataagagtcgtattgtattaaataataaataatactatgtttagatgaagcaatatattgtattaattattacgaccaaaatttttaatacaacgtaaattgtatt

SEQ ID NO: 387618 - DNA, 854 bp, Cannabis indica
tctgatttacaattttttagatgctaatactcaaaattaacaccagcaatctcttagaaacataatactgagtaaaattcatcaaaaatcatgtgtttttattgtgtttttggccagaaagacaaccagacccgaaactgcacgaacttggtcttttgacccgctgctcaactcaactgttggttgaagacaatctgcctggacgaagcccactcgcgactttcgaagagtgagggagagtgtggtagttttcgaactttgttttcgattgatttttttcttcagttattagaatttaatttctaattttttagtgatttttatttaattttttgactccttttattaagtattattaatttaaaagatgattaaaataatttttgatgattgtaaaagttttatttaatcatatttttcaatacaccctttggttagcaaaggttggcatagcaattaagaaaaatattgtagttcacctaaacttatagggcgttataactaacttgttactaatttgactaactaattacttattagtaactagtttgtaataaattaactagttggtaactagttactcataaaaattatataactagtaagtagttattaattaaatgtttaatcttgtagtatttctttattttgtaagttgtgagatcaatttgtaaggatctcaattatttggtattaatcggtttagctagctagaggtatatatttattaactttttttattaattaattatgaatactttgaagagtttgactatcttaaatattcattttagtgaagtatgttctgcgatctattgtactgcggtcggatgggtcgaataatttgcatgtta

SEQ ID NO: 387619 - DNA, 2577 bp, Cannabis indica
tgggaatgcatgaggcttcgcggagatccgcccctaatggagtagggatggagaacggaacaggaatggaaattactttttgtctccaaatgttaaatgggacggggaagaagatcacactacctgttctgacggggacccgtttagtattttattttatatttctagtaaaatttatgtttgcatttttttagtatattagtaattttttatgaattttaagttgtgttttgaataataattagtttcttgaataataattaatgtgtaataatctaatttttatgtagtgtaataattttatatatttaaatttttattataaattttattttttattaggggatttctcgtcccatccctgtctccattaggagattctccgccccagggaataaacagggatagggattaaaatccttaatatatggagatggggataggggagcactctccgccaatttccagccccgtgtgcatccctaattataatatttaaaaatgatttaaagtcaagatttgtgaccaaatttgggtcgggattcaagatacgagtttgggcctagagtctgtggtcggggtcaaatttattacaaaaaatagtatatttttatacttttttttttttaatttcctttattcattatatataggttaagaaattatttacataatttaaaatgttgaaaagaaagaaaaaatgacaatatgtaattttctaaccaaaaaatattaaaaacctcattagctaattttattgaaacaatatatatatcaaaattggtggttaaataattctaaatactatatggtatatattggcctacacttataaatcttattacgtacctagctacctactaataaagacaacatacatacatagtctcaaattcaattaaagtcaacggtactaatggtccaaaagtagtagagtacttccccaacatataaaatcttaataatattttacgtactatatataacctacctatgttactatgtacatataactatatttatactataattaattacgtagttataattgtgttattaatccatctctatagcttaatgagttttaatgttatatggtatatatacttttagctatagctagcttttacttgatcgatctattttatatattttataaatcaaaaatatatatataggggcaggattgggcaataattaagaacatgacagaagaccacctaaaagaaagtgaatttttttaaaatattgattgaaaaagaaaaacatgttatatctcgatcacgttatatgtttaagtctcacacacatatatgttttttgttatagagaaatgtgcaaattaaatagtgcatatatattcccttttatcttttctctgtttgtcttttatgaaattccatctcctatatatctatttactttttctttaatttctttatattatatcaattatacatatatatatatatattttaatttaaatttgaaatgtcaaatcttttgcattgtataacatgacttttatatgaattattgttgttgagtattagtatggcctaatatcttttatacgtggtgtttcatgaatgattatcgattatttttaaagattttttttttttttaagtttatatgggacttagtactattaattatatactaatagcagtatgatatcgaggaggatgctaggtaacagtggtgtcttttagtaattctcttttatgagagtattgctattaggtactaatagtatctaacatattctataagtggcattttacgattagttagtgatatattctttaaaagttattttcttaagttatatatgacataatacttaattacaccaatagtgatatgacactgaagagtgtgctagtagtgtcttttagcaattctcctttcactaataaattttttagaattttcgtccttcaactatgacatatcatgtattattatggacccgaacttttcaaactattaaaagtggtccttgaactattcacattattgtaaattgattttttttaccaaattttgtcacacgtgacgaattaaataataacatggctacagagttcgtcttaggtataggcgggctagaccctcgcctagggcccacttattttagggactcaaataaattaaaataccttttagaaaatatacatatatattttaattttaataatttataaaaatatcatttatagtaaggacccaaaaaataaattttgcttatggctacttagccatgcagttgtcacgtcaatatcatgtcaacatcatgtatgtagggccggtcctaagctatatgaggcctaaggcaaaattaaatgagaaaattacactctatactttttttatattgtcctcttttatttttaccctcttttttaaaatctatcattttacctctttttttaaaacattgtaccaattttgcccctgtcacttcaagatactttccatgtgactctcttatgtcaggatattttgggtacaatacatataaaaagaggtatgtttcaaataaatataaaattagaggcaaatttgattaat

SEQ ID NO: 387620 - DNA, 2003 bp, Cannabis indica
cgtatattcagctttttaaaaaaaacaaaaaaactaactcaaaagaacaagtcagaacaactacaaaataaacagttagaaaacataaatatatatatatatacatacatagaataagaaacaaaaaatacgaacaacaacaataataaaattaaaatgagcaaaagacataaatcagagaaaaaaaaactcaaaatacctacagtaaaagtggaaaaaaaactaaaaaaaataacataaataccttcagcactttgggtatctcaaaatcttcatcatcaagttcgaaatcacagtttgaatcttcaatgatcggtttcgaacgttttgattttctctttttcagagtctgaaaaataacattaattccttcagcactttaggattttctttgaaatttttcttacctattgtcaatttactaacgttgtttttgtggtttttttacaattaaagaatattaagtcgaacaggtaacaactattaatagaaagaacaatatatatagagtatccttaaaattaaagaacaatgtcaattgtcgacatcataatgtttaattcaggtaacacatcagccgcgaacacctctagatttgtttttgaaacgaaaaattccagcctcgctacgagtatccttaacaatacttggtgtgggactaggatcgatacatacattcttcttcacctaagtcacaaacaaggaagtaaattcatctggcttcttcacaagcatagaaaaaaaataaccttacacgcttattatttccaataacttcggggctatactttaagcctttcatgtacttgcaattcacttctaattttaagtcatacggtactttatcaacatcgagttcttcgtacaaaagatcaactaaacatgagcatgttacattcatatcaatttcgaatgtcaaattttggctcagttataaacctaatctctacccttaagctcccaaacaccattatgcataacgaatgaaaaaaaaaatagttgaacctgttacagacatttaaaaaaacacaattaaaaatttagaacaaaactctaacaaaaaagtgaaaaaaaaaagtcctcaaaaagtcataaatctgtcaagcatcaaaccccatcaagcccactatcgggcccatcatccctgaccttaggtccacgaagaccatcggactagcatcaagctgatatcgggcccatcgggcctacccttaggtccaagttgaccatcgaactagcatcgagccaataggacgcatcgggccctacccttaggtccaagttgaccatcagactagcatcggccaatcgggccatcatccctatccttagatctaagattctcatcgaactagtatcgggccccatcgaactagatgaaaaaaaaaatgtagaaattaaacccaaaaaaaaaataccataacaaaccaaacagcgactatttcaacacaaaacaacaaaaaaacagcaacaacccacatatcaatcataaaaacaatattctaaactaaatataagaaccaataacaaaaaaaaatacttacccattgattgttgctgaagtagtttgttcagtgtcgcaagaatggaatctcacactaaattccttaacttctaaaactttgtagtagcttggagaggttaattgtatactaaaactaaaattttagtttgaattggttagaaaggatgaaagaaaatgaggtttcagagaagggacatctgagagagggtgagagtgtatacaaggatattttagatactcaacataattgtatacacatttctttaatattgatacacataagtttgaggaattaatttcccacaaatatatgcattgatagttaaagagcattgttattgggcaccagtaatgtctaacacctttagacatgtcgtcttgcgattgactaacgatatttactaaaatttattatattaaactatgtaagataggatacttagttagaccaataacaatattaacacataagatgatg

SEQ ID NO: 387621 - DNA, 642 bp, Cannabis indica
attagtgcccccatagcaatgctctttagaggatgaatgtgacatcttcatccctccatccctctctctcttctccttctttcttccattcattcaaaaaatcatccccgccaaatataaaaatttagacaaagtaatcatgtgtaattttatttcttaattaattaattttatttttctaaattttgtttttaatatatggaagataacatatctttgattaatttgtataaagttttgtcaattttttattctctctccaaatcacttaattaacttccagtcattgcttctccaatgtgactatttgatgtaaaaatatgggtaaattaatgtagttttcaacaaaataagttatcaggcgatttgataagaaaactctcgcgacctaattctgcacagtaaaattcttatttttgtgcaaataaaataaagtcaaacgaatcgaaataaaattatcatcatgatttggcatatcattatgcatgtacatatatattataatttcaatttttttaaggaaatttacacccactactgatttttcccattttattacatttatactgttccacggcaaaaacaacatttatactgttttttttttggcagtttactaccttttaaactttagccgtgtaa

SEQ ID NO: 387622 - DNA, 618 bp, Cannabis indica
ttttttctgacaattcaccatggcgtccagtattcgaaccacaacaggatttgaacagcaatggaaagacatctgcttagaagaagaagaagaaaatgaagtggcatacgaggaggaggaagtcaaagagattgattttgacgattgttggtgcctcattgggcgactattaaccgggaaagtgtcttattttcagatatttcaaaacataatcgcggatttatggaaaccctagaaaggcatgtatatcaagattcttgaacaaaaccggtttctatttcagttttaccatgaaatagatatcaaacgtgttctcatgggcagtccgtggacgtatgatcgtaagaaacttattattgagcgcctcaaacaaggagacaattcgagaactattcctctcaacaacattgacatgtgggtgcaagtccacgatctacagactggattcaaaaccgagagggctgtttgtcaagcagggaattatattggaatgtttctcgaatcggatcctaacaactttcaaggtatttggcatgaatatttacgtgttcgtgtccgactgaatattgaaaaaccattaaagaggcgtatgaagttcaagaagaaaaatggagaggt

SEQ ID NO: 387623 - DNA, 2121 bp, Cannabis indica
ggcctagacacggtcgtgtacctggaccgggacaaagacccaaacccgaacccagacttagaccttggacccgatcccagaccaagactcagacttagatagggatctcgatacgatcttggactcgaacccagactaggacccacactgggatcaaaactcaagacctagatgtgaaccaagaccctgacccagaccaagaccgggacccgcacccgagacccaaactcagaccagactcgaacctagacccagactgggatttggacctggaccaagacccagaccaggattcggacaaggactcagaccacgacccaaacatgaacccaaattcgaacccagacattgaatggaaatcgaaatagggactaggacccaaacccgaacatggacccagacttggattgagaacctgaacttgggcctcagaacccagacccagatcaaaacttgggacttggacacgaacatggacctagactcgaacctagatctggacacaaaccgagatctaaacccaaacctggactcagacaaggacttgaaccctgatcgggtcctggactcgaacaaggacctgagactcaaacctggatgggggacttggacccgggacacgggcatcaaaactgggaccgagaaccaagacttgacccaaaatccgaatcctgacctaggacccggaccaggacctgagacacgaagtggaactagattgggacccgagaccgtgatctagatctggacccaaggcttggacctgacccgtagttagtgtttggatctgggacccattcccggactcaaacccaaatcaagacttggacccacacccagacctagacccataccccagacctgggtctaagtccgaaactgggtttgagtttgggaactagaatatgactaggacctagacccaaaccgcgatgcggagccgaatcaaaactcgaattgggattcgagacacgatcccaaacctagacacagacttccacctaaaactggacccaagacccagacagggattcgagactcaaacctagaccaggacctagaactagattgggcacccaaacccaaaattagaaccagactcgcgacaaagacagggactgggactcgaacccaagacccgacctcgatctcggtcccgcaccaagacccggacacgaacacagatcaggacccaagatcaaaatcggaacgataccgagacccaagactgggatccagattttgacccacgacccggggcttggtccgaacccgtagtcagtgtccagatcttggaatcgtacaaagacctgaacttggaacctgagacctagacaagaacctagactcgtaccagaaccaagaccaagacccagacccaaaccaagacccagacctagacatagactttaactcaaacccagatccagataaagacccaaatccagacctggacccaaacccatatccagactcataccagaactcggactcgaactcaggactcataccagaactcggactcgaactcaggactcagaccaggaccgagatcaagacttggacctagacccaaacttggacaaagacctaaaccttgactaggactagaacacagactaggattaaaactaggaccgggaccgagagtgggaccgggtgccgagacccgatactcggatcaaggactcagaactgaactgtgacccaaacccaaactaggcaaagatccgtgacaaggaccaacactgaacacataccgggacctgcactcgaactgggaccctaacccagaccaggacctaggaccctaacctgaatcgggcacccagacccatgacttaggaccaatgaccaaaacctagacccaaatctggacctaagacccgaaccaagaaccaagacatgagctagaacttgactaggatctcgatttggacttgggacctaggacccaagacccgaggcttggacccgacccatagtcggtgtctaaatctgggaattagacctgaaaccagacccaaccacagaatagaagctgaacccgaacctgtacaagaacaccaactactctcgacatgtggttggtgtttggatttgggacaaagactcggacct

SEQ ID NO: 387624 - DNA, 1292 bp, Cannabis indica
ggaaggagagaaagagatccaggttcagatcttgattatgttctgctacagaaaggaatcaagggctagagatctgaacggaaggagtcattatattccgctgcacccaatgtaaggttttctaaactttatatgtgtttatttcattattttagaattcatattaggatgttaatgaaacatacatggtagtaaatctagatcctggtaaaatatttccaacatcatctggttaactatcaccatggactgcttatatgtacactcttatacatgtggtacgtttatattggtaaacctaatattattatttcaaaattatttaaaaatcattttaaattaaatataattataaaaataaaaataatataatcaaaaaacaaaaaagttttataatttttgaaacatttttttttataatttttaagtaataatattaggtgtactaatataaacgtgttacatgtacaagagtgtacacataagcagtccatgttggcagttaattgtgaaaaatggatgacaccttaaatttgctagcattttagtagtttagaggattttactgccaaaatttgagcttagagagttaagtgcaagtggaataatagttgagagagtttagccataaaaaactcataataatataggaaactcaaaaattaggagtacccaagttaattaattgaaataattaactcgggagcaaactagagaaacttgcaacatctagtatgtcaccagaggagactaacaggaacagtataccaaattactaaaatctcccatataaataaagttaaaaagtatactaaaaaaacgagtttcagtaacacatgttgagtgactctaaagttattcagtgacacttcactgcgcgtcactaatgaaggtgactggaaaactagtgtttagttacccttcaatgcatgtcactaaacccttttagaatcactcattgcgcgtcattgtaggcatttagagtcaggttttatcaggctgaaaaagtaacagcaacctcaaaaaagcgtcattatattttttctttttattctttattattattttgtacatataatgacacacaaaaagagtgactatattagatttttttttaaaaaacaaaataataatattcaattctttttaattcatattttataatttttttaattggttgttattatttttattcaaatcaattttagggtaaaaaagtagaatggttatattgttaccagatttcctttaaaaatggtatcagattttttttttaaatagaacttaaagaa

SEQ ID NO: 387625 - DNA, 1235 bp, Cannabis indica
ttatccatttctgagtatgtggacaaagtccaatcactttatgattctattatcactgctggttccttcatttctgatcaagacttaatacttcaattgttgaatggattgggtcctaaatatgattctgttgtctcgggtatcacttctcgaagtgatgatctaactattgaagaagtccaggcccttctatatggctcatgagagtcgtcttgatcatcataacaccgttactgatctgaccttaaagatgcaagccaatcttgcttatggatcacaaaagaatggtccatctctaccatttcaacctgctaccaaaggctttgcatcagaaaattcagttcgatcttttggtcgaggtaatggcagaagattcccttccaactcacgtctcatatgtcaactttgtttaaaaagtggccatacagctactgtatgtcactatagatttgacaagaattgggttacccccaaacccaatgccaacaaccctcaggcttatcttggtgaaatggaaactgatcaagataacactagctactcccctcaagttcttccagattttggtgatgactttgggtggtttgttgacacttgagctacaaatcatgtcaccaacactcaagacaaccttgacactgctatagtctataatggaaatgacacattggctgtaggtaatggtaagaaattgactatctctcacataggctctacctccttaccctcttcctctcatacatatccaaatctaaattcggttcttacagtcccttctattaaaaagaatttgataagtgtttctcaattgactaatgacaataatgtttttcttgaattccataaaaattcttgttttttcaaggacaagaccactggccaagttctgctgagagggaggcttaaagagggtctttacttactttgagaaggttcttcaacctcaaaaccagccttgtaatgcaaccttgcctatatgtcatctgatatgactaataactcttgtaattttcctactgatcataatatcagttcttgaaacgattttacaagtaataaaaatctatcttttccaataatatgcatatttgcactcccactgtttttcattcatctctctttgcaaagatgtaaactcttggcagtgcaagctcgggcaccctggtgctcaaactttaggcaagttattacctcagttaccacacactagtgtttggttttgtgccctaaataaa

SEQ ID NO: 387626 - DNA, 2769 bp, Cannabis indica
atagcatcctaaattatttaaaaattatttcttcaaaaattcatgagagatcttctttaactacattatatatatatacaaaaaatatatatatatatatcgagtatttataggtagtaaataagattaaaaataaagttataattacaagcatgaaaatccctccaaaaaggggtcggcaaagaattataattcattgcaaaaaataaaatagttaaaaggaaacttaaagaacttatatatatatatatatttatatatatatatataaatcaacatcatgcatgaaaatgatatataagaataattgaaaactattggtttagggtctataatctataaatatataggataatcccttttcatatatatatatgctcgatcatgatgatgatcatgatcatcatgatcagtcatattttttgctacagttaactaattatattaagaccaatcattccattgaattcattcatcttgatgatcaaaatctaaaatgcatatacaatatctatatatatatatgctttaatttctatcacatatataatgcaatagatgtttagtccctttcatatgaaagctcatcgaaaatgatatataagtaagttaaattttagtaaattcataaaaaagattttcttggtgactatataaattagaattgactgattaattaagaaaatataaatatatttatatataaaatatatgaaaatagttattaattaggccaaaccaaccattcatgtatgtgtagtctactataacttattatttactttagctatatatagttaataactttgaattttattataggtgatcattagttttttattattgtcaactatatatatattctgtctattttttggttggatcacaatggaaatgtttgtgttatataaaatggtgattaaaatatataatttacatttttatggttggtataagtttgcaaaattaaatatggtgtttttttaaaaaaaaaaaagttaataaaatatgaaaaaaaaaaagtaatttgcagcataattgacaataatatctaagttataattttaaaatttttgtaggtacctcactgttaagtgttaagtaaattgtcacgtagtaattcttgattggtcaaagtcattaaatttttattttttattaaaaaattattttaaatgtaccaataaaaaaatgacatgtggataatgacttaatatttaacggttaggtacttatagagttttaaaaatataatttaaatattattatcgcaaaaaattaaacttatgtatttatctacaactggagttaaacttaagtatttatgccgtaaattactcaaaaaaaaaaaatataaggtatcttgttacctttttatggtaactagttactcctctagttaccataaggatatttggttacccttattcgattttcccatatttttctacattatcttcaattttttcatgaaataatctttttgaattaaattattttgatgttatcactaaatttaactatatacatttttattaatcacaatatttattgttattaataaaattaattaaactagtaataatttgtatttaaacattaccttttagttacaaacaaattttttgttgggattaaaattaacatttagttaaaaaaaaaatcaaagacataagacaaaacaaaaaaaaacttagtgatatataataataattttgattgttacttgacttcatcacgcggaaaaaaatgaacggctctaaagagtggacccaattcaaacctatcatagctactcaaacatgattatatatatgtatgtatatatatatatataggttagtaataataattcaaaccctctttgaatgtcactttcaaaatataatataaggatctcatttataagtatatatcaacttattgaattgaagagtgaaaaagtatgaatgaatattgccctaactcactcaaaccatatcctatagtcaaaatgttctccacaagttttgaccaaattcttcttcttaaaggtggcactatgcctttcatttgaacaactactctactcttgagatagtcatctcaactttttgtgttagaaagtgtatttagacgcattgttcaatgatttataaaagaaatatagtaaaatttgcggtaaaaatcctcaaaaatattactttgatgtagattagtcaccaatctttaaaaatcgcggcaatagtaatcaagatcatactttttatttgtctgttattattattgatctaaattgttatattaattttaaaaaataaataaataaattatttaaaaataattttttttttgtcttcatcttcttcttcttcttctcaatgccagaaatttcctcttattcttattcttattcgagctttaatggtggtcgaggaggagaaggttaacagatctagctctgggttgtcgatcttggtcaccaagcaggacaaagggggctgggtcgctcgagaacaagagaaaggaggggtttgagagcaagagagaagagaggagagggtctgaatcgtccgttggccttccgcctgcaccgagaggaaggaacaaagagagagggagaggtggctgatggatgagatgggcaacttctgaccatggtggctatggaggttcaggagtagaaggaagaagacgaaggtgagagagaagagaaagggtaaggctgagaaagtctttaaaagaagaagagaaagggtcgtcgctattcaggcgtggtggtggtgatgg

SEQ ID NO: 387627 - DNA, 1073 bp, Cannabis indica
cctttatttatatatatgataatagaaagggaaattacaaatacgtactaacaaattgtcatatacaattatctcaaaaaaaaaaaaaaattgtcaatacaaataaactaagtttatcagcgtatactaaggatggcgatatattataagataaaaatatgtaataaacttcattttatttttttgttattaaattcaacttgattttaaagctttatctaactcttttgtgggcaactattatcccactaaataatggaaaaaagaaaaggtgaacgcagtatcgtatcgtaggtaaacatgattagggtaagaaaaggtagagtgatcgatcaataacgcggaaaagaaaaatgtatatatgtgtgatagaaaacgtagggatatcacatcagaaacttaaacatgaagatgatcactagtctctttttagtggcaattaaatatgagaaattctaaatgtacaaaacacaatataatacaccaaacgcaccttaagagacagacttaaagtaggaagggtgcctcgttcaataatgtattccaaaagcccaaccccgtacgttacaaatggcaaacaatgcgttgcattgcatatatgcgtgactacgagtgacgaatagatagacaacttctttgattggcttgttgctaatgctattacatacttatcaactctccaatcaaatctcattttaatttcacaactatccttctctctctacctctcatcataattccaacttccacgggttatttgccgcaaactattttatgcttttatttttgagtacatacaattttgaattttctattttataagttattaattgaaccctgtattttattaaataataaattaaaatggactctgtattttacaaaatgataaaaataaaactttgagcttaatttttgacaaatttttttaatataaccaacttgaagacaattcttaatacgaacacatatagaaaatataaacagttttttcatagcactttttagatctgattataattaaattttattttcacaaaaaaaaaaaaatcaattcatggtcctatttatac

SEQ ID NO: 387628 - DNA, 1039 bp, Cannabis indica
tttttggtacataattccatgtaacggtataggaaatattctaaaatgatttaaattttgagctgtatgattggggcaggtttgcgcctctgattgcgtaccacattagctgaggtgagggctcatgtcttaacaccacccctcaaacggagggggtgcttgagtcactccaagtttggaaatcagctcatgtggtgacacagcttttgcaagacaattcgtaatttgatcacaagaagaaacataccttagctcaagtttttttttcaaaattttatctccaacaaagtgaatatcgatttcaatgtgtttggtgcgagcatgatagataggatttgatgtgagtgcattgacactgacattatcatgccatgtgacaaatgttgaggataaaaaattgtagttctttaagtaaggattcaacccaagtaatttcagtagcaacatgagcaagagccctgtattcgaactctgtactggacctagcgaccacaacttatttcttcgatgaccacgatatcaaggtttcaccaaagtattcacaataaccaccaactgaccttctgtcatcgacacaacaccctagtctgcatcaaaatagcctatgaagcttaatttgtcactataaccaatgtgaagtccatgatgtagggtgcctttttaatatcttaggattcgttttgctgcccccagtgaactgttgtaggtgcttttaagaattggctgagcttatttacaacaaagctaatatctcgtctagtatgacataaatattgcagagccccaattaagcttctgttaattgttagattatgcatgatttctccacttgtcaacaaaatggattttcctgttacaataggtgttagacagagctttaaatttaccatgtcatgtctgcttagaagttcttcaatatacttcctttgagtgaggtataaccctgtttcatccctagtgacttcaattcttaagaagtagtgaagatcttgttgggttttatgccctaaataaaattcattttaatataatcagattt

SEQ ID NO: 387629 - DNA, 535 bp, Cannabis indica
accgtatgtgataaattagaataggttgacacttttcaacataaaataccaaaaacaaaacagttaaaaataaaataaaactgcaagtcgtatttccattggcctatgctattcatttcccaacctcatcagtcatctctgccatcttcacttttcgttttcccctaactgtactcgatcagcgtggaagacttggcaagcagtttcaatggcgtcgaggtgttgggaatcgaattcccataattgtctataaacgtgattgtagagagagcgagccatggattgggtccgccatcggcgatcttaagcttccacattggttcttcctcttctcctaaatcagaggaagacccaagtattcctttgctctcatctgtcttcttgttaatttaggtcttttttcatttaaaaaaaataataatttaatcacaggccagtgaccatcatgaaccagattaattagtttactgaaacagatttcatatttctttctcatcgattgcaattctgttattttacaagagtgtccaagcta

SEQ ID NO: 387630 - DNA, 894 bp, Cannabis indica
cattcccaattcctatttctattaatcttattcctttattttcatgcaatctaaccaaaccaacttttttatatatatataataaacttttgataataaatgactaaatgaaatggattaaatattgttagtgtagaaaaacacagaacttaactaaactaacactaatattaatgtaaagtaactataatgaaagatttcagtttacattatattccacgattgaactagatcaaagagccaaaagtggagttgggcaactaattattgtacttttgtagaatagttgtagaaaagagtttatatatatagtggacgatccacatagagaaaggccataagaattagatatacttttgttagttacaatatatataatttataattaaaattaaaaagtgatatctattaacaaaattcttgttttaattgtttgatggttataagctaacttacactttagatggttctaaaattttgaacccctatcaatgagatttatattaacactttaatcattgaaattaatttttttattgttacttttttactttaaactagtaaaaattacacgtgggtaccacatgaacaaaatctttataaaaaaatactactaatactcaacactagtactacaaaatattatatatcattatatagttaattatacatccttattgtattttaagcatataataaagtgtagttctattatttttagggtaaatactattttagattttatgttttataaaagttaccaaatagattctctgttttgttaaattataaaatagatcctgtattttttaaaatggtacaaataagaccctaaactgattttttgtcaaaataaaatttaataattgtgacacagtagtcccgtgatccgta

SEQ ID NO: 387631 - DNA, 976 bp, Cannabis indica
ttgcgtcttataattggttagcggtattatttaaaaattattatcttaagttatatagaactcgatacttaattgcaccaatagctatatgacatcaaggagggtgctaggcaccactggtgtcttttagcatttctcaatagtttaagcattatatcaaagtgttatgccccatatttcgagtagcaatatggccacggcaagtgtaaaaaaaggctggaaaacaaatcaacttgaatattgaagaaataaatatgttgaatcttgcctcggaaaatacagattgtagacgtatttaagtctctccttaatcaattaaagatgagtcataaatatccactactattaagtaagaccaacaagataaacaactaacagaaaaatgttcatctcgggaagcacaaagtaaagaataaacaagacaaatataaaatatgaagggataagccgctggaaagggtagatagcgaggtcattaagagttcgtaactcattaacccacatactcgtgaatatgttaaaagactaaggaatatgagtaaaaggcgattcatctcagaaagttcatgaacaacgttagaggattgcctttaaggagcacaaatgattcaatcctaagtactgtctaaagacctctctcaaatagcaaaagcaaggaagatacttcgattagcatcttgcatgcaaaacacgcctacaaaataactaccttcaagataagtacaaaaagttgttaccagtgtgtactgtgagacatagagcaagatgcaatatcacatcacaataaaacttagtcagcacgaccgttttggataaagataaaggcaatttgtagcagttgtttcctttctccatgtgttgtaaatatgaaacttgaaaattttccatgttttatgaatatttacaaagattacaattattgcgagagtctgtagtcccgtgatccgtaaggggaaataccgggtaagctgtgcaa

SEQ ID NO: 387632 - DNA, 785 bp, Cannabis indica
gctcctccagccttcgttttcatatcatctgtagtattggcaactaaaaagattgaagactttagtaaaatttaactttctgacctgacgaccattactaaacttttgtagaactttctttgattcatagtgcttcctcataagagtctttacaatacaagtagctatcgtctgacaaagagcatatgtagaaatacgaggggccccattagcaactttacactcatgcaaccatccccgattctcatacttctagcagaagggccgaaaaaccttctagcacacaaaatgaataaatatggagacagtggatccccctgaccaatacctctggtcggaaaaataggacctatctcatgagccccatgaataaccttgtaactggcagaagtcacccacctaagaatcaattgcacccaataattagcaaatcccagcttccttaacatagcttccaaaaagctccattccacccggtcataagctttgctcatatctagtttaagggccatataaccatctttgcccttcctcttcctccttaaataatgcagaatttcgaaggaaaccagaatattatcagagattaacctgttggaatatgttttaccagggtctagatttactaacaagtatgtttcattaatatcctaatatgaatttctaaaacaatgaaataaacacatataaagtttaggaaaccttacatttggtgcagcggaataatatgtctcctttcgctcagatctcttaccattgtatcctgtctgtcgaagagtatcacc

SEQ ID NO: 387633 - DNA, 802 bp, Cannabis indica
ttatttttatattaatagcattagcggcgcgaccactaatggtattattagcggtgggaaccaatttcactgctaatgttattaatagcgaccacttattagcgggggaccattagtaggggagatccgccgctaataccctatagcggctgatttggggggtaatagcggcgcagtggtccgtagctaatagagtaaaatgttgtagtgtttttactttttttatagaaaaatgttacttttacgttgtttccccatagcaacaacatcaaaataatattattttgaaacaacaaaaaaacgacactttgtgtagttgtaaaaacaaactacgttgcttttccataacaacaatgataaaataatattttttaaaaaaacaacgaaaaaacaatactccatatttttgtaaaaaaaactgtaataacgtaaattttttgttatttttatatatttatgaaataatcccactcaattttagattacttaatcaagttttaggatttagttttgttgcctagaatttcttccaaaatacataacagtttaagagccatatgacaacgggacccgcattacaagacacaccaccttagttaatcctgagtctattatttcagaggaataaatgataggttagtcatctccatgagggtctagctggacaacggataattttagtcttttcctcttcgcaagtgaagtcgactcggagaagggtataggaggactgatggagtgtaacacattgctcgaggactaaaatgttgtatacgcatttaatgcaacatggggaagaaca

SEQ ID NO: 387634 - DNA, 1045 bp, Cannabis indica
aaagagaaatgtctcaaaaaacatatacatgtatctctcttcataatgtatttgctcttgcctatgtttttgcaaatagcatgtagttatgttaagaatttatatgtagctttgaataattactgttatagcaagctaaatctcaaaggtttgcattttaataaccggttcttaaagtgtaagctttagtttaatatatatttctatataataattaaatacttcttttagaggaaaatgttttaagaataggatatttgctagctaatatagtaatacgttatacttctctttttataataataattggtactaaagtgtatagttcatgtttccttgtcacatggttatgtgcaccatattataatacatagattgttattatttcttgaatgattttacataaattcttgtgttacttgtggagccacagatattcttgaagtgttagtatgttaagctaataatacatattggaaaattttacactaggatagctatttttctttctatctatctgcacatgcatttatattttgttttatgcaatagagatatcatagcgcaacgctgtacaatattatagttataaaacatattttaccaactttggatatttttgaataaattactatactaaaagcgcatttagaaaatgccatcacataagtttactcacaattttttaaaattagtgaaactgctactatatgcataatgataaacatcatcatatgaaaaaaaaaattagatgaattaggaagtttgtattgctcacaataatttttacaaacaatagcaccctaaaaaccagggcctaatataataaaatctgtacaattgtttctatttcttgatcctctctttaccaaacactttttgtgttctttacaagctatggaaccattcagtatcttcgacagagactttccttggccatattgcattaattctatagataacatcttgttttactcctgttatgaccttctctacatccggctttgtgctttcccacacagaaaagttttgagctctccaaact

SEQ ID NO: 387635 - DNA, 2492 bp, Cannabis indica
atttttattagtgggagctataaatcttaattggtccatccctgaccgtatgtgttcttataagtagctaagagttgtcgatcaatctaattaattttgttattctccatatatatatgtgccattaatgtatttatctggtcattttgttaatcccaattagtatttttatggagttagaattataaggagtttattccttaattaattttaatgttgtgatcgtgtttatgtgttgaaactaatttagtttttcctattagtcttgtcttttgacatggttctttagtcttttccttttagtttttcccattagtcttgtcttttgacattgttctttaatctttttcttttagttttttctggttcgagtcttgtcttttagcatgagttgtgtagctcagaatcatcatggtgctatggtagaagcattcatgaaggggaaaattggatgtgttccacccgaaattattgagaaaataggcattaaagaagctttgagttggattgcaactcatccgtaggatagagttgcatgttggaaacacatagcttggtgtgtgtccaagcgattcatagcggtatttttatgccttcacagtttggtcttattatttaagatgttcgaaatttacttttggctttatcttttgttgatttgtgttttgtacaacgatctgcaaataagttggctcattccttggcaagaaactcttgtttctctacaggtcgtgtgcttcagctagaagattgttcctctgaagtgcgttctacttttctgaacgaatttattaattaatagatcttatgatttttattaaaaaaaaactctgaaaaaaaaactctgaataattaatttaaagtacgaaaatcatgattaaaatagttagttagttgttattatgcttgaaattatttattttaaattttattttcaatatcataaattattaatttttttaaaaaacatgtgagagtgtgttatacttataatctacaatgttattctgaaaaaaaaaaaactagctaggatataattttgctaagagtcgaaaatagaaaaattcattcaggtagaaaaaaaaaatgatgtctttagttaagaaatatagtactttgtgacataaatattaaagtttaatctttggttaaaaataatacttaagcttaaatttatacggtaataatacttaagttatatatttttagaattttcgtagatattttaaatgtgaaattatcagtcacatgacagtcattgattggtcaagttcattaaatttttatttttatttaaaaattcatttaaatatactaataagaaaatgacacgtggatattattgacctccttttatccaacgacaatgagtcttaattgtaagcgataagtgatataatttagatataatatgaaaagataaataaagaacacagaggttttaaagaggttcggcctcgagcagttcgataatagcctactctctttggtttgtattgacttaagaacaaaaaacacaatgttccctctcttaaagctcttacactgaaatctctaagtatgccctcttagataattctttcgaccctttgtccagtgagaatggatcactatttatagagctatgtgcttgagggaaagtttctcttctgcttacaatgtctataattggtaagattacacattacatatataaattacacagattgaaggattttgacaacttgccatatctctgtgatacgatcccagatttatagggattaatcttgtgcttcacaatgcaaatgctgaaattgctaagtgttgatatgatgttcggattgtccactgttcgactgggaggacctcgtccgtataggtatacacggcgctcgactcggaacatctcctttgggcagatatggggaatcacttccacgtgttaccaacatgtgatgccacgtcagagtgcgaaaattgggataactgatattgactcggataggtacctacagaagttctaaaaatatatataacttaagtattattaccgtaaaaattaaacttgtattcgaaaattaaatttaaatatttatgctacaaattaatcttatgaaaaatctcccatatgttcatacattacttagacttaataaattttaattgaagtggccttaaattggacttttcttttcaatatactattcaatgtgagtgtcacattatttgatagtaaataaattaggataatgcttaatagcggtcttaaaataattttatagtcattttttggaaatagatgtcattgttttattttattttcatatttaattttatttctttaattagttattttttataattttgaaaaatcttctaagtcaagcacacttaactgtggagttctttcgtgatgggctactgaaaaacaagatgcaccttgttaatataggtagtaccaatcaatccatttatgctctcttcaactgtgtagtatcatacctatacag

SEQ ID NO: 387636 - DNA, 877 bp, Cannabis indica
aaaaaaaaaataaaaattgcaacgtctacatcactatagtagtagtactaaaaaaaaacttaacaatttgtaccaatataagactaaagaacaccatcgcttaggcttcttgacacaaaaacaggtcttggatttttaattcttttttttaataagcaaaataaacaagagaaatctattttcagctaacaacaatcagacaattattcatctataagttgcttgtattttttttcactacaatttaatattatcatttaaaccacattaactaacaatacatgaaaatattcaagtaaaacattgtaaaaattaatagatacgtattattacgatattgtacttaagcgagtaccggaaagaaagttgacgcgcggcagtggacacaagtagaataggaatgtgttgtgtggtgtggggttataagacacgcgctgaaaaggcgcgtagtacgtaggaaatgtgtgatgttgttgtgaacggccttaaccacctccccagtgtccatgcaaaatcatataacaccatcctcatttctcctcaacaaaacttaacagactctcttctctctttctcactctgattctctttctctctctgcttgagattgtacggactcagttgacgattctttctttcttttcctctctctctctctctctgcaatatcgaacgatttctccgtggaaattacgagtgcaataatggcggcagctccgattgtcaccacaccgccaattgcgttgtacgtcggagatcttccaccggacgccaccgaagaccatctgaaggagattttcaaagatttcccgagtatggtctctgttcgagtctgtagggactctcagactggtcgctctctccgctatggctacac

SEQ ID NO: 387637 - DNA, 921 bp, Cannabis indica
aagattaacctgatgcagaagctcacaacttctttcggccaagtcttccgtactgcctcaaatagcaagatcctagtcgctggatccaagcgtcaatacgttgcgccaagggttgttagtatgctgtgagctcaattgtgacccctcaattccaacttccgggggtagagggcaagaaggctcgaggagaaccacctctggacgagaatctgagaacttcacttggtgcaccgacccagtggtttgtttctcgacattccctgtagcggagacctcaatccctgcagcagagacctcaatccctgcagtagagacctcattccctacctcgggacacttagcagcctcgatagtaagctggctcgaggattttctcttgttggccttggcattggtccttttgggttccttgatggaatccgaggcctcatcagcttggactaccctcttcttggatctcttgtcggctgggggaggacttttgaacagattctccaagtccacgtaaatatttacgaagcaagaggaactcattaacactaagttaaaatttataagaatgtggaagaactcccacttaggagggttaccatattcttcagaggatggcgaggaaggattataatattcactaaactccctagatcatgtgatcttaaatatgtcataagggtttagtagatctaagtcccagcttgaatctatgtgactcgctctatccaacatggttccatactgttcgacaatcccatagaaagagctgctacagccaatttgaacatgaaattgtgggtaccaactatcaaacctatgagagatgcgatctatgaggagagggttccgaaatgaaaaaattataccgactatctcgaaggagactaaggtattacgttcggtcctaagcactgtgggcgaccgacc

SEQ ID NO: 387638 - DNA, 664 bp, Cannabis indica
aatttttattttttagttttaaagaaagaaaacagcatatttgattcaactttcaaccttataaaacagtaatttatatcctttaaaattataattacacataaataaaatttaattatatgtttatcctattataaaatgactaaaataaatatttttaattttttgcttttatttattaataaaatcaccccacaacttcttaaaaaaataatctttttattctctcaaaaaaataaattattggttaaaaagtttaaatttctaaaatcatccattaatatggaacaaatttttgaaattttatgaatggaagaatgaatataaaagtatattcattcttaatataacttaatataaccctaattaattcaagagaatactgtaaaacttaatataaccctaattaattcaagagaatcaaataataaaattaaggaatagcggaagcgtaccggagtccatagaatcgatctttgattggtatgatcttccaattttgcatcaaaaccttttaaaccttattttcttgatgatggggattcaagaactctggaaaaatactgatacgatgcaaaatggggaccattacccgttatattaccaacagacaaacctgttggcaatatttttgactatttctatttggcccctcatcaatata

SEQ ID NO: 387639 - DNA, 910 bp, Cannabis indica
tgttaccaaacgccaccttagtcttgagaaccacattagaagacgtgatcgatcccccaatttcttaccctgttatgtatcgcagagcttgtcgtcatcttacccaagaattaatgttctttctggggtgtccacgagcagccacaaccccaattctcagattggagtcgtgcgaaccctagcatagcaaaaagaatattaggtctatttaattatattttcaaattttaaatattaaaaactaattatttcttaaatttatttatttaataaaaaattcaatggggacaaaacttcttccattaaagataaataaaagtaaatcatttaattatttgaatgttaatattggaggtttttcaaaaatgtgtaacaacatatttgaaattattgcccccaaaataacaatccaaaaagtacgtacgaagcaaaccacccttgcatgtgtcatgcatcgcaccatgcacctacgtacgtaagaatattaatatttaacaaatacataaacctttgtatacatacaaaacacataataatatacaaattttacttattaatgataattattaccttttctcaaaaaaataaaaatattattaccaactctattatttttatatctatcccaaaaaattaaattctacaagtataacacatataaaaaagggatattggcggctaaaccacctaaactttacggtttgtaacacttaaccaccaaaactgaatttttggcggctaaactacctaaactctggttccgttttgctctgcacacctccgtccaaaaatcagcgttaagtgccacggtggactgtccacgtgtacacacttgtacacgtggcaaatttttagtggtccacctaatattaattttaaaaaataattataaatattaaaaaattaaaaa

SEQ ID NO: 387640 - DNA, 563 bp, Cannabis indica
aaaaaaaaaaaaaaacgaattatatgatcatgaatattgtttaggcttttaaaaattatttttggactactgaagctctaaaattacatctttatttattggttgggtaattaataaatttcggtttttagctctaaaaaattcttttaacaataactagttttagtagcttgcttagagaacttaccaagaagctcaatcaaacagatcatgtatcattttgtcaaattaattttgattacacatttttaatatttacgggattaaataagttgactcatactttgttataaaaagtctacgagatgatttcaatagcttattttacaatgaagaaaaattattgttcactaaattgataagggctattcatttgataaagtaattagagttaaaaaacgaaagtagtaatattgttgggccccaagttcaccggagctcttatgttgtaacgtcctcgcttcaagcctccattgggcccttacacccatagaataatagctcttatacacgagttcgtcactctggctgcttgctggattgatgactgaccctacagacca

SEQ ID NO: 387641 - DNA, 1215 bp, Cannabis indica
catcaaatcggtcaaacagcccgacaccgtaaaaaaatcagtttgaaattctttgtgatgcgatcgcggtttgaatttttcttaaaccgcgtggttcggtgtagtttgcaattttgaattattaatatgcggttcaaactgcactgcaccgcacattataaaaatactaattttatgtttatttaatttcaatatgtgaatgtccaatccaaaacccactaattattgtattattaaaacttaaaatattttttcatatttgttttcaagtcttatggtatttttgacaagtattgctcaagttttgttgtatttgtgatagcttatttattggtgatagtacaaactgtagaaattgcaaaaactgcactgcaccatattttgcggtgtagtttatgcgtttttttagtttcacgatgcgagtgcggtttggaaaaatagaaaaattgcatatgcgggttggtttgaaaaaacagtcaaaaactgcaccacccgcatcgcgaacactcctaataaatgctatacaagattagtgggtagactacgtgaaagtagaggtggtacgtcaagaaaacttatgagtatatctcaattcatgtgtatacttttcattaaataattttttttttgatcaatcagtgaatttcaaaactccaaaaaatatacgattacaacctattaataccttcatccgaaggccttatattttagtctatacaatttgcttgcttttctatacctacttttgtattacaatcataatagctttttgtattacaaccaatgagtaccaaaaaacagaacaaaacttatcaaatcaaaccaaaacgcagtaccagtttcctggtttaatcagcttctggtttacagttttgaaaaccagtccctgtcaatcggcttgggtttgcttggcaagcaacacattattctattcttcacatcctccttaatcgtcctcacaacctgctcagtagacatagcctctgaattccacaaaattccattctgaacctgccatatctgatacactacagcagcaacagcaggtgttataacaactttccgaaatgagttaattttttctctttctatccacctaagcaacctgttcagatttgtagtttcagctctccagttcagccattctttaactttagataagaaattatgagagaaagaacataggaagtgttggatattattttaccaggatct

SEQ ID NO: 387642 - DNA, 865 bp, Cannabis indica
tggtaaaataaactccaacagtatgtaggctacagtccagtgaagaatcatttgtgggttgtatctttctgtcggtataatttttcattcctgtagtgccacaatttccataacaaacaaagaaggaactggaagtctctagtagagaaaatgttagatacaagatgtaatgtatcaacaatagaaagtatgttatatttaataatatattccaagaagggagttagtttccatatcttttggacatttaaacaaccaaaaagagcatgtggtagggtctcctctgcacactaacagcgttggcaggctggattgtgaatgattcgacgatgttgaagcttagatttagtgggaagcacatcatgataaaccctccaaaaaaagtgtttggtcttggaggtaataggtaaaacccaaaaagatttccaccaattatattgagtagatgaatctgaggggaaggttcttgctgggtatcaagggcataagcatggtgataacctgagttgatcatgtaattgtcatgaggcgtaaagggccagtagactgaatctggtgtgtgggttttggggagtgggatggaaagaatggcatggaaaatgtcattggggaaaaggttgtgaagctgggtaacatcctaggtgcaactagcagtgattaaagttgatactggttcgatgtgtggacgctgaggtaggcaagcttaccataccccggtacccaagtatcatcatatattgagatatttgcactgttacaaaccttctatttaagcccagacaacagaagttctataacgccctaaactatagggacaccatatgtgtgattttataaactagtttaatactaatagattaattaa

SEQ ID NO: 387643 - DNA, 634 bp, Cannabis indica
gtttttttaaaaagagaatgcatatattatggtagctttaaggtaattaaaatagttaattaaaaccaatatggtacaaattaaaatatggataaaaaagcttacatacattgttttcttctggagttttcattcgtttttaatacaagtataaatattgtggacattattattgagtttatattggtggcctactttgcttttgacttatatatgtaaaagaaaacaatacaggaaaattgaaagagactagttgattaaagatccaaattcaaaagtaaaatttttggcgaattaatgagtgaaataatctcatttagtgattcacactttttctttcaaaaaagagattccaagttcaaatacattactctcctaatgtcaaaaaaagagagtaaattttagtggtatataattattagagtctgtcaaatttgtgtgactttgtaatgtgccatctcagaaatcaagaacaaactaatttgacagttagtttgttatacatgagtagcagttagaagttaagagtttctatttttgggtataagcctataaatacccttagctgtgtaattagaacaatttaatctcttacttgtaaattcagattggacacagagcaataaagctattt

SEQ ID NO: 387644 - DNA, 611 bp, Cannabis indica
aggtcgtcgtcgatccctcccttcggttgtcgtcggccgtggcgtgggttgtggctagtggacgctgctggagaaaggtggctggtggtggcggatcgttcgtgaggtgaggtctggtctggagtggtgtgtggttgtgtgtcgtgtgggtgtggagtcgtggactgcggaggctgaatttagggctgctttaaaatgtaaatgatttacaaatttagggttttttatttttttaattaatactttaaaatatacatatataaaaactgtaatataaaaaattaaaaaatatatatataataaatttatatactgggttggcgggcgggttctcgggttcaacccgaaacccggtaccttaaaaatctcaacccgcgaacccgcctgaagggtaccgggttgaacccgacccacccggaacttttttaaaaaaaaaaattgcgggatcaccgattcgagttcgagtgggttgctcaggttcgggtcgaacccgctcataatgtttagtcctagtataaagtggtccaaacttagcacatgctaaaaattatgtcaaatttgacacaaaatatagaatgggtcaatttttttttttatgaaagcatggtcca

SEQ ID NO: 387645 - DNA, 1631 bp, Cannabis indica
aacgacctactgtgttttggggaatttctcaaaagtcttgttttttatgttttctcgatattagggtattgtcacactatttttatcgataaaacaacttttagttttgaatttaagtccccgaaagtgatatagcaagtcacttaccagttttgcattaaatgtgacttagggccttaaaaatttttgagcagtagttttcactcaagtttaccgatatacttgcattcggaatcaaggtaagattagtataaatagatgcatatgtgtaagtgcagcatattctataactcttatagacgttgtatctcattcgactgttcaggctaagtcatatgaacgagacctttacataatgcagttccaaatctcggagatcaccacatcatcattagacaaatatatagaattttattctagtatatttagtttattcattattttatttccttcaggttcatttttgtttgattaatcatttaatattctcaatattaagtatatttttattcaaaactgtattttgaacttgattaatctagaactttccatcagtcacatctatttgattctatggattaagataattaatgaactcaatagatcccatgaataatcaagtcagatgtttagaatgaaccatttcatttcacatattttcttgttttaaattactgatacagttaagtgattcttttatttgagattacatatgtaattaataaaattatttatttcttgtttatattatttttaaattaattatctctcttaatcttaaactctaataagtcgttacaaatagatgcacctcttgaatgatcttttaaatatactctcaacatactcaatactcccactcaattagacacttcctcttttattattgtctttgatcatttaattgagattgtttttaatttatgatttgaaattattacttgtttaatctcattgtacaagtattcctaaatttcaataattagacaattatgatattcaaaaggtgtatctcatactttgaatatatttttaaattgtttatctaatactttaataacatccctaattttcatattgttttataaaatccatatttagtaatacgatttattagtaattatacatcatagatattaatcatttaattttcttaagaatatttgatatctagtaattactactttattatattgtttgaatttaatcacatcaaaattcaaatctaaatataatttaagtgtccatttcttaaagtcaatgactaagtcatctttttcttaatagatatttttttcgaactcctcatataccataatcaattttaataaggttaaagtttatcatttattgaaattctatattcaatatcatattaatgtattgaataattattgaggctattaatgtgattattgaatagtcatatttcgactccaaggttcgaaattaaaaagtgttaactttcacattaattttttttttctcattaagctttaatgtttcatatgtcaaaataatcactaatttaaattagtttgacactcgaaccttttggtatatatagtagaacctctatctaagaatactctattcaagaataatctctaatttgttataaaaaaatcaag

SEQ ID NO: 387646 - DNA, 1241 bp, Cannabis indica
aaattacaaaactgcccatttttgtcgttagaaaggcttcgtcgcgatgaagcctattccccgtcgcgacggccaccctcaacttgaataactttctgccaagtcctatcacggcaaagcttattccccgtcgcggcgaaggatattgcccgtcgcgatgagctttggtagaaaagaactttgtatattttttaccttaactttttcatttcttgtcctctattcttgtgaatacttcctttaaacatccggggacctgaaacaaaataatcatgtgtaaaatagccctaaaaatagaagcaaagatcaaaaactacccgaaaacacgactcgaaacttagactaaaattagcctaacaatagtccgggtttggggcatgtaattatagtgtgttgggctttgttgtttgctcgtaacgagtgtatctaaaagcaaagattgcgttctgtggaggatgtggttgcatttgctaatttaagtcttgatcaatggttcagagctcaacgaaggggaactattcctctattacaaccgtctgttgtaggtgatagtttggagctgtagactaaactgattttaggcatcaagcttaatgttgacgcaaccttgttcaacagtgaaggcaagtttggtttcaggtgtgtggttcgtgatacaacaggggtgttagtccattctttacctggttgttttgcagaaaagttgaatcctaaactgggggaggctattggtattcgggaggtgctaaacatgctcaaaacttctcttctggtgtagttgaaacatacaacctggtggttgtggaagctatgtaattcaatggtgatgggttcagcatttagcttagtaattgaagattgtaaggagagtttgagggatttgtcaaatactctttgtattttgttaaacgatctgctaattaaaccgcacaatatgttacacaaaattcttggtaccgtgtattttctattaattgtgtaccttttggttgtcaattctcgtgagcaatttgctctaattaatgaagatacactttttttttgtgacatatatttgaatcaaattataggaccaaagttttgtagtgtactttttcacaatcattaccaaaccataattcatatacaatcatatatgattgaattagtgccggtaataatggagtttgtgtaattaaagcatatatcattttgcatagctatccaatgttaggttatttttagtattaattttagattaa

SEQ ID NO: 387647 - DNA, 3378 bp, Cannabis indica
gcccactaaaaaccccgagaaagtacttgatttcactacttggtcaatcatccttccaagtacatctaccactagcgtaaagagaaaaggtgaaagtgagtcaccttgtctaaggccccgagatcctatgaattttcccattgttcctccattcacgaaaatagagaatgatgttgacgaaatacatcctctaatccatttcctctaagtttccccaaacccctttattgtcataaccaggtctaagaaaatcccattctactcaatcatatgctttctcaaaatcaatcttgaataccaacccactcttagcgcgacaacgataatcttctacttcctcattagccactagaacagaatccaaaatttgcctcccttctacgaaagtcgattgtgttgctgaaatcgtttctcccaatacacctcaaagccttgcggcaagaactttagctatgatcttgtacacacttgttgtgagactaataggcctgaaatcttttaccatacaactattaagttttttaggtataagacagatgaaagtctcattaatgctcccctcaattctgccctctatttcaaaagccttaaaaacttccaaaaggtcatcctaaatgagttcccaatttaactgaaaaaatgccaaactaaatccatccgaaccaggtgctttgttaccttcacagctgaaaatggcttcttttatttcatcttcttcgaaaggtctctctagatctgtagttaaaaattctagaactggttgccactcaatgccttcaatttcccaccccggtctcctctcggatgtttataatttagaaaagaaataaattaattcagcaactatttcttcctccttgccaagtgtagagccatcagttctttcaattcttgagatagtgtttcttgccttccttgcatttaataaataatggaacattcttgtgtttgcatccccttcttttgcccatttacatttcgacttcaggtatacactcctttcttcttcagatgtataccgctgccactcccttttaagatttctcctttcatctgcaagagattgatcccacaaattgctcccttctattctctccagtgacaatactcttctttctaaagcattcttggcaaccttattgttcccataaaccgatttgctccattccttattattcttttgcacttatttcaacttgcacataagtttagtgcctggccacccgattgcacttgcatttttccaccgaccttcaaggagcttagagaatgaattgtgttccaaccatagatcgaagtgcaacgggccaggcccccatttgggaggattagagtcaataataattgggttgtggttggagcacgaatggaaataatccattccatttgctagtaaagaggaatctatccaacctactgcaaataggaattgctctaaaattagaccgcgtgaaccttccattatttagattaggatcaatcaatctcatttcccgaatcaactcatcaaatatcttcatactcttagtacatgaactgctattcaacttctcccccaatcttcgcaccacattgaaatccccccctccccccaaacaccatgaatctccacagattgaatagagcccagccaactcatcccaaaagtcgggccttaatttataggaacaaggtccatataatctcgaaaaccaccatggatctatacctttagcttgaatcaaaattgaaatagaaaaattaccaatcaatgagtccaataccttgatactcctagtgtcccatattaacaatgtgcctccagatcttccaatggctagacttataatccacgccttaaaccgtgatctccaaatactgccaatgaaacttctatcaacagcttccttcatcaccccttgtaaaattaccaaatctggattggccttacatattgccgctttaattacacttcttttatccttgtccccactacctctaatattccacaagaggatctccattaaactttcttcaccaaccctgattttttgaggcttttctcataatttatattgaaagttagattactcaattctctgcttttctttctcgttgacttcctttctccttcaatcggaatgttttcatcattgttttcaaggatctccattcccatctccgccatagattggacaatgttagaccacgaatgaccctcaaaagaagtttgtcttacgttctatccgttcccgagcggctcagtaagtgtctgaatgtcatgttcgttctgtttccacaattctttaatatcacaaataatatcttctcgctcttcattattgttagattcagaagcctccccatccccctccaaatattcactgtctgaactaagacccaacatttcatcttcaattggaactacatcagcctcctccccctcaaaatagagttcttcaactgttgacgccactatttcacttcttgtgtggccaattgaatttctttttttgatataaaccttcgtaaaatgtataaacccctgttcttcttcttgttcttcctctactgtcttatttagaatagaagaccactgttttcttttttaattcaaagtcttcccaaaacatcataattgcagatctaaaatcgactcaagactttggtgtaatcgatcttaatctcccttcaaaaaaatcattaatgatctactccggttttttcttgacacgtatggcgagatcttcgtttccttttttaacccacgaactccatctctgaggcttgagattgagtgttgtcttaaattctggactcatcacaatctttttatgggccaaaaaaatactaaatggcccattattgtaataaatcagtggcctcctctccctaatatgttttgaaaggcggaaatgggttttgaggcgttttgccattgtaccgcgaggcataagcctcgaggcgctccgaggcgtaagcctcgacaataagaataaaaaattcataaacatgatatatatcataaattcataacagaaaacacataatttcataatagctataagtctaaaaatataactaaaggcataaagggttcaaaattaaaatcctaattaatagacatgataaatttgaaatctaaagcttcaaacataaagattaaaagacatattccaagttctaagggggagagaagagccttgtgttggtgttgctgctgcatgcatgaagagaagggagagaggtggagagtattgtgcaaggcaagttatggagaatgagggaaagtgatgaatgtttaggattttttatttagttttgggctttcaaaatttacaaaataaaactcaaaatagcccaagaaaagtttaaaaaaagctcacttaaactctttta

SEQ ID NO: 387648 - DNA, 752 bp, Cannabis indica
tgaaaaaatgactaatgttgtgacggttttggttgttttgtcgagggaatatattctcatagaaaacaacatctcgtgagtgaaatatttgttttctttgaagattaagcaaagtgtatgctttcatgtgttcggggtaatttatgaaaatacttgctcttgcacgaggggcaagtttgtgggagatattgatgtgtgaaccataggtaagacatccatagtttctgagatggtcatagttaggtgtcttatgctgtggaggcatcgatcacaaaatcttgatcttgatctgtgatggtggccgaagaagtagcacgagttctcaccatcttgaattttgtttgaatcttcgggttgaagcttgaagatgaaggttgttattcatctgataccatattataacagagtatagaaaagaaagagatctgttttattgattgtgaaattgtatcttggttacaaagagtacatgcctttacataggaaagggtacacagaagttataacaaacacaattggcttaaactaacataaccgactataactaacataactgacagaagggtagaataggaaatcctaatataaggcacactagtactgtgagtcggatttataaaaatacatcaaaataaatttgacactttccatcaatcctaatttctatacgatatgttaaggaccatcatattactatatacttaaccaattaaaagtttacattaaatgactcatagatggttttttttaat

SEQ ID NO: 387649 - DNA, 1273 bp, Cannabis indica
gtatttctctactcagacaatatcgataacaaagtggtcacaacttatttgtacaaacatgatggtcccatcaaagttcacaccttggactttgatgattcacatgccgcattctatttttcaaaaatgttgtaagaagatgttgaaatcctagtatcaattgaggggtgcagatatgttgaggaagtagcatgttcctaccttggcctaaatacttaagtttaacatccgaggtaaaatttatttcttagaaattatcattacaaatcatatatataaattttgatatattatggtattttgtatagggcccacttgcttaaccacttcaacacgtgctatgtcgaaaggaaaaggtctcatgccttgttaaaaaacgacagtaatcaagttgatctataattcactccagagattatggtgcaaatcccaaggcaatcagatggatggttggagagttttttagattaaaggagaaaaaagctataatcccaattccggtacctcgtggattcatagcgtctcgtacctagatcataaaatttggagaagatttgcagttggtggtattgtgtgatttcatcaaaaaccaaggaatagtactttttgaaatgatatatactccctttaacctaattcacttgatatattaatttctactaaaattattataaaactttaatacttaataatttaatacatgaacatttgggaggggttatatgatttgagacgaatattcaaggtttacgacccaaagcttctcacagtgcacagtataaccgatatagagaaggaacaatcctttgatgttgtgtcacaaaaattggctcgttggttatcattgataaaaagtcaacatcaaatgttctttattcccttattccccgacatatcaggtaaatactacttaagagataatttaaaattattttatttattataacttaaaattattttgacaatatcttatatacatatatgtatttttttagtgtccattaaatgctaaaggtcatttcaccagagaaaattatccatttagacactatagatggctacaaaattctccaataaatttatgcaatgttaaaaagataataatttgattactctttatataacaaatcttttaattatgggtattacccatgaatgggtaaaattagaaaattttgagtttttatacttaatttttctatctaattaaacaaagctcttatttttgtatcatatgggctgagattgttccatcggtaaaaaaaaattaaaa

SEQ ID NO: 387650 - DNA, 2173 bp, Cannabis indica
cctctataaactcttgtgtttgttttcttatctttctttcactacttatgtttgatcatgtgtgtgtatgtgtttgtggtaattttctggggaaggctgggtaaaatcgatctggttcagatcgagaagtagatctggtttttagggtttgtgaaccagggagagagagagagagtttgattcaaactctcgaaggttcgtttggcaagttctgagctagggttaactcacttgccttggttttgttccagggaaaacgacagatcattttgacttaaacgatttgtcgtgcagggataaacgacagggttcttagtcgtttagttaaatccgtgtattgatttttcaaggacaattttgtccctgtcgttttaatctactcttgagttggtgtaggggcattctttgaaaatcaagaaaattcctacagctggtttatcactctacaaaatgacctgctctttctctctctaaggctagaccaaagcacttcaaaatggacaggttgattcttggtctatcctgggtttatatacttgtttgatgttgaaattaaacaggccttgcccctgtgttgttttttctgttatgaacttgttttgtgttaagagagttggttgtaaaatagttataaactgttagttgcttttggtttgagttgtgacaagttgttggagtgttgaaatgttattatttaagttctgtgttgtaaaaagtttttgttgagagtagtgattcttgccaatgacacagtattctcttattaaacttttaggcttgtgtgaaccttgctttttatattccttgtaacttattgaaattattttcttatgagacagtttgtacggagatttacttaatatgagctattagaaaggctcctaagcgttcaaaatgcatgcaatagtatgctgaaaaatagtaactagtaagattttcaaccatttataaatgaatacatcaagttcccaaactatattttcaatagctatcattcatttacttttataaacaattagtagcatcttttgttagaatttggaatgaaagtggctaaggtgcatgggttctatctcaaaactaattggcaatgagaggagtagcacattcatactatacatgataatttattttcatacattagcaatgtgagactttttctaatacactatcctcacgtttgggtctgaaaagtgtgggtataacgatgacctttaagagacgacaaggtcaaaatgtgacatttgaaagaatcctgcaaggccaaatcgcaaaatttgtgggtgtacatgtcgtgaaatttgtagattttgaaataggtcaaagaccccaacactggatctggcacacattgactgaaatgtcccaaatggaggttaaaggggacacaatgaaagtttttagggttggctcattttttggaacggcagcactttgggctagctcacaacggattgactctgataccatgttagaatttagaatgaaagtggttaagctgtgcatgagattttatgatctcaaaactaattagtaatgataggagtagcacatttatcttatatatgataatttatttttacacattagcaatgtgagattttttctaatatcttttactaatttaaaagtgataatgtaaagaagagagagttacacaatgtattatcattatttcttaagaatttgtaattccttttttatgatcattatcaacacatttgtaactctataatacatgttacaatttgataaattaataatttatcataattaattatttaatttaaatattatattatataaataatataacatattatacacgagctaaaggagcatccttttgtagatattctttaaaaatttgaagaatgatgtattatcatctattgggattgctctaaattaattggtgatacataaccgactatagcaatttattatacatattttgtttctaaattaatctagtttatatgctttacaaatttttagaaatgctagtattatcatagtcatctctctatatatattttgaataattagtaattttattctgtgaactttcgacaatattgattttactcttaagatatacgacttgttaagaattttcttgaactcttacatttacagaaatttagtcattctattaggttccgtcccatta

SEQ ID NO: 387651 - DNA, 1477 bp, Cannabis indica
attcataatctcacacatgtttttttttttcaatttataatgtttgattcataataaattctttctataaaaaaaaacgattttcatatattctgcaaagtaaaaaaaaaatcacacacatatatatagttatgaatatatatataaataattgaataattatttaatttaatattattaatttagtttatatttattattatgtgttttttaaaaaaataattaatttaagatagatatttttatagaaaatttattaaaataataatattaatttgtaaatttatgctctaataaaaaattaaaagaattgagagagttaagaaaaaaaaaaaaaaactttaagagagattttagactaccacgtcaccgatgcattgtctgatctcatcccacgtagcaatcaactcggtgaagtaagtaccaactgaattatctccttgtcaaaggtaaataatcgattcattcaattcaaagatccaagaagggccatttccctgattgaatcgattgttaaagactgcccaaatctcaacaattgtatcaagacacgtgatactactcttgatctcagtgaaaacaaaatgtaagatctaggacattaccattttcttacagcgaatccaagaacttaaaagtggtaaagtagaaggcggttgcgaaagagtacctttgaggaatggtgttttgtttcttgcaccaatggaaagcttaaaattgcatttttatggttggaagtcttgatcgatgaggaccagaattgttagagcaagccctggatgatcttcatgcttaagaagtagggactatacacattttcatatgctcgtcgattattcgaagcagggtgattcgaagctcggtgagaagttacccgtgtaataccagctgaggtttgtaatggtggtggagcaactagatacgtggcatcgaccactggatcaaggccagtggtagtagctaaaaaggttgcatgagttctcaccattgttgattgtttgagttctttgaagcttcttgacttttcttgaaaaatcacatgttaacttctgataccattagcggaagaaaactagagcttagctctataattttattaatatgaaatatgtacatattacaaagatagaaatgctttaacaaaggcagtggaatgagaagagctgagttagttagaaactaacttacaagttgtaataacataattgtaacagaagatataactacctatcctaatagaaatcctagccattcaagaagggatcaatgtaatacccggtaaaaatatacatatattttaaattttatttgttatacaatttgtgtgagaataagtatttatttatttctactaatagtgaatagagactattgcttaaaatagtattgatagatttctaaacatagttgaaattatagtaagtgtcaaggtaaaattatggtgtttttacgaattaggataattactcaattaaag

SEQ ID NO: 387652 - DNA, 1815 bp, Cannabis indica
ataacttgcttatgcttgctcttgttcatcgcttcgaaaatataatctgtatgttatatgaggaatatgtactcgaggcatgcaaccaaaggttgtggaattttctgaggatcttatatcaaacaatcaagtgcctctgcaactgcgtgttgcaaaatacaaatactaagtcaaataggatagttattttatttggaataaaatagtttgcatgctatttctcgccaattagataaatgttaacgtcgatttttgttaactgtatttgagcctaaacaatgatagatttgtatagaaaataaaagcgaaaaaagtaaggtatgagcacaaaggtttttacgtggttttgtagttaaaattctgcatagtccacgagtcaatcttattagatttctgatacacctctcaagtccttttttctctaatgttttttcatccctttttttagcatatcccgcctttatttataagtgcatagtagtgcaattaattacttagttgactgatattttacaataattatctcctgaagctatgggatttgattctacaccacgtaaaataaatgtggttaatatatttgaaaatcacacagctctaataagtccacttttaccgggtcaatgtaaacatgcactaaatgcgttgtaatcgtatcgttcttagacacctcgttaggaacgtagcaacaatagcctttatagcgagctagaacttttctcatgcctttccgaggttggtaatataggcctcatcgctgctgctcttgaagacataatgatcaatctaaaggtcgcaattttttggcgataaggtgaacttcagcagtcaacatcatttgtacgtcagtccctatctgaaagggttgtctcgccggagctatgaaccccattgaaagatgtctggagatgattagtgaaggtattatgagcacgcctacctgtagcgagatgaatgccttgctattagttgtttgggtttatccgtatattataagtcgagtgtctttagcaaccatcatgtctcgcttatgtcttgccttcttctctttctacacatcgaggttgacgcctcgctttgcacatctgatgttgtatggtttctcatcaatgcatgagttaacagtttgtatatatttatctcgcgtaagaccttttagtcagtaagttgtaaatattctctgttgattctacatttaacgatttcttccatctttaaatataattacatttgttggttcgtattctttccaattcgacacgtgtcctcctccgatgtgctagccgaattttgggtataacaataaactatatgaaatgtgaggaatgtccacgtttcataacttttgtaaagattggatcaataataattgctatcttacttctataaatagcagtgatcacattatgaaagggaaactaattttctaacctagaagaaatatctgccaaattgtatatgttatcaaaggacatcagaaataaagtggactcatagagtgtgtagattttgttagggtttatgccctaaaaaacaaatatttaatggataatatattatagaatatatgaaatacaataatgagataaaatgaatacgttaatgatagaagtataattaataaatatctgaaagaccatattcatatagagaatgtatgatcttgtaaggtagtaaaagggaattaagatcatataatatcaataaaataagtcggtaatttattaaagtatggaatctttaaaatagaattaccaaggatgatttactatgtactatactatagtgtgtgtgattttaattcgaatcacatat

SEQ ID NO: 387653 - DNA, 1321 bp, Cannabis indica
ttttgatgctctgagatggaatttctggcaaaagtcaatcatttacaatgaaaccatcaataaaacaaccaaaacaaagtaaagtaaattttagaaatgggagattaaggttgtgtgtcaataatacctggcaactggaagtgtagctggagtgagggcacctttttcacagggaacccaaaagaaaataaccagtattcctggaggtcatggatacgattggtgcagctaattgggcaataagagttaggatgcttgtccaacctaaagaatctcagcttctttttttccctcatagggttagcctttacactataaaagtaaaggatctactctggggaaggtagcaccaacttgttcattttgcaaaagatataccacccagctaagagcctgtacaacgaggggattaactggaaaagggcctatcccaatcttggccagcagattcacaaaataggtccttaattccattagagatttgggaccagctccaagtgctgaatccctccacacttatggacgcagactctcccacggcaggcaacctgtgccacatcagtcctggaatattttgaagactggaatcattagtgtatgttattagcatttataagaacataagtaattggccttctgttccatctcctagatggagtcattgaaagcttgtccagcagggggagtcctagccctcctttctcctttagctttcacgacatgtgcttcctccacgatgggtttttcctctgggacaatctcaagaatcaaccgttgctggggcactgaagaaggaaccattaggtaaatcattcaagacactctgaacagatcgtggtggagattatttggatttcaaattcaaagactatttactggaagaagggatcttatcccaacttatagcacctagaacaactcagcagaatagtgttgcagagagaagaaactaaaccttgttaaacatggtcaaattgatgatgttttagtcatcaatagcactaaacttcttgggatacgccttctagcagctacctatattttgaatgtagtatctgttagaactagttttaccaaaatctaaatttactaacatgtatgttgattatagaactataatctaacatcctaaatatgagttccctaaaataatgaattaaagacatataaagttatagaaaaccttacattgagtttagtagaacaatatgactccttccatctagatttctaacccttgatcctttctattgcagagtatgatcaagatctgaacttggatctccttcagttgacagtttttctacacaatcttcctcac

SEQ ID NO: 387654 - DNA, 634 bp, Cannabis indica
ctaatttatgatgagtaacaatgacaaggttcaatgcaaataagggtaacttgaagcttttcacgagccaaatgatacttagggctctgatagctcaagaatgaacaatcaactcaactaattaactaacacacgtttatccaactgtcattaagtaacctcttctactaatttccccgcaaactaataacatataatcatgtgatagaacaaaataaaatgtttagcaggtgttcaaattttttattatacaaattaacttaatatgtgatataattaattataatttacattatcattcattcttaacaaaatttgattataataattttttcacgtttgtaacaaaagtatgatgccgttgatatggattctcatataaatatacaaaagaatatttcaatttttcattttttgattttgaaaactgatttatatgactaaaattagtcaaataaaattttgttctctaaattattaatacgaaaaagttaattaataaagtgtaattggtaaatatatacctaataatttaatattaacattgaattttgtgcagcataataatatataagatcattgttatggtattattggtgcacaatatgataccttaagattggttagtgatatt

SEQ ID NO: 387655 - DNA, 2314 bp, Cannabis indica
agccaagagcaagctatgggtcaacttcttcatgagcgggaaccaacatttaagtgtcgatcaatatcttgctggtgcgtatacaaggtgttgtacgccatcttctcttgtgcgagcagcactcacaacatgttttgtgactgttaggtgcatgcctagctcttctttgtctagggattcgggcaacacacgtggtcaagcccaatctatttcttcaactcctggaatgtgatttcacattcctttttccactcaaatttgttgcttttgagaatgttaaagaaggggtatgcatttgtctgtagacttggacacaaatctgcttagtgcagtagtgcatcttgtttggctttgtacttccttgattgttgtgggcgacttcatgttcaaaagggcttggatcttgtttgggtttgagcttcttcatgttgtagttgcggaggacattaaaattttctatctaggctattgaaatctcatcagcttaaagaggagaacttgaaggtatctaaccaaaaatgaacctccaagtacatccctaaaagtcaacgagtggggaaaaagctttgacactgattgaagattcaatgacaacccttatgacaaacttcactttatcgctaaggaaaattgaccagtcactacccaagggtaaaatgcaaattctaattactttaggtgaaaataacaagaaaaaataaaaggattgttactcttaataaagaaatcttcaacttctataactccaaaaaccttcaaaatggaaaagaaaaagttcaatggcaagaagcaaaaaggagtcacaatccatcaaaataatgattgtttaaaagcttcttttgaactagatgagttaacagaggaggaacaaaaaatgtttttcaatgacgatgtacctacatttcccctacaagtgttggtgtttgacagacttgaagcaagcacatccaccccacgagtgtcaacattcgaaaggcttattttcccaagtgctctacagccaacgagaactagtaatcaaaagcagtgggtgccaaaatagaaaaaatcccttaagaattactatgcttccagggtgtgaaacacaagaagatgaagaaaatttttctcaggtcaactacctctcttttgagaaagtttgaccgtagaagatgaaggctcaagctcaaacccttcaaaagatttcatagacattgtccaactggcacatcaagaattcaaagatggaggacaagaaacaatggattattcaatagagatcaaccttaggaccaaggatgatccaaagcctatgcttgttagtgctttatgaactgaagaagtcctttataaaaatgaagatgtattttcttgggggtattgagacatgccagggtttgatccaaaggtttctgtgcacagattggtagtatcaaaagatgctgcccctattaaataatctcaaagaagaatttgaccagagttacttcccaaagtcaaggcagaaattgacaagttaagaaatttcttgtttgtttgggaagtcaagtatcctatttggctcacaaacctcatcattgtgatgaagaaaattggcaactttgtatatttgtggattaccacgaccttaatcaggcttgtccaaaagatgaattcccattccccatcaccgaattattggtagatgctaccacgggttttgatgccttatcattcatggatgagttttctatgtacaactaaatcaagatggcacctgaagacaaagagctcactatttttcaaacaccaaaaggcgtttttgttatatagttatgccatttggcctcaagaatgtagggacaatctacaaaagagcaatggccacaatttctaaagacatgatgcacaatactattgaatgttatgtcgacatgttggtggtcaaaacaaaagaaaggacaaatcatcttgataatttaaaacgagtctttgataggctcaggcaacacaatctcaagatgaatcctttaaaatgtgcatttggggtaacatcaggaaagctccttgggtttatcatcaaacatcaaggaattgaaatcgaccctacaaaaatcaaagtaattttggaaatacctcacccatgtaacttaagtcaactacgtggactacaaggaagacttgcatatatccgaaggttcatctcagatctgtccagtaagtagatgtcaacctttttcgagattgatgcaaaaaaatgtcccattcatttaggatgaggcatgccaaaatgcttttgaaagtattaagaagtacttattacacccaccagtgttgagagctccaatcttaggaa

SEQ ID NO: 387656 - DNA, 1025 bp, Cannabis indica
taaaactctcccaatattgaagataatattttaaaatatacaaatgtattgttgactattggaaactttttcattgggacaaaacaatacaagtcaaacttgattatgacaaactttggagtaaaataacataggagataaaacctaatttgatgattgttctatatttgactgtaataaaaactaaaatgtacatgcatgaagttggattctatagtagaaaattttgtgaccataaaaaggagagagttcaatctcaaattgttatttgatattattagaaagattttaattccaacaataataaaatattagttggcgtgcttaagaaaaaagtactcttagatatatttactagttgtttaaatgattattaaaacaacaaaagccatttgaatctaatcttaatggatgaaaacacaagtttagaattttgtgttaaatattattagtcagaattagatggctttgattacctatttctcattgaacaattaattaacttctattgacttacaagtcgattgagtaactaatacttaagtgaaataattgtattttaattaagaggtcataactaaagacagtaattggtgttcgtgctaaatgggttagtagtctaattagtgaactctggcctaaagtagaggtattgtgtagaaaaaaaaaatcaaattgaaaaaattcaaccctatttgttttgtatataattagtatactattatttttcttttttcattcttgagtgtatcaattgtttagttcatttgaataatacattaaataaaaatatgtaaaatttcaaatagataatgaattaaataatttatcataaaaaataagtacaataaacaaaattctaaatatcaagtctaaataaatgctaataactcaacaacaaaaaaatatccgtacaataaacaagtaaatctcaaacaattatctttatttaaatattacctgttaggttttttatttaggtttacattaacttttattgattttattaaaacttgggttgattg

SEQ ID NO: 387657 - DNA, 530 bp, Cannabis indica
gtttgaggtttgatgcgcgtatatttttatgttagtctctgatagttatcatgttagtaagttcgtttgttttaacagtttatggtgttgtaattttataacagaggccgcatgtctgtcctgtggatgattgcccttccagttacagaagaaaggatcacttgaatcgccatcttctcatacacaaaggaaaactattcaaatgtccaattgagaactgcaaaagtgaattttctgtcaaagctaacattaagagacatgttgaagaactgcataatgagggtcgagcttcccccagcactgaatgtgagaacactgagaggaagcatgtatgccaagaagctggttgtgggaaagcttttgcattttccatcaaggctacgtaagcatgagcaatcccacggtaagttgcattatttttatttctttttcgtaagcatactaatggaatggttggtgtaccgtgtgtgtttgtttgacctcttatttatgagttgaaaattcatattcttattagcataagcaccacc

SEQ ID NO: 387658 - DNA, 686 bp, Cannabis indica
tcacctggcaaaattcgaggaattctcacaatcgggttcgtaagcgattggatagagtagctgctaatgcaaattggtgcactaaatatcataaggctcgggtggttaagtatccaattgtgggatctgatcatgctccgatttgtcttcaggttatgggcgaagtgaataaactaagtatccttttcgattcctggaagtttggactacacggcttgactgtgggacaattacaaagcattcgtggatgaaaagtatcaatggaagttcagccgttgaactcctgaggaaactcaaggggtgaaatatgatctaaagaaatggaatcaagaggtttttggctttagtgatagaaggttggtggagcttcagagacaattgatagggattcaaggtgaaccgatttcccaagcaagtatggaaaagaaagcagaagttcaattggagataattgaaatgaaagggagaatggacagaatttggaagcaaaaatctcttgaaaattggctccgttttggagatgcaaatacaaaattcttccacacctcgaccatcatccgtcgcagacgaaactgttgggttttatgccataaataaaactctatttcaatgtaatccagattattcaatatcaataaaataacagaagtatttttcattcatttgtgtatgttttggttcacctt

SEQ ID NO: 387659 - DNA, 636 bp, Cannabis indica
tatgtgcttaaggctcatttagttcaaaagggccaaaaaaaaaattctttttaaaattacatatttttgtactgattttaaaaaataccatattttattaaaatttaaatttattttttttattttttttataacccactaaatttcaagacccaccttgactagttctaacataagtaaattttatttgaaaatccttttgtttgaaaaaactctatttatttattatttctttacattccatcaatattaactaattgcatacatggcaacttttggtccagatcatcatttataataaatattaattatcacactatatatttatcgtattgtgccactcatacagcaaccttagatttatattttaatttattaaattgtgtcatagcttacaattaggggagcttgtctataataattaaatataatgatattatatataaaaaaatatatataatatatttaataatattataatattattgtaggtgcagcctgttgatttaggcaggtgtgtgttaattggtcaatagtaaaacattagaccaaactttattttaatttggacttgaattaattaaagtcaaatatccaaatatatacactttttttagttacaatatctcaagtcaa

SEQ ID NO: 387660 - DNA, 689 bp, Cannabis indica
ttttttctttaattcttttgtctgactcttatgtgtattcttctattttcttttataaaaattatttacctcctccttaatgatgtcttactctttgtcttgttattgttatattatttttttaaaaaaaatatttatctactatcttaatttataaagaaagttttagctactagcaagatcatgtctctaaattttataagaaatgtctctaaataaacttattttatgaaacaattttaatatattttttaaactacttatacggaaattaatagtatcttaaatattatggaatcaattacataagaaaaatttatgtttaggtaacactatgttatcttttgttcaaaaaaaaaatgttgtcttttgtttaagatgcttttacacatctttttttagcaatatttttattaccttaaaaaattattagcttattaataaaattagtatatatataataatttgcaaaatgtaatcaattttatttatgtttagaatattatttggtaacttcttataatgtagctttaattctatgtgtttaaaatatgaataattacatatgacatcattttttgtaaaatatttacatttttacgtttaaagaatatttttttacatttttacagttttccaaaaaataacacgaaaacaacataaaataaacaagaaaacaacataaaagt

SEQ ID NO: 387661 - DNA, 864 bp, Cannabis indica
gataatattatttagttttttttttttttcataaaatgataatatatattaggttattttagtatatactaataagtttaggatattattattattattataaattcaaatcaggttaggttttatttggataataattaatatcttatgtatgtatcagatcattttatcatttctaaaccaaatgaaatatcgatcatttaaaatataaaattaatattttatcattttcccctcacccattttaaattatttttaatgatattttcaaaatatcagattaatttaataatataccgctatgttttatatttaccaaaacaaagtatcaattttcatatatattaaagaatttgaattaaatgcatacataataatatgagctactcgactcataactaattaattttgaaatatatagaaccataattcaaaggatcgggactcggacccggacttagacccgaacttgaacccaaactcttgggacctggaactagaaatagaactggactcagacctagactcgggactagtgacttgcacccgaatccagacctaagctcgagacccgaactcgatctcgggacccagaacccagacccgaactaagaccagatcgattagaatccgaacccagactcaagacccaaactcgactcggatgtgggcttgggactcgggatctgggacccaagaacgggacctagaccaagactcgggacctcagacctagacccaaacccaagacttgagacccgaacccaatcctgggacctgagaccagggacggacccattaacattgatggcccccacaaacaaaaatattgccttttaaaaaattaaatgtaaatttttaatt

SEQ ID NO: 387662 - DNA, 1764 bp, Cannabis indica
ggttcgaccaacaaggttaaattaaaaccattattttatctctttcaattctattttaattctaaacctaaccctagaagctatcctataaatagaataagatggattttattttcaattgattatcagactactttatcaaacaattagaaaataaagagagagcctccattctatttttgaaatcttcctcttcttcttcctctattattttcgaactctatagtgaattgaggagttgcccacacaattcaagtcagtactcaagatagtgtgaaagattgtgtagaaatatgccaactgaagaagatcgaggttcagatcttgatcatactctacgatagaaaggatcaagggttagagatttgaatagaaggagacattatattttgctgccacgaatgtaagattttctataattgtatatgtgtttatttcattattttaagaaattcatatttaggatggtagattataatttataatcaaacatacatgttagtaaatttagatcctggtaaaataagttctaacatcttatacattttaaccctaaatcatgcaaaaatacaatgaatataaatgaaaaagggagggaataaaatcttacctttgagattgtcatggtgggttgtcatgcatgggtcgtggctgcagtggtgggttgtcatgggtcggagaagtcgtggtgggttgttgtgggtcgtgggttgtggccgcagtggtgggtggcgtgggtcgtggctgcggtggtgggttgtcgtggggtcctgggtctgttcgagagcgataaagacaagagaggaagagagaggcgggtgttgagaattgggaggggtagttttgggtttaatgaaaaattaacatattctacaaattttgttacacttaggtttagggttaaaattttggcccaataaattcataataaattaaatttccctaatcaaaacaacttttttctaaaagttgggttgtactagctttagcttctccataaattctccaataaactattttttaactacttaccaaatacctttttattacaacttttaaaaaaataacttttagcttttccaaaaactgtcaaatgaggatttccccctaaaattttgacatgtaccaaattatgatcctgcatttttcaagctgttaaattttttttcctaaactattaatactgttagattcaagaacttccgtctaattttgtttaaatttattaacgggcacctgacatggacaaaagttttggggcatgattttgtacatattaaaatttagagacacaatttagtagatattaaaatttggtcggcatgatttagtacatggataatcattacattaagcacccattaataaatttaaacaaaatgggacagaaattcctaaatataacaatctcaattggaaagaatttttaacaacgtaaaaaattaatgggcatccatgcaaaagcttttgggaaaaaaatcctagttagcttaaaagatataaaattttccaaattttcattctaaattggcggctatgcttctttgtaggggtgtatatcggtcaattttatcgggttatagtgtatttttaccaacccaatataaatatcaggttgcaaatatctaattgtaacctgtctaataaaaaaataaaaaaaatgtaactcgcccaataatttttatcggtttggtccggttaacccgtttaaattgatctttattttttattttttttcattgttgttagtttttggtgttcaaa

SEQ ID NO: 387663 - DNA, 601 bp, Cannabis indica
ataagagtagcacgcccagcttttgagagagattttgctttccagctgaagcttaatggtcaggttatccaaataaagttgtagtctgcatccttctaacaagaccgaagtaaaggaagccctaggtatttagtatttcctactaggtctccaattcctagagtttctttgatctctcttttaaccacatcaggagtgttcttactgaaaaatattgaagttttaagcttgttgacccgctggcctgatcaagagcagaaatcatccaagcacttccaaaagcctcgagcttctaccaagttttccctacctaccaaaatgagatcgtccacaaagaatatatgagatagaattggacccctccatcttagtctaatccccttaataattcccttcaccaaggcttcttccaacaatcttgacaaaatttttgccgcccaaacaaacagataagaagagagcgggtcaccctggcgtaatctgcacgagggcctaatcttgctgacctgacctccattaagacaaacatttagaatggtggtagaaatacactgtgttttaccaggatctagttcactaacaagtatgtttcattaacatc

SEQ ID NO: 387664 - DNA, 1141 bp, Cannabis indica
ttagagaggaattaacgaatctgctaaaaagatggccaacggacttacaaaattcaaacttggggattattgtcctttttttaaagttggagacttatctaaatcaaagtaaatttttaaagacttttgttgcaattttcccaaagaagaaactataaagaaagttagaaaatgaaattgttaggaatgggtcataaagttttgttattaagaattaattaacgcaattttcccttattttcgttaaaaacgacaatgtttggattacacactttaaaaacgacatcacttggtaaacgacactaaatggtagacgtttaatgctatatgctaattaattgaagtaataaataattttgataatcaaagttcaacaatccgttgtagtctagttggtcaggatactcggctctcacccgagagacccgggttcaagtcccggcaacggaattatgtttttcagctatcttcaaaacgcaatatttgggtttcacacttcaaaaacgacatcaattagtaaacgacaataatacacttgaaaaacgacaataatttggtttacacacattacaaacgacaataattggtggttatttattactataattttatttaacctctagagtcaacaatccgttgtagtctagttggtcaggatactcggctctcacccgagagacccgggttcaagtcccggcaacggaatttttttccttttattaatataataaatacacagcacaaccgaaattgggcctaacgcaaatgggccttaccttattgggctgaaaggtttgtcagttggtagctttgagcccaagctgaataggttcttcatattcataaccaatcccctttacctatatttttgaataaataaatattattttataccttaggtttgcaaaaattattgattaagagtttgtttggtcgtgtattcagttttcaagttttaaaattgtgtttttaaaagtgaaaatagaatacagttttttgtcattttaaaaatttgaaggtgcttggcaaaattttttcttactaaaaaaataattaatattttaacaccatactatgacatgaatctatccgagttcaggttcgagtttggttttgggtataggatccgacttagagtatg

SEQ ID NO: 387665 - DNA, 4657 bp, Cannabis indica
tagcaatgctctaattaaaatgacttctagtttgaagtcgtacatggtatatggtagaataggataaggtaccactgtaaaccaataaacattattatttggcgcttttaagtcttaaggtgcctatgtgggaacgactacgaagacagcctacacctgttcaaggaatgtgcatttgcaaaagctttatggtttgcaagcctttatcctgtggcagtggatctaattccatgcagcaacttggcccaatttttggaaatcttggtaactatattagttggtattgcgagattgaagctaatgacttatgttggctgtgtttttcaatagatttggaagtgcaggaacaaggtgaaattcgagggtgggatgcccaatattaactcagtcttggtggagataaaaaatctctgctctgagtattttgatggcaatacacgggctcccctccatgagaaaactctatcagcagatcaacagattagggctgaacattaggacccagcaacccgaaaaatccgaccacccgccccgacccgatgccaaaaaagccgaaaaaccaaaactcgtattgtcgggtcgggtatgacccgaagaagcataattcgggtatcgagttcgggtaaggttcatatcctttcgaattgcaggaatgttatgagagtatgttccttgaagaattgccacctggattggatttttttaacctttctttagaagttcatgaattactcaatacggttctagattgtagtttcttttatattagtagaagccagaacagttgcggatggtctggccaggaacattagaagttcttgtattgctcctagtttgtattatggggagggtgatcccttgtgatcgccaatttttgctctttgccttagttgaactgaagttcgtttttttaaaaaaaagtcttaaggtgcccaatgtactatattgatgtgtcacttcatgattaatcatcttcaatgagaatcgcccaatgttgttgcaaaaaaaaaaaggtgtgccagatatatgagatggcaggagagagagaagagaaatgtaagtatataaataaaatttgattaaaaaaaattctaattggttaaattttaaaagtatgtgaggtgggaaactaaatttttttaaccaaatttgtgtgaccggatattatgtcacctctttcggtaacatttctttaaaaccaattaatagataaatggagtagcatccatgatcttgtaaatgatattaagtttctacataatgcatgcatattctacaaatttataacattatagcattggaattaaattattattggttagttctggctaaacattctaatatttacacactttaacacaataactcctaatcaaaaattttggtgacagtatctctcaatgtttacttcagttacaaatttaaggtgttagttcatttttattgttaaatgctaacataggctatctagtttatacacgtggtatatttacattgatctaaataatttaactatttaaattaacagacaggtgcacatttgcgcaatgagaggtaacgtgcacgtttaccataatcaacctcgattccctctatattttcacttgaatttgtcgccaacctcaaagttctttttgttcgttagttttagtgacagtggtgttggtaatgatggtggtagaagaagaataaataaagaataaaaaaaatgacgaagagtactcatatgatgaaattaccactactaaaaatagtttttcctgatgtttttaaacagtcgagtaagtattcccgtcaatttctataaccatattctatacaaccatcgcaaaacggacaaaataggcaatgatttgaaacagatggtaatttgaaattctcgacggtttaaaactgtcacctatagcctattataggcgacaattttaaaccgtatcatatagtatatatgttacgttttttattttaaaaagtttttttcagcaatgattttttttaatcgttacattagaaaaataagaaaaaaatacagattttctaccattctttcctttgcattagtttttaaattttttacaaatcgatatagtcataagaattaaacaaacgctaatatcatctaaatatatatttaaaaatctatatagtcacaataattaaactaaggttaatatcatctaaatatatttaaaaatttatatagtgacaataattaaactaacgctgataattgtctaaatatatttacaaatctatatagtaacaataaattgagatatatacacactaatcaacaaggcaaccgttgtcgctctacttccgctttcacgtaaagaatccaccgatcacacataacatttatctcatcatttgtgtacgaagtggagaacctaccctgtaaaataaagttatatattaattagtaaatactactatcatatgctattgaataaagaataatatttattaattgttataccggttgtgtcaaaacgtgtattggatcttctacggtcatgaaactttcaatgaatttcatgacgtagtatccacattgtttatcgtcaggttgttcaggatatataggaattatccactagataggtctatccagccaacttgtcatttgattttatatggtgaacgatctacataaaaagtatagttagcatatataaatttataaatataaaacactcttacatgttgggatgttcaatatagaacttacgtggaaatgataaatttcaaatcatccggtacatcgccattgcctgaatccaagtacgccacagtctgcgtacttgattggataagtacaagcatctagtgaaacattttcctgcacgaacaaatatgtgtaaaactgttaatacataataataaatattatgaagagttataaatactaaaattattcatgttaaatctacataccgattattttaggggtataataacccatttatcttgattggtcatcctagtcatacgagtgactagtgcttgacaacggttactgtcaacccctgctttggtggcaattgcacccagatttaaaaatttatatactttgctcggcccattgatgtctaataatctttcttttaagtgtttgataaaaagtcataattaataactattattgtcaaaagaattttatcaagtttattattaagaggtagaaattatacttgcaccaaactcctatcggttgggctcccaagtattgcatggtgcacaattcatgaatatcatacaagccaaatggagtcatctttgaccccaaatatatcataagaaacctaaaattagattatggacgacttcagccaccttttgttggagttccagaaggtaatgatttagctagtttgtcatggttggatataaagaccatggcatgttggcttacttggcctctcagggtgttttggaggatgtgtttaaggatcgagtaaatcttcattggattgtctgcttctcctcacgggttgcttctgaagttacttggtgggtggttatgtctatatatatatgaaaaagaacaataaagttagaatgtcattaatcaataaacttaataagttaagtaagcaaattaaaacatactaagtatttttcaacaggtgtaagatagtctttcagccatgctacgtaactttttatagcttgacctagagttgtgaatgcatcctgggctatgggacacaaaagcagtgcattctccacattgacttttttgatgaatacccaacgataatctttgtacagctattcatcattgtgaatcaaaaactttccatctttcaaatatttccccttcacaatgtgtcccaaagcaaccttagtaccatcccattgggttccaaccgacagtgcatccaacacggtaaggtctgcatatccaaatcaaacaagcaacaattcagtttataaattgaccatatttataatttagcattagatcagttcgtaaaataacattaagattacctcttttgaactaccaccagtaggtggcggtgctggttctggagtagaaacctttttgaaacgcggtggtaatggaatagagacattggtagcacacgatggttgtgctatagaatttggtggagtagagacattgttaggacccaatggttgtgctacaggatcgaaggcaaggtcaacatgggcttgttcatttgatgctcctccaacaccaaaaccaggtgcatgggatgtgcccacaactctgctatgctgggaactaactagacgaatgagcttatccactttctcatgccactttctattgctttcctctgtctgtcattttgtgcttggttaacaggatctatcttttgtaatattttataacaaacaattacagtggtattttagtaataagtttgtaaccaaggggatccccgaatccagtaatattttagaaaagaatttaagttatactttaattatttttttttctaaagatttagttaatccacttttgtcttaaactgttagtttattattataaactaatttatgaaagcacacatgtggcgccttacaggttagggtgttacattcaataaactagatcattaattgaatctcatgaaccaaataatattttttattaattccatgattactccattataaatat

SEQ ID NO: 387666 - DNA, 1179 bp, Cannabis indica
atgataaataaatatttgattatgttaccaatctttacttgatcattttgcaagcaagttcacaaagtatcaatacttgcttggtaatgtcaaacctagtcaaagaagtagattcaacaagtatatcaactacttcatacttcataagagcaaaagattcatcaagagatcaagaattcaagaccctatccaaaagaggacttcaacacctcaaagtcaaaattctacccaatagtcaaagttaaagtcaaagtcaactctcagagaaaagtcaactttgaatcaaaacatgcaaatcaagctaggaagctcatctaaatcaagactatacacaatcaagtagtataagtttactttagtcttgttaagtaatttgcatagtacactagggtttataagtttaaaagtttggctcactaacttgtacgacaagttatttcacaaaaatgatattaaaattttctaaattaattttgaaaatcacatatcatttaactaagataatgcaactggaatattttgaaattggataaacaagtaaaaagctatgcatgttttagttcaaaaaaatgaaccttatgcccctattagccatggaaccggaactctggttgtaaccaatccgaaattctagatcacagcagaatcaacctcgaaaaaagtgctaacggctataaacggctagtttttattcctgcactatataaactcatttttcactcaaaaatattggttggttgagcttctattcatcatatatgatcattctaagtgttctaagctaaagaattatcatcttttcataaactcaccagccacacacacttgagccaagcttgttcttatcttctctagtgtacttgcaattctctctaggatttcacattgtattttatcttattagagagagtttgctttatatttcaaaatcaaatatccattgcattccaattggaattccagttgtaaccaatttgaaattctagatcacgacagaattggcctcaaaaaatttgctaatggctataaatggctagttttcattcttacattatataaatttgtttttcactcaaaaattaaggttggttgagtttttattcatcatataacatcattctaaatgttctaagctaaagaattatcatcttttcataaacacaccaaccaaacacactt

SEQ ID NO: 387667 - DNA, 1014 bp, Cannabis indica
aaaaggttacagttaggacaggcgcacgttagcattaaccataacgaaaaatgggcgtacgataaaatcactgacaattgtgcttaccaccaaggagcttgcggtgaatttcagttgtacctcgactcatgagcaggatgttctctccttcaccattaatggagcttcgttcgtgttcgcgacccaaaactttaagaaagaaagaaaaaagagaccagaaattaagacaactttatcagaaagtttaaataataataatattgccaattattaaaggagaaacaaaaaagaagaatacaaaactgaaaaaaggcatgaaaatcaaccatggcggtcgctgaaagaacaacaaaaaataatcgaaaggaaagagtgtatgattaccaggtcgaaatgtgaagagtagtaatacggtgaagagtgcggctaccgacgcggttaccttcttcttcgatgacgactgtgttgaaatcatctccatatttttttctctctctctctaaaacctgtttttaagagagagaaacaatgttagatatgaaagtgaatagtatcgcgttcttattgcttgtgaatatatcacatcaatggcggatcaatcaatcaaattcagaagaataacagtagccgtcgattttatggaaaatctctctctctctctctctctaatatttgagaagactcacggggcttaggtatatacaccgccagtatataactatatatatagattagtggtactgtagaatagagaaataacgaagacaccattaaaaactagaccagagaaattaattaagaaaaaaaaaaaaaactcaaatctcgaaaatctcaatcaagtcgtaatgattttaccggatataaaatatttctcgaaaacgaagcgttgccaaaaagaagagagaaaacaaagtaaaatgaaatagagattttccaggaaaattttgataaaaggacaaattagggagcgagtagccgagatcagtaacagtactactactactactattagta

SEQ ID NO: 387668 - DNA, 1193 bp, Cannabis indica
tctcagtcttgtaatgagtgttgtactcaaattgatcattcagtttctggttgtaccaaacaaaaaagtaataaaaatcttttttttttttgtttattttgatatctttaatcctattgtctatctttcaagttttattaatgacattaatgtttggtatagtaaacttggtcatcctgcaactaacattctaagcaagatcttaactatagcaaacataccacattctcttaagaatctgaaattttgcaaagcttttcaattaggtaaaaatcataggctaccatttctcttgtctcaatctcgagccaatcagcctctttcactggtgcatactgacttacggggtccctccaacattccttctaaataaaactacaaatactacattgtcttcgtggatgattatagtaggttctcctggatctttctactaattactttaaaagctcaagcctttgaaacttttatcaagttcaaaagtcttgcagaataatcatttcttacttattaaagttgttcaagctaatgggggaggggagtataggccatttggaaagtttttagttgatcgtacatcttttctaaacaaccttgtcctcatactcatgaataaaatagaagaactgaacgaaagcataaacacattactaaaactggtttcgctctcttagctcaatctggtcttaatctgtcttattggtggtactttctaatgttccactcactctattaataagatgccaacacttgtgcttggcaatcttagtccttttaagtgtctatttcatgaaattcttgagtataatattctcaaacctttttggtgtacttgctatccacatttgaggccctatcatcatcacaaacttgaatacagagtatttattgcttggatattctccaaagcacaaagcttatttgtgtaaaaaatgtacttagaagaatcttcatagctacgaatgttgtttttgataagctttcattccctgcctgaaaggtttctgcttctacttctcaagtattgtctgaactcactccttgtcctataataagtttttttactagttctaagcatgtttcatctgaccttgtctttgagcaatctagttccccgccaatagctcttggcattgttttgttggaatttattttaccaggatcttagatctactcacaagtatgttgattaa

SEQ ID NO: 387669 - DNA, 956 bp, Cannabis indica
aaaaaaaaaaaaaaaagggaattcattgagcaaagtagatacagtcaaattcattatacgaaaattactttgttaattgaaaatgagcagtttttgaagaagaaaaataaaacatttgcagctcctcatagccaaaataaaaataccgccggcatactcaccgcaactgtactcaagcttattgataccaataccaacattcctctacacaaactcgagatcagaaaatatgtttttttttaaagagtcttaaacctatgcctgagataataatagtaacacaccagtcttaaacccataccaaaatgcagtcaccaaaacaaaacacaataatgagctaaaaagcccatgacttgcttagtatgtgtagcccttgacatgaaggctctcggcagcaccctcacctagagtggcgtcacccttgtaagttccaagagtagcctgtgagttggccttggccctggtgaggaaagcagcctgagcttttgggatgttttcttctttgccggaccatgccttgagtgtgctctgctggagtgcccttccgaaggagaaggatagtgaccatggcttctttgtcttgagcttgttcatggcgttgagattgacggttgcttcctcctcactctgtccaccagacaagaacacaatagcaggaacagctggaggcacggtgcgctgcagggctcgaactgtgtattctgcaatcacctctggtgcaacctttttggcttctgatccaggggtaaccatgttgggtctcaaaaagagttccctcaagaaggacatggtggtcattgagtgccttgtagcatgcagcaagaacacgttcggtgacatcggcgcactgctcaattgaatgggttccatcaaccaggatctcaggctcaaacaattgggacaagccattctcttggcaaatggcagcatagcgagctaacccgtaggcattttcg

SEQ ID NO: 387670 - DNA, 2986 bp, Cannabis indica
ctcacaaggaatgcttcaccaattacacatttgtttttcgctgacgacagtccgcttttctgtcatgccaatgaaagctcttgcctagccattaaaagagtgttggagatttatcatcgggctttggggcaactcctcaattatgataaatcagtgatgtacttctcccctaacactactttggcagcccaagtttttttccataggactctttccatgcccatctgtgaatgtcatgagaaatacttaggtcttccatcgtatatcggcagagataagcaacaactttttagtgatattaaggaaaagatatggcgtctgatgcataactggaatgaaaaactcttctctgctagggggcgcaaagtactcataaaagctgttgtccaagctatctccaacctatattatgagctgctttcgacttccggttaatatttgcaaccaacttgaatcaatgatggcgaattttttgttggggtccaatgaaaatggctcaaaaatacattggcgagcttggcatcttctttgcaagtcaaaatatgaaggcagaatggggtttcgatcgtttgagcagtttaatcaagctttattggcaaaacaagcttggaggttgttggaaaacccggattcacttcttggtagactgcttaaaagtcgatactttccacaaaatgacttcctccatgctcaccatggtcacaacccatctttaacttggcaaggaattatttggggtagagagttactcattagagggctacggtgggaaattggagaagggagacttgttcatattgccactgatccctggataccaggcttggaaacttttattccccttcgatacactggcccttgtgatggtagggtctcccaattaataactgatgaacgccaatggaatgttcccttctcaaagaatggttctcaccactggatgttgatcgtatattaactatacccatcaagttttttttttagagtaatgatactcttctttggcactacaatactacgagtacatacactgtccaatcgggttatcaccttgcctcgtctattgcggatgctgaaactgctcttggctcaagttccaactcacaagcagcctggtggaagcttttttggggcttaaaactcccacataaaagtaaagatttttgctcggcgtgtgattcataatgcactaccggttgctacctctttggttagacgaaaggttatcgcggattcaacatgctcggtttgtaaatctacctgggaatcaataggccacgccttgttcagctgcagatatgccaaagttgtttgggaaaaaatgaatttgttctttaactggaaaaaggcatcatcaatgtacaagggtgattacttggtgcatctttcaaccgtatatacacagcaagaaatggaacttatcatttgcactctttggtctatcttgacggaaaggaatcaaattgttcatggttccaaggccaaaccagcagctgttctcgcttcctttgttgtcaattacttgacaaattatagagcagcaaggaacaaatatcatgttgctgatcctatcattcatcatcagctgagaccacctgaagctactactccatggaaaccgcttgctgtcggtgacttgaaactaaatgtggatgttgcggttgatgctaatcgacaaataactggtatagggccagtcattcgtgattctgtaggggttgttcgtgctgctttggctaaaccaataattggcaattttgcttctcatgaaatggaagctaaggctattttctatagtcttaattgggttttacagcttcaaatgtcgattgctattgtggagacagatgctcttcttgttgccaatgctatccgaaatggctcctctgctattacttcctataatgatttaataattgatgtaactagtcttttatcctttttccctcaagtgattgttgttcatgctaaacgttcagccaatatagttgcacatactttagctaagtttgctttaggggtggatgagacttgctcttggttggaggatttacctccatctttttactctgttattgtaaatgacattccttcttaatttataataacaagtatcttttcctacaaaaaaaaaaaaaaaagaagaccaattagttacttttaagtaagaaaaaattatatatattttagttatctctaaatcttatttttataaatcttaataattaattagttatattatggtggcttataatttaaaatatatttaggtaacttcaaaaattatttttgaaactaatgagttgtcatttaatataacaagctattatttttatatactaattattttatatatatttttgttattttgaaagctaataagttattgtacaatattacacaattcaattaacaaaattataaaatgaatgttaaatgaattttttttaaaaaaaaattataaaacattaattattcactatattcagtaaacgagtacttatctttttttaaaatagtgaaaaaaatatatgtttactgcatcttgaaatgttcacattgaagagtagattgcaatggtatcttttttagggtcaaccaagtaacaacgtgacaattttttatttttaaaattaacaaaaagagagagaaagaggaaaatgtaaaaaaagaatttaaaaaaaaaagaagcaaatgaaagtttgttaaatgctagaaaagaggcaacgactgctagggtttatgcccaaaaagtaagtatttattgttagcccaagatatgtttccaagaggggggtgaattggaaatgtaagctaatttcagaaatttaaaaaccccaaagacatttcatgcaaatattcaagtttaatgcaataacgaagataatcacaagattaaacaaataacaaactagaaatgtaaagagtttagggatagaaattgcaaactctcaattttttataaggtttggtagaactaagccac

SEQ ID NO: 387671 - DNA, 1656 bp, Cannabis indica
ggtcgttctagacataatgatgcaagttggcattgttcttccttatgaggaattggatctccctcttcaagttctgacactcgttggtgtcatggctaaaatcattatgaaactgatagaacttcgacatggccctcttgctcatatcccttttgataggagaggacttcttatatgggatagtagcctgagtggccttttaaattatctcaagttattctgttaagaggatgaagcaggtgtacttctcctccttctccttctggtttaatggtttatgaaaagtattgtacttctcctttttgccattgttctgtccaaaactattatttttgcacttgcctctagcgttcttgccactagagttctggtcggcactgttagggctagcctacgcatttggcaagtcttggggctatacagcaccctcaaattgcttgttgttgacttgccctatctgggcttgtctgacggcttcctctagctttataaagttgtctgctcgtttcaggaactcctccatgttatttgttgagatcctttggatatctttccagaagtcactcaattcaaggatgtttccaagtatgaccgtataatgacttttttttatcaggcctttgactttggtggcctcagccataagcctttggatataatccttcaaaggttcgccttgtcgttgtttgacctcaacaaggtcttctagctgcgatggtatcagtcttgaagacaagaattgagtgtagaattgtcaagaaaattcattccaagaatcgaatcttcctagagctagcttgaagtaccattgctgagctatttctgacaaagtttttgagaagatccaacaccgtacatcactattaactttttggagtttagtctacatctcgaagtacttaatgtgtgctagaggaacttctcgcgtggtatgcatttttgatactgacatcttaaactttggtaagggcaaggcactgatgtatgacaagaatgatgatcctccttacctatctagttcaaggcctgatgggtttggtccagccaagccctttatcatgtcttttatttgatccatttctgcttgcacagaaggatttgatgttgtaggagcctggttgattgacctttcttgatgttgctgcaaccctagattagctaggacatggccagtcataccctgagaaaagatatgttcaaggccagacagccccaggcttggcatttggctttggccagccagccctgggtcgggaaactagccgtggtctgccatccctgccctaagcaatagtgcatggctggccagctctatgctttcttccacttcgttccgaagagtaactgcctgaggtgattttattgataggagtagatcacaccaattgctagagtttagtggatctaactgcctgaggtgattgtattcacttctcgagttgatgttgtcttaggtgtttccacccaaaggttggccaagtgggggtgttgtgtagccaaagatccctatttaaccctcaaagccattggttgctagagtctagatacttcaggagacgtctgtcatggttcctacagaactcggttggaccattttgttgggttttatgcccaaaataaaactcatttcaatgtaatcagatttacttattaata

SEQ ID NO: 387672 - DNA, 833 bp, Cannabis indica
ttaaaactacttgtattaattccgacttctgggaaaattacaattaaccaacaaactattagaataacaagattaacaattcacaagtaatcggaaaaaaacaaaaataaacagagtatttaaaataaaaaataataaagtaataaaattaacaccaagatatatactggttcaagtttgatagatcgatgtaatatataactctactccaattttggaacaccaccgaaatcttcttgattgattaagcaagaacaaggtacaatatagtcgatcgagattgattctctgttggaactatttatctctcacactcttactcaagaattttcttcatctacagaagattcttcatacaaaactcaaactctcaatctttattttttctcagtacctctcaatctttctacccaaactcaatttctcttatttttatttatttttttctgtacctcttttttttgtacctctcaatctttctctcttttaatctcgaaatctcctcttgaaacttgatttattcattatgctcaaaatgataagagttggtggtatatatatataagttcaggatatagatccgataaagtcagttgatgcaagtgctaatttattgttaagctagttaggacttaacaaacttctctggtcgagatcgatcatgtcagcataagtcaaagttttttcggatgagatatactcttccgagactaaggatcgaagcgcacactaaaggatttctctgattggaaaggtgtcagctggagtcgactatccgagaatcctttccaagagggagcagttgtccatccagaactcctttctggagaaag

SEQ ID NO: 387673 - DNA, 2015 bp, Cannabis indica
acacatattgacatgcatgcttatcattgcattttacaaaatattctttattacattttcaattgacaaaaataataataataataattaaaaaaaaatgaaagataaaaaagataaactatttcctttatctaattttacttcatagtgttgagtgacttaagttcttgaaacaataaatgtaattataaaaaatatgactaatgtgttaattagtaaaaataatattttttaaaaataaaaatataaatatttttttttggaacaaaaaatatagataattatttccttaatttactcttatttcataatgtcaattccttaaaacacggaatctaattataaattttggtttttacattattcattctttgtcaatccctaataataataataataaataataattattatttttttaaaatataattattttattttatttataaaaaacttggatctataaagaattataagtgaacacattgtgtagattaataatggttcacaaaatttgttttttattgaaagaaaaatgttcttatattctaatatcacggctcatcatttaatgtagcatgttctatatatttatatatattatttatattatatagagctctctagttacttaaattagattattacccaaccacttaaatttgccacaaagattattagattaaatttttatagtcttctatgattgacaaacctagccccatatttctctctctacatgtaatgacaaatatatgaccaaatgattaattaatgctaataagtattttagtatgagtattcctagtagctatcagtagtgtctaatatatattatttatagatggtatattacgattagttagtgatatttctcaaaaattattttcttaacttatataacatccgctacttatttataccaataacagtatgacaccaaaaataatactaagcactaaccgtgtcttttaacaattgtgtaagtatgtagttagctttaattatatataaactaggagacgttaccgcgctttgcgcggtttttataacatttaaaaattgtaatttggataatttttatatttttatagtaaaatttatgtactttttaagatatttctcaattctttataggaattcacaaaaatataagaaaaaaaaattagtttatttttttatggatataaaacttataccacaaagtatagtaactttataaaaaaaaaaaaatgaaaaacccaacaaaataccataataatttaacaaaatttctaagaacaaattttgccaaaaaaatcatcagagcagccattgccacttaagaagtcatcagagttgccatcgtcccacagaaaagtcacggagttgtcgtcgctaaaaaaatcactggagttgtcatcgccgtcgaaaaatttgtcagaattgttcttgccattggaaaagttatcggagtaaatgtcgtcatcggagttagatgtcagagtcgtcatcagagttggatgttggaatctgatacaaaaaaatcagctatgtttataagctagttaaaaatctgacttaaagaaactgtttttgtaaaacacccaaaataataactaattatacagggaacactactacaaaactacaaaagttagaatttgcaacagtcctaaaaacggtcgctaaaaaaattaagtaatcgtttaaattatcacagttctttacaagaatacttatggattggtactctgcatgatcctagagcaaacaattcttctaatatatgatatgtatattgaaataaaaaaaaatacatatacacataatttacataaatatgatcattgaatattcatatatttacatgtatatataatttatatatacacactaaaaataacccaacaaagaaaaagaaatatgagtttacaaaaataataatatagtagaacaccaaaacatggtggtgcacaaaagaaaaaatatatgtatgtatttatatacagtagtaattaaatataaaataatta

SEQ ID NO: 387674 - DNA, 578 bp, Cannabis indica
aaaaaaaaaaaaaaactaagagtatactacatataatttgtaactaattagtaattaactttactctaaattactatacaataaccatcgctcctcgtgcatccctgatttacccataacgaaaattaacaaaaaaaaaattctaacaaccaaatttaagagaaacttaaatcaaataacttttcctaattctactaaaattttgacatcataacagctaaaattgaacattttaaaaaaaaaattaaaactattaacaataacaacaaaaaaaacaattcaaattaaacaagataaaacaatcacaaaaatatttatcaatacaaaatactacaaaattaaatgtctattacctttagccataacataagaataatgatttataattagtcataactttttcactttcagttacaaattttattatgactaaaagtaaaaaaatttgtagtaaatactaaatttatactaactcaatctcaatttttttaatctctttatacttataaatctgaacttttccttttctttaatcactttatttttcttttttgtttaataaatctcacttttttttt

SEQ ID NO: 387675 - DNA, 1821 bp, Cannabis indica
cgtgggttcatcgttggagagagacataaggaggtagaaaatagagagcaataaaagacttaggacaaaaatgggtaatcggccaacctaaacctaaggttacaaccaaataacctagtaatagaaaagccgttaatcggccagcctaaaactgggaattgttaaccgaacagcctagagacggaaggtcatgaactagccaagacaaaataagaccaaggtgttgggcaaggtccctaaatagataaaacagtcctatttctaagttcaaagctatgggacaatgtgttcttcgtgttcttgaaccttgaagtttagagtactaaaatacaacccaatatttgaattttttttatcaaaaagtcacgaattgtacatcctaaagctatttaacagattacaacaggtaaaacttctctataacatgagaattaaaaagttcaaaagtttagaaactcatcaatggtagaaacttaagaaaaaaaaaagggggttcgaaacttattcactaaagaatggcgcaaaggtagctcaaacttgatcggtgagatagattctccaacaaatgatgattgaagttttaagaaaatcaaacctccagggagggtccaagactggcatcaaagctctagggagggtctaagagtggcagcctttgaagagtaacgagttccagaaaagtttggaagagtttttaagtttaaagaggctttaaagtaaaagaaaatgataaaaaagagggaagtggcctcatataggttttggaaaattaaattcccccccaaaaattttaattgggagttaattccaccaataaaggcacacatggaagagggaagactaggtcgctctctttaagacgttcgcggcactgccgaggagtgtgcaagcagtcaaaatttaccggtcgtccccaagataaaacaacccaatcgtactgtatcagaactccactacactgtagagcaccgtccaatacacccaatgatttttgatatcgtagatggaattttaatttttatgaaaactgtatttttctgatatgaaaaagatgtattattcccatcagttcaatcgcattatatagacgaatggattgagaaatcataacgggaagaagaaagttttttctgaatcgtgtggtgagttagttgaacatgtcgcattaattgatatgactaagtaatcagttccaattaaacacatttcttaattaaattaaaaaataaaaaataattattttattaaataatttttctataaaaataatagagtgtcacaccacaccaaccaaccaaacccagctcagacagacggcgcgcgtgtgtggtgggtcaagtgtgtgagtcctcacccattcgcacaaaatggggtatcctttggggcccaaacccaaatgccaaagttgtagtctctatacccttgtaaataagggtttatatcccatgtgagattctttccacttcacacagaacacttctatattttgttaaaagattcatgaatgttccaacatattccattcatgtctatgcaatacaatcacgttagtatcacttctatatattgttaaggtaaacactttctaacaaataaaaattttatgtgtccatttttccaaaaaagaaaaataaaaatcgttacgctgacctaagtcaaaatgccactagaagttcgttattttgtgctttattttgatacttttgttatttcattatcaaatatgatatttctatctacacataaaaaagttttgggtgattctacaatgcacccccttaaatgagatgtattgatgtattcttaatttatttcggtatc

SEQ ID NO: 387676 - DNA, 2895 bp, Cannabis indica
atggaacacttcttaatgggtaaataaattgaaatatatatattcatactagagtggaaattacatattttataattttttatacaatatttgcaaaaacatggctatttttcaaaataattattttaagaaaaaaaaacaagtttaatgtaataatcaattatcttatttatatgtatactactggcaacttcacgtgcaatgcacgtgaaacaaaacatagatattatatatatataataatatgcaataaaaatcacacacataatcaaaataaaaaataattagatagtcatatattcaatagatgagatataatatttgttatggaagtttgagtttttgagataaggatgtcaaactaaatctatgtttagtataattttaatggaagtcttatatatttttgcgagttttattacaatgtatattttgggagtaatttcaacctctgttaaacacttgagtttaatatttttttcatctctcacactctctcaactaaattctaccaactaaaacttaattacaccaattaagtttttcttagaactcattttgtttgtttggctatgggtttattcttgcttgggtttacacatattcgggtataagggttcaacttataccatatatatatatatatatcatttatagagctgaccagtcaatgtaatatcaaatatacaattctctttcttaaataaaagacttttctccctctttcctaagatggtatcagacgactaagactagaacagatccatttttccggatctactcattccttctgcctttctcggatcgtcgtcaccttcttcgtcagcgaacatggcgcgcactcgtagtggtcttcctccccaagctcccactgccggttctcacggcactctcggctcaggatcaacctctgatccttccgtggtagttggctcgggctccatccctgaccttcttgctcatgtctcttctccatcgatggacggaaccactgttcctgtggtcctctccgccgttcaagattcgacctgagccactgatcccgtggctagcccagttcttcaagatcctcctctgagaaatcacgtcttgaatcctccacatcttgttcatacagatccggttggagcttcatcttttcaaccttcacttggagctccgctcgtcgccactctggtggctcttcccttggcgatcttgaccacatcaatgaacagatcaatcgagcatttactgtcaatgctccttagatccacgaggctcctcatctgactccttctcccaatgacgacaatctctactacgtaggctcaggtgatcatctcggcctcatagttatcactcctccactttccgacaacaattttcagcaatggcgtagggatttcaatcctgctcttggcgccaagaacaaaactggattcattgatggtactcttctgcaaccagtgcctacaagtcctatgtttcattcttggatttgttgtaatcaaatggtgatgtcttggatcatccactgcgtttctctcgacatcaagagcagtatcatgttactcgacattgccgcgaatatgtggactaaactcactaatcgttccagccaaggcaacggacctcgtctctttgagctcaatgaatccctcaatgatttacgccaaggtaacgattctgtcactgcttatgtaatgactgcatttataatataaattagtagaggcaattagcactaattattaatatttttgtagtatttgtggatttaaactatttgtggatctcgttattagaagtgggctttcaagttataatttctcaattctggagattttattaaactctaggagtattattcgtattatatgtgaattatacaatttttacaatttttgctcggcgacaacgaaaaatgcgatggatggctagtttaatcacatgggtaagtttagaaccttatttcttagtgggatatatattggaggaaataggatacggagtttgagcggggttatgatttttgactattttatccctagactttattttgcttaagttgtaagtaaaagggcattttggtcattttggtgtgacagatttagtggctgcctaaggtgtggacagctggccattttatttcagcaagagatcaattagttaatctcttttcatttgaagaaaaataagaaaaagaccaaaaatataaaactcaccctctttcccttctctctcttcgaacccagcaagaaccaagggaatttctgctggtttttggtttttccagcaagaatttgaggattaaccaaggtaaaccctagaagctcttgtctattgcttctttaagttctacttggtttggatatgcaattttggaagttaggggctgttagggtttaaaggttgtgtgatttgatttctaagcttattttgaggttattctacattctggatactggttatgttgtattgtgttggaattgagcaagtttgagctttgaaacccaaacttaggtctttaatggcatattttaattcagtgtaattttttgagttttattggttagaatatgttgtgtatgccctatttaggtactctagaaggtatggtggcgtttggataagttttgagtgagttttggagttgttagggaaacctggtgcaaaccggtttgcttggtcctataaaactagttaacaagttttgacagattccccgaaaaactcattttctaaattcttgtccatttcagtgccttatttaggtgttccctgtttcctatgatattgtagttcctagtgataataacagaaccttaacttgtaggttcgggtttctcggattaggatttttgcgtgtgatttaccagttgtattatgtgattagggcatccattcagcacg

SEQ ID NO: 387677 - DNA, 2574 bp, Cannabis indica
agcaatctaatcaaacaagacatcatactactcgtagctacatgaattataagattaagaggggggtccttgttagaactcatgtattgcacatgattgaatattgcatgaggcagagacacacaggtccatcactgatgagaggacttaagtgagtatgattcttgagtcgttatctccttgctttaaggctttcaccacaaactatatgatgactaagcaagagttcaacatgactcaattgttgaacgagttgaccgtatttgaaaaccctaacaaggataagtccaaggaaggtgaataaaatattgttgaaaaaaaatcgaactctccttcttctttgataagaaaaggaagtggaacagtaaggacaacagtggtggcaagcccaaaggcaaaaattcacccaagtttacgaagaacaaagccacccccaagtccaaggatgaaaaagcaaacaacgtgtgtttctattgtggcataatgggacactgtaagagaaactataacaaatatctctccgagcttaagaaaggtaaatgtgatttatttattctttaagctaacttagtggaggatgataagtcctaatggattattgattctagagccactaatcaaaatctggaacgatacttaatgaattaatgaatttaaatgggaacaatatgataaatctagaggatgataaatcttgaagtagactaataactttgcaaaataaaaatttgtttaagttataacatacttaatgaatttaaatgggaacaatatgataaatatagttattcaaatctctagagatacgaaggcaaaatgttttcatatcaaaatagctcccgcggtaagggtaccataatattgtctctacacaaataaaaaggggacccttatcccccaaaatcaaagaaaacaagataaagccaattcatggctggatagacgtgtttgtaagtgtggaagtatttgtaattggatctgcattgaaacctggaagagaagcttccgtgagctattcattagctggaagggtaatttggatctagactttttagctccatcgacagaagaatttttcgtcctttcaagctctataatttgggcaagaaattcatcttttttctcgtcaagaagttgtacaacattgtgatcccttttccataagaaatgaagggtagcacaaaggcactgctcgattcttgttcccttacaactttggtcgcagtaaccttctcttcaaccttctctaggcttccaactccacatgcaattttttcctagcttccagctccatttttcttttggcttcttgctttattgggatgctacatttggcctctgcctagtcacgttccacatgggtaagtttggtagtcagatcaacttctacttcagctaggttagcagaaagttgattttgggcatcaacaacagtagcccagaaactagtcaacaacctaagctcctgctccaggttgtgaattttaataattttcttgttaacctcttcatttaacatggttgcctcaagagtagcacttttggccttgtcgcaaattactcttcaaaaaataaaacacattctaacatcgctaacacacattgcacaacgtgatctatttcattgaaactgtatacataacttttagtcgatgaacttttagctctaataaatttaactattaacaaaatagctttagcatcatatataatatttgatagcaatattctttttgtttaattccaatgcatcgaaatactctccaaaaaataaaacacattctaacatcgctgacacacattgcatgacgtgatctattttgctgaaactgtatacataactttagtcgatgaacttttagctccaataaatttaactattaacaaaatagcattagaatcatatataatatctaatagtaatattctttttgtttcagtacaatatatcaaaatactctccaaaaaatacaatgcattctaatatcgttgacacacattatataacgtgatctattttgctgaaactacactactacaatgtaggcctttagcttccattttttcaaaaaaggaaagataaagggtgtgaaaagatccgcattcacatttagaggcggttttttggtaaaaaacgtaggtataaaatatatatatctatgtcgttggttgggggttggggaaaaatcaaggtttttttaataaccctatggtatcggttatttttgtatgaatcgacgccataggtgctgcctttagtcgacacgtggcacctatggcgtccgttaatacaaaataactgatgccatagggttatttatttgatccccctgtatatcgtcttcttcatttcacaccctcaaacccacgaagaacacccaccacataacagccccaaacccacaaaaaaactctcgccaaccacaactaaaacaacctcattctccctcatttcttaaccattttaccccatttttgtcttaaaatcttctattttcaatacctaaaccaatattgtaaaaaagtttggtttttttcccctctatatatcaaactgaacctattataaaaaaa

SEQ ID NO: 387678 - DNA, 2718 bp, Cannabis indica
tatatgaagaattaaatttttaaaaattatttaagtttatatttttttaataatagggtgtatttatccttctatggggtataaataaaactccccagaattatttcaaggggatccatatatattataaagtagaaatgaaggtaaagaaaatgaatataataaaattaaatttcataacaacttttttagaaaaataaagaaattaaaactctggcatgctcttgtaaccatgagtccatcgagagaataggtttcaattcttttagatttgggttttgaggccatggactctcaaactaagtccaattcattatcgaattagggttagtccaaacttttttcgtaccaccatcttatcaataaatcaaacgcaaagtgaaacatcaatatttgaaactaattttttgtgccaaaacaaaaccactcaaatcaatattatccagcaagggccatagtagttcaataattgtgatgacttgaatttctactacttagtaaattagtagctgattttaataaccaaatccaagagccttttgaaattttgtaacaagcaagggttaggtacatcatatttgattgattcctaacactagagatggggtccaagagttacaaatattacaaaacaattaaattagaaaaccttgtggacaatttcccttcacttcttgagattttgacataagatgctagaaagtttcaataatttagtaggcacatgcaatttttccttcttgttcaatgatccctttgaaaacattgtctacctcatcaacctaatctattatgcttttcaacccttggcccctcaattgctaaatgacttggtaactaattactttttcattttatttttttgtgggttccatttttttgagttttgactaatttggctaggactcatatagtgatataaacatggacatgctaatttatgtttagattcattcacttgagatttatttatttatttttgcttcccttaaatctaattgttttgtttattggaaacctatttgacttgtgaactatactaagaaaagtagtcttttcctctcatttaaatcttctctgattgaagtgaatagtgaaaagcaagactaaaattcatttcacgctcattcattaggtaacttggattataacttctaaaacaagtcagttaaatggtttttttaacctatcgcattggttgtttcatatatcaatttgcagaaagaaaaaaaagaaaaaaaagaaaagaatcctctcattatacaatatcacttcacgtatggttagatatactacatcacaaagatttatttaagatttactatcaccaagttctatgcagttcatattaaatcttaaataaatcttacctcttccaacattttttttatagtagatgatattaacaaatacatatatttgttaaaaaaaaattatattctttcttaacttttatcttatgtaaaattatagtcgtaaaaaaataaaatcaaaatacttgaattttttttttttttttgtaaaaaagaataaattgtattacaaaataaactctatttttatagattaataatagagacacacttaaatttaaattacacactatccaggcataatggcatataatttatatataaaaagtgtcaatttaattgattattaattttataattttttttttacacttttttaactttaaagaattttatatataatactttttttttttagtgtaaggaagttattgttgctcaaagaaataatgcaagtcttatcaccaatcttgtaacgtccctatttaaataattctaaactcaaaagataactttaatatattataactttatagttatatgggttgggatcccgagtttcaaaacatagtttaaaactatatttgtattttacaaaactacgttgagatttttttttattatatatataaacatgtacaggcaactcaaaatgcatcttaaaatatttgaaagatcggaaccctccaggttgtacatgccgcgatatgtacaatcactgccgagctctatttcactgttcctccagcttcgctttgcctttacctacacaaggtagcaaactgatgagtcaacagactcagtaagataagcaagacatatatataagttatacgatgccggctttgtgcttaagccgccctgagctcaataattgagctcaccaaatggataagaacgttcttaagggaagtacgaccactgtaccaaatgcactaaagtaccaaccctgtactcatgttggtaaagccataactgtactcccgggaatttttaagtgttgtaccacatgcacgacgtaccccctggtactcgtgttggtaacaccgtaaccaccctgatatacaacactatactaacaccctttaaataacatacatattagtggtagtagtgcaaacattctaaacaagcatatattcatatatacattcttatgctatcttacctcgttccgtgctcaagtatgccggtcaacctgaatggaaacgcagctcgacgctttacagggccctagaccataacgttcaaagtttaatgagagacacgctaaaactcatatcggggatttaaaattaaaactaaggataaccctatcgataaataggatactcgaaccctaaacaacacaaaaacagggaaaactagggttcgaaaaaagtcccaaccggcagaccagttccca

SEQ ID NO: 387679 - DNA, 538 bp, Cannabis indica
tttgagagagacatgattttaaaactccataatttattataaatgttgtaggttgtcttgataagactaaaagtcatgaagtgcatgaaaaatacgatgaataatgtaagaatcaagaagagaaatattataatctttcaatttggactgaacattcctaatttttagaataaaatctcgtactccttttgattcatcatacttaatgattgtcatttcattcataagagtcaaacttcaatattttcaccagtatcatacagtttttctacaacatcaaaaaactctttggcattgtagtgtttgccaaaccagttaatagatgttcaggaatggatctcttcataacaatgaaactaagatgatttgagttttctcattatgcatgaagagttttctaggaatcagaactggtatcagtaagatcaacatgtttttcttctcgaagacataagtccaaatttattatgcttaaagtaaattccatatctcgtttctatttctaataggttagagcatttagaatttagatggaaat

SEQ ID NO: 387680 - DNA, 658 bp, Cannabis indica
ttcaagagattgtttatatgactcaaccgatcatgggtttgaagatctatccaaacctcatcatgtgtgtcatttacataaagctatctatggtcttaacctagcccttaaaaaccactttggttgcctaggattttacaacttcaaggatagatccttctttgttcatctttggcactggtcacaatttggtcatcctacttgtctatgtagatgacatccttataactggtcctaacactaagcttataccaaatttgttgctgatttgaacaccttttttgaagtaaaagctcttggacaagtgcattattttgtaagtgttgagattcatagagattcaaaaggtatgttcttatctcaaagcaaatacatcactgattcgctagtcaaagtgcagttagagagtgtaaaaccatgttcttgtcctacaagggctgctcaattttctctatctgaagggattccttttgaagataaaaccctatatagaagtacattagatacactgcagtatttaactctcacaaggcccgatgttgccttcattataaataatctatctctgttcattcatgctcctactaatgtacattgggaagcttagggatggcaattatacccgcgggttcgggtacccgcgggtacccgcccctaa

SEQ ID NO: 387681 - DNA, 1144 bp, Cannabis indica
taattaattaattagcccaaaaataaatccagtgggacaaccctatcttataggcacctatcgctgtattaggacggagcgatagtggcgccaccaatgtcttaacgagacattagagtgtcttttgtccagaaagtttttgtctttttccccaatttatttaactaataaatttgaaaataagtaaattatttattacaaaataaataattactattttgacaaatcaaaatagatttttttgaacttccatatacaacttttatccctacccttgacagtgttttaaggtggtaattcgggtaccatggacccgtaattctaagctccaataaactagattatttattaaatctcatcaatcaaatcatcctatttattgattctctgattactccactataaatatgaatcaaactcttagtaattatataattatatttactaaaattttactgcagtgtccatcgatataatcaattctagtgattacccttccttgtcttggttcgtaattagttttggtcaaattactattttaccgttctaattacttctttatcctttagtactgttaattcactgtaatttaattagatccaatctaaatttgtgcacaactttttatttccaaaattaacacttaaagggaacaaacattcgatacattatgaaagtcaggattccataattgtagatcctatccccatccatccatactattagattctcaaaacagaagtcgtaagaatcatcttctttgagagaaactttaatgaatgaatcaaagaaactaataacatgaacatgagtttatgattactcatgattcatgctaatttactattgatcatctttattataagaatcaagtctttatagtaattgacatgtttggtaaacatagcttaattacatatagttccttgtcatatatcatctctatcatataccgcaccttcacttagatgacatactacatcagcaattcgaattaagattgtttgcactgaataacgaccattagtgaactgtactagaaaccgttgatcaaaaataaataattactattttgacaaattaaaatagatttttttgaacttccacatacaacttttatctctacccttgatagtgtttcaag

SEQ ID NO: 387682 - DNA, 492 bp, Cannabis indica
tattgtaaaatatcagtcaactagataattgactgccctcctatgtaattataaataggaacaagttacactagaaagagggacgaaaaaaatcatgagagaaaaggcttgagagctttatcagaaatctaataagattgactcgtggactatgcaaaattttaactgcaaaaccacgtaaaaacctttgtgttcttatcttttctttaccgcttttaatttctgtgcaagtctatcacaatttaggctcaaatatagttaacgaaaatctgtgttaacactccttagttcaagaaagcaacaaagagtgtgaccgccctaaaagaaagacatattacttgttataaaaaccaaaaaaatattggaaaaaaaattaacttgacgtatttttacattagttacatacacattcaataactgagactctctagtctctatattgtctttatatacatgttatttttttttttttttttggctaaaagtatataa

SEQ ID NO: 387683 - DNA, 592 bp, Cannabis indica
gctcatcacttcatgtggcgagctacttcagagtgtctcccaacgaaggtacagttgaaatctaagcatgttcatgtagacctcatgtggcccttttgtaatttgcatatgagactatttttcatgtccttgctgattgccattttgctcgttcttgttggaacctatctattttcagtacagttggtgtagcatatcagagttttagcagctggttttttgacttgattgaaaataatttttcaacagttgtaatggaaacgctatggtcagttggcgtatttggaatacacgcaacaatgtgttttggaagaagaaatctttttttttgtggttgaagtggtaagatcggtgcttactgtccttggtcattggagtattgctcaatctcaaaagttgggactgttgttggtttttgattctagtaacggtagtgagcaatggaggaaatcaaaggtgcataaggtcaaggttaacgtagatggtgccatttttacaacaaaacataggtttggctttggtagcgtggctcgtgatcccggtggtaatttgattgaggcgatctccagtagtcggtgtggttcagtgcagc

SEQ ID NO: 387684 - DNA, 2492 bp, Cannabis indica
ggcaaaaaataagaaacctttatgctcactcctaagtcatagcttcatacaaaaatgcaaaaaaccaaataatgggggaggtgggatcattcatataaaattttcaccttaaatctcatacaataatcttagcaactaaaagaaataaactttacaatattgattcaacaaacaataacagttctttttcctcttcagcaataacataccaatttgaatacaagctcaccttgtagcagtgcaaagaacagtatcgcgaattgcatcgaggacaagtatactgggaaaattgcttctgacatctgaattcttaaaaaacatcatcagataaagagtaaaatctgaagaaatgagaaatgaaaacataataagttttcggtagaacatacacatggcagattattcgaggagtatcgagaggagacgacgtggagggtttatcagaggtaacaatagagtctgccatagccaaaaccttcaaaaaagaatctctctgtaaaccagaattcttggcaatgcttgtagagcataaaagtttcaacaacattttccttttttccttctttttacaaaaactaacttaagaacatgcttactatatccactgatcaacagagtataacttttgaagcaagggaccctaataaccagaggtggaatacctcatacatgaactaaattcagcttgaatttatgtcaattgggtttttcatatttctaaaaactcagaatcaaccaataatacacagataaagataaaatgtctcaaatagaaaaagggcattcttaatttcactttagttcttaacaagataaaatagaaagattcagcaaaaccccaagtgggttcaaaacctcaaatggatgaaatgggcaccattcataatgattcaaaagtacaaaacaaacttaccaaggagcaatcttgagaagcaagagccaaaagcagcacctaatttcttcaaagtttataactttaagacacctgaaataagaaatataatagcaaataacattacaaattgaattagcaataagagatatcggttgagtaaacaaatatgtactaagaactgtgttatgagtgtaagaaagagaccactgaccaactatacgataggaggaggagaagctgccgattgcggcggcggagtgagatactcagagagagaaagaaacttgttctatgatcttccagagggaacttctactttgcttctttttttcaaaagaaggatttatattataatttaaaaaaaaaaaggatttatatttatttgaaattatttacaaatacacaaaaataataaaaaaaaattacaaaaatataaatttacggaattttaaaatatttttacaatttttttaattttatttacagaaaatacggtctttttatattgtattcttgttaatttgttattaatttttggttatctgtatgttaattttagttgttgttttgatgttacttttatgtagttttttttgttgtttgcgtgttatttttttgaaaaattgttaaaatgtaaaaaaattctttaaacgtaaaaaagtaattttttttataaaaaatagtgtcttatacaattatccaaaaaaataaacccaattttgtatgcaaacctaggttaaaacgggctaggctgtctaaagaaaaaaaaaatcttttaaaaataccatttattcgtataaattataataagagtccaaaaaatttattttctcttagactcatttcaactcagtgccaaccttgagatcgagttattattaacttttattttgataaaaaaaattagttcaggatactattttgtaccattttagataatacatgatttaattcatcatttaacaaacatagagtctaattaataatttttatagaacacaagtctaaaaaaatatttacccttttatatatgtaggattataggcacttaaaaattaaaagaaactcagataatctagcactaaaataaatatgtatttaacataatttttttaaaaaaaatagaaaaatttataatacacccttaaaaagaccatttcagtaattctttatctgattcaacatacatgaggggataatcttattgtaaattttcagaaaaatttaaataatttacaatgtaaaaaataaagttcaaataatcacagagtattcaccagacatttaaaaaaaatcacgcatgtaataaaatatttaaatttaattttttggtcattataaatattacaggtaattttaattaactaaaataaatacgattataaaaaaaataaactaaaaaactcttcaatatgccaaaatatatatcaaaataacttttttttaagggcataacatagaattacctaaaagtatatgtgtcaaatttgaaaaaatgctatccaatacctccaactaatataaaaatgttatattattattgttataattaaatattaaattttatatattttaatttaataatattatgaaaaat

SEQ ID NO: 387685 - DNA, 839 bp, Cannabis indica
taaaaacaagataacgtctcctgccctaaattatccatttttttttttgctcaagttgagcttcatgacaaagttataattatacccttttactatttttgtaagtttactgtcgttgattcaaactatagtgtcctcatttagaacttgctggattcaaactatactgtcttcatttagaacttgatggtttttgtcttttctaagattatttacctaatttagcatcattacaataatgagttgtggatcttttctcttttcatgttttttctagtactagatactacatgccatttttattataaaggccttttaaactcagttacaagatggtttgggataagtcagtggggtatgatttgttagaatattttgatttaatctatatttttttagtataatataattaatggaggaagagggtatttgaatgtaaagcttccaactttaaaattatactctatttgtaaatgtaacttttcgtattttactgctcctcactcatttttgctgttgctctactttaggtgaagggacagtcattgctcatggctgaagaggtttgattggctctactatcataatattattcattaatttgacacaaaatttgcttttataaatacaaaataaaaattataagtgctattgcttcacattttcacaggttagaggacgttggtatcatttgtactctgctcactatggtgagctggactgagattgatcatttcttctattagtcaggtgagttcaaccacagttatttataaactccatgtaatctcgtcagtacaagtgttctccaaaacaatagttattttacaatcttgttt

SEQ ID NO: 387686 - DNA, 2768 bp, Cannabis indica
gttttcttctttctttcttttttcatttctctcccaccaccaccattgttttgccactataccaaccgaagtcattattgtctttttgttaatttctttattttaatatttttattttgttatgattctttagttctttcaattacaaaagctaataacataaaaaaatataatataaaagttcacgtctcagtcatcatctcaaatgtcaatgaatgtttttatagaccactgtgttgactaatgacccacacctcccaacttgccttctaattttaatggcaattcaagtcacaatactagcacgaattatttggggtcgaacccaatagaataattatttgggttgggttatgtgataaaatttaagacatttcagattcattaaatttatttattcatgattaaattattatttattttcataaaaaagttaaaaataaaaaaataaaaaattacttacaaaatatattataaaataatgtttgtttacacttaatgtcgggtatgcggggttggaagtttaattaggggacaataaatttttttctttggtatatttaagacaaagtgaaataaaaagaataactaataaaaagagatgttttagccggccaaaatgcaaaggctttttaggaaagaaaaaaaaatgagaaggctaaggctagacgatgatttggtgttttgtggtattttgatctgagaaaggtctttttattattctgtaataatgaaatggtctattataataatgtggctttatatggagagggatacccaatcttagaatacacaccaaattaaattaagaataactctatctctatactcaaacatgaaaattaatcatttaatacatgctccctcaagatgaagtgtacaaatttgtggcatttatcttggcaaataaacccttaaaatgtgatggaaaaagaggcttggtaaggagatcagtaagattgtgtttggtgttgatgtggagaagttttacataaagacattgttccacatagtttgtgaatgggttcaaagtggtcagctatgtaagaccgaattttcggcaatatggatggcagctttgttgtcacaatacataagggctgaatgtgagtgattgaccctaaagtctttaagtaaagcaagcagccatagcaattcgcaagtgatgttggccattgttcggtattctgctttggcagaagatcgagagacagtgttttgtttcttggactttcaagaaattaaggagtctcccaagattatacaataacatgtgacggaacgtcgggtatcaggacatgtgccccagttaacatcagaaacaactttaagttgtacctcattcacagaaagattgctttctgcataggccttgagttgggtagaagaagtggagtggaagaacagtccttgacccggagagccctttaggtactgaaggatgcgttgggcagcatgaacatgaggttgtcgcggagccaaaagaaattgacttaatctattaacagtataagaaatatcaggtcttgttaaggttaagtaaataagttctccaatcaaacttatatagcttgtaaggtcataaagtaactctcatgtatccttgcttagttgagtgttgggttctattggggtagaggtcagtttggcaccaatataacatgtatcaattagaagttgcaaaataaagggtctttgagagaccaaaataccattggtggacctgccgacctctagtctaaggaagaatctcaagggacaaagatctttgagtttgaacttagagtcaagctaccttttaaaagattcagcatcatcaaagttattactagcaattaaaatttcatcaacataaaccaaaataacaagaaaaatgttattagaagaccgtattaacaaagattgatccgaagaaaattatttgaacccatcattaatcaaggtggaacttagtttagcataccattgttgagatacatgtttaaggccataaatgcttttatgtagtttacatacaacattaggagggagttctccttgatgtttgtagcctagggttagagccatataaacttcctcatttagatctctatggagaaaagtattgttaatgtccatttgatataattgtttgattttgtgtcctagataaaactcatttcaatataatcagatttactaattaataaaagatcaaaaatcattttatgttgcatggttcacatgatttatttcatgattatacatatttaatgtataaattctattaaatccagaacatatagttattcatgattatagtgttgtcaacacaataaaatataatcatgattatatgttcaaaagtttaagtcccatgatttgttagtacactgaatttagactgacatgataattagcaataaagtacacttacaccttagataagtgttatgtcctttccagggcattagcaaagtatgtcagtatcggatatatggagtatacatcagattggaccaatattgaacttggataagatattataaacttaccgttatatctttctaagtcaatgtcactgattgatcttgttggattatatgttaccaagacctagatttactaaccaatatgtttttaacatcctaaatatgaatctctaaaacgataaaaattaaacacatataaagtatgagagaccttacattggttgcaacaaaattaaatgactccttccgcttagatctctaacccttgttcctttctgcgcagagtataatcaagat

SEQ ID NO: 387687 - DNA, 910 bp, Cannabis indica
gtttaaaaaatatgaattaaaatttaaatagtcaattatatgtatgtttattttatatgtgtgtaattgaatcttttaaactttatttttgatatattaaattattttaaaaatttcaaaatatatacaaaatacttgttataactataatgttcacaatcataataaaaaaattgtcgacccccccccctaccccccccccaaaaaaaaaaaaagggtccaatatatatattttttaatgtcttttaatgaaccaacctttttaagggactaacaacttgttgttggtcacttcatttcaatttttaaaactcatgtcatttcttattactgttttaagcaaaacaaaaatcaattatgttatttattattcttttcaaatttttcatattctttttttctattacatttttttttgttatattaaaatcaataataattttaataaaataatcagtaaaatatataaccgtatgataatatttaaaaatattattataaaatttaattttttttgtaggggcccaattttaaaaattacaacagagtctttaaaatatttatgatgaccagtaataatagcgatacatgattccacctaggagtgttcatataatctgcaatccctgattccaaaccccaaccaatttggaccaaactatttgagaccggaccaaatgaatccgatgtgaatgatttgatctccaaatcattttaaagtctctagttcggtcacgattttaaaaatctcggtagtggttcaaactaaagtaatctgtataattattttagggaaaaaacaggaaaatacaaaaaaagaaaagaaattacaaatatactatgagtcggcccattaaatatttatacaacacacatacaaatatttacaaaaataccacatgctctaaac

SEQ ID NO: 387688 - DNA, 890 bp, Cannabis indica
aagtagcagggaagaagaatccatgtccaagacagctcttaatgtactgaagaactcgttgagcaaccttcatgtgagaagacttagaaatagcaagatacttacttagcttgttgacagttaaggaaatttctagccgagtaatggtaatatactaaagcttaccaacatttctttgatacatcttgggatctgccagattatcctttcagcttgacaattttagatttccttacataggagtaataacaggcttgcatcccatatagccaagatcttcaaataattgcaagtcataaggtctttgggagatgaagatccctttggtagacctgaccacttctaatccaagaaaatacttgaggttgccaagatccttaagctaaaacttattgttcagcttgactttaagagcctccaaagcaactaaattgttgctagctaatataacatcatcaacatggatcaagcgaatgataaaagcttctttggtttgtcttataaacaaagaatggtcagtagcagaatggtggtgaaatccttctacaatcacgacagtagaaaatttttggaaccattgccttgatgcttgtttcaaaccatataagaatttttgaagcttgcacactacatttggaggaagtgtacccgtgggagtatacactggaggaagggacatataaacttcttcatgtaaatccccatgcaaaaaggtattattcacatcgagttggtgaagataccaaaccatggactgctgcaagagctaaaaaaagcttaactgtaacaaattttgtcacagaagtaaagttatcagtgtaatgtatgccttcctgtttatgtaacccttagccacaagtctggctttaaatctctccactgaaccatca

SEQ ID NO: 387689 - DNA, 2186 bp, Cannabis indica
ccgattctatccaatatttttcttctaatctgatccaatcctattactaattagatttacataatcatcattcgatccaatccaactatacctcaaaattttatccgattataccaatgattttcaattggattggatcaatattttaattagatatccaattacaccattgatttttcaattggattggatcgatttttcaattcgatatccaattacaccattgatttttaatattaacttaaaaccatgaagaaaaatgcatataaatttaaattgcacctttcattttagtttaatactccataaagttatcatccttacaaatttgatgcaactataagtttgaataaggatcaagtaataaaataaaatccatccatacggaaattatgagtcccccccaaaaaaaatacatttgaatatgctctgtacaacttttgaatatgctctccgtacaatttagagaatgaggatagtgaaacaactttttgccaggacgggtggtggtgtgcccaccacggtacagtggctggcagggctgttgtgcagctcatgggacacttttctagtgtctcagggttttgaaaaccctatttcctacaaaagagtgttgtttttggtattagggcctacatcttttcacgacagggctttattccccaatattccttactatttgcttgatttggcggctgagaatcttggtctgagtttttttccaagtggggataaggttttattgtttcaacaatggcgattcgtctatttgacaaggagatcgttaactcagtgagtttagaggagacggtgaaggaggtggagaatttttccctggatgatttctctctggatttagcggctaattgtgacgcagcccaggcgacgattgcaagctcagtggtgggtcggttcttctcaaaagaaatggtatcaaatgggttgctccgtaaggttttgactaggatgtggaagttgaagggtggttggaggttccaattggtggaaagaaaacgaggacctttgttttccgtttccacttcgaaaaggaagcaaagtttgttctagattcccaaccttggaatccctgtaaaggattcatgttagtaactccgatatcgatgattgggaagtgggcttatgcggatttaaccagtttttcgatttgggtgcgagtgatggatgtgcctaccaagtttttgaacaatgacgtagtagtgagcgtggcgaatagggtgggaactttcattcaggcaaacaaagtaaggtgaaggggtattcttctaaaccacttcttacgtttccaggttcgtgtctctctgcaaaaaccgatcttggcagggttcactcttccgggggagggggaaaagaaggtttgagctacttgaagtacgataaacttccttctctgtgttacaaatgtgatgttattggccatgaagattcaggatgctcaaggaggaaagggatggtgatcctggatgatgggaggagtatttctttatacggtcctcaactgaaagaaggatctcgcatagagaatatctttggcctgcttgataaagaagatattcaagagaggaaaagacttgaggaggaagaagcagagtacgtggctaaaacttagatgggaaatgtgagcccccggagaagaaagggagcaatgaagctgtggaagaagaggcggaggtgacacagacttactgccccatcggagttggagtggtgattcagaatagttacaataatttctcagtgaggatgaatgactatgctaaggctccaaaggaaagagcacacacagaaaatgttgcacagatggccaaaattttcaagaacgcttttggagacactatttttgggagcacagaagggtctattctgaagggatccaaagggaaagcaaaaattggaagaacaaatttgaagtaggttggacctaaagggattcctaaaaccctaattttcagggggaaggatgagggagactcccaaagggtgcgggcaaaaaggaagaaaaccagtcatgaaagtagtggtccggagagtgacatgacacatggaggagagtctagagacctgggaaataattttgaagtacaagaagaaggaggtgctcaagagtgcgggaagaggccatgtgttggggatacaggaatgaggaatgatatagagttacagactgt

SEQ ID NO: 387690 - DNA, 1410 bp, Cannabis indica
ggggtgttaacaagtcttagtccgcgaattaatattattacgataagactggaaaattattataatttacacaagtgtttgaacccctaaattttgcctaagcaattgagaaatgagattctaacactttgcttgaacaactgttcttatatatacagtgctaagattcttattcgttttactttgcctactgatggggtaaatacaaataacatattgacttggcttatctagtggagcccgacccatgaggtgtcaactgtatgctgatgtggatgccacataatgttgatagttgtcaaaactatgtcctactttcatggagaataaaaacacattaaatatttgattgtcaattactatcttttcatattggaaagatatgatcctcagacgagatcttacgagttaagtcctgatatcatgagatttaataattactagatgcgatatggagctagatgtccagacgtttgttgactacttctccggacgctccaaatgatctcattcgaattctcaatgtgctggaggattatctcacctagacgagtcatctgttcatcattcagaagagttgatttcgctaatgaatctagtccattatcttggttgggccttctattgaatctaaagtgactgagttgtaactggttttgaaaattacacgtgtcctcattcagaaacactgctaatagtaaaaataaatcaaaatttatacttatcttatacgcttagctataaacaaaagtagaaacctgatcagcggggccattgtataaatatcactctgcttgtacgactacacaatttctaattttggtactagaaaaaaattataacttaattttttttatgtgactgtatttttaataaaaaattataaatatttacaatgtcaaaaattggttacaagcattcagttgcatgtaccttttttttatgcgtgtaacttactattttaattttttttttaataaaccatgcaattttatgaataacaatcaactaaaataatagtttgcaaccccatcaggatatctcctccattggaaatacgactaagattagaataaaaaaaacgagccaaccaatcagtcgcttgattcctatatcgtttgataaaagaactaaaataaaatcatgtgaaaaaaattgtagcatattcaatttcctccaccgctcaaaagatacaatagtataaattgttgcagcatgttcattcaacccattgacttgagcactcaactattgtgcaactgcaaggtacgtaactccaccattaacgaccccttcagtcgcagagaatttgttattcctgatcactaatagtaatttaatggcgaaccttcaaagaacaaagaagacgaaccaacaacaaaataaaaaaaacatgtcacagaaacaaga

SEQ ID NO: 387691 - DNA, 652 bp, Cannabis indica
ttcaccgaaaccccaaagcgaaattggaaattttattcattcaaaaaagaaaaaggctaagtttgagggaattggaaggagacctcatcaacgggagtgaaccatctaagatgaaaccttggaactgaagagtcggagtgagtgagccgagtcagataacaggtttcggagatgttgaactcggccgccacggatcgcaaccattgctcgtccttttcttcctctagcaacaaaacagcagctgggtttcccttgaatgctgagtcagtgaaagcatccacctgtttttagatcaactcagacctcattcatatatatatatatttatatattatatatagcatatggagggagagaccggaagagagagagagtaccacagagtatttgacggggttctttgccattttcctgaaaagaatgatgaatgagctttgtttgtacaaagtaattgcaaaggagtaaaattaatagagatggagattgatagaaaagagaaaacatgtagttcagtttcaacttgtttgagttgactaatgtgattttattgtaaaaaaagctaactaaacaagatcagacaggtggatatcagtggcatatttttttaatcatttttttttgttaactaatgtaaattttttttttttttgtt

SEQ ID NO: 387692 - DNA, 965 bp, Cannabis indica
ctctaaagctcagatttgtagtagtgccctgatcgagaaacgttatcagagccaccaccataacgaacctttcgtcctcctccctccaccattggtccaccaccatcgcctctcactctgtcgaagatttgtgaaattctttcttttctttttcaacttatctttttcgtctcatatatttttttgttcgtgaatttttttcttcaagtttttctttttggctttttgtatgtattgttttgaatttggatcgtatttgtgaaatttatgttagggtttttgttaactttggttactactttaggttttgaatcacactgattggtgttgaatttggattgaaatcttcgaatttatggtttaatcttaaaatttgagaacttaataatggttatagtgtaacagattgtgcaaaattttgttggcaattcttcttactattgtcgatggttttccaatgtgagtaaaacgttctaccgatgattttgcaccaatgcatattataccgagttttgtaatggtcgaataggcgtggatcttttatttcaagattaatagttctcggattgcaatattaatccataaatttgattatactatatgcgactgtacgattttcaaattagatttcaatctaagaactgtcaaaatttctttatataaacatatcattttcatatgatttgataaaatcaattaattgtgttgtattactgatcatcatacatatattttatgatgaaatacgtattgatcatcatatatacatataaatagatgcagttatgtatggatgactggtcctgtattcttttatttttttttctatttaagtgatgagagattaagctaaatataatattttttgtgtcccaaactaaaaagtaactttctttaagatgaattagttatctttttataaaaaaacaaaaataaagaaagaaagagaggagtaagttgaaagt

SEQ ID NO: 387693 - DNA, 504 bp, Cannabis indica
ctctctctctctctctcttgtcagtttccagctataccttgctccaccgtcaaccatgggtcctatagctggttcaaaaattcaaatctcgtagctcgagttcgctctgctcaacttctccctctcttgtcttctcgccagaatcaatgcagaatcaccgtatgtccccaggcttctcttgcgagaagacgagatctatgacagaagaggccaaatttagatgggtttggtaaaatgaaggtatacagaaagagaagattataaaggtatatatagagtgcttgatttttttttctttgagcattttttcttctgtaaatataatattgaataatgatgaacatatgatggaatgttgctatttatttgtgtataaatttgagtatagtcttgtaacatccccactgatcaagtctccattaggttcttacacccacagaataatgactcttatacacaagtacgtcattatggatgcttcatggactgatgactgaccctaca

SEQ ID NO: 387694 - DNA, 961 bp, Cannabis indica
acaaaaataagaattaatattataatgactttaattatatatattatcaattttgacgtgtttgtcaacaatattttaaaagaatgtttaaagtactattcttaatttaattatctgagaaaatatacaaattaataattaaaaaaaattgaaaacaaacctctatagctaaattcaattaaaacacaatactataatataaaaatatgctaatttaaaccatattttctatcgcatcacgatcaattgattttgtagaagcttccttacaagtaacaatgtatacattattcacacgaagacgacatactggacatatttttttaattcgagtccagtcattaatgcaagataagtgaaacacatgtttacagtgcttcgtctcaacaaccactttatttatttcgaataatcgttccagacaaataacacaatcatcatctttaagattatccctggtaacattatgttttctaaagaaacataatagtttgataatgtgagattgtttcgcatgatcaataactattattggaggttcttcaccatcacagcagcgatgatcatcttccatgcacatggacaaccaaaaagcaaaacacactggtatcagtatgcctataactaatagaaacgtaagtattatgttcgcctcagtaacaatatccatgttaattttgttgaactcgatcgatgttaaataacaagattaagatgatgaaattctagtatgaaaattttgtaaccttaattgtattgataatgtaaatatatagtatatatttcattcctaatcttaatcttattagtataaagtgtcttaaatttctagatgtattataaatctgataaaaaaagatagaaataattgatattcatttaaattgaagtaaataatacagttaatacgtttttttttttaattattaacagaagtaattaattataaaaagaaaaaaaa

SEQ ID NO: 387695 - DNA, 1307 bp, Cannabis indica
tgaaagaagaagaacatacaaatttcatgtacatgtgcacattcacattttatatgcgagagtttaaataatgtaaagttctttttttttttaaattattattatttgtttttttctttgatagaattacttaattaaatattaaagattattatataagttactattttttttttatatttttaatgtttaaagattattattattatttttttatataattttacggtattactataaaaataacataaaaaaaataacttaaaatactacataaaagtttaagaaataatatgcaaataacatacaaaaataaataaaataaataaatatataaataacattacaaataacaaaaaaaaattaacagtaaattaacaacaatacaatataaaaatacatttaaaaaattatttttttaataaataaaattataaatatcgtaaaattatttaaaatttcgtacaaccgtattttttataatttttaattatttttctgtatttatagaataattcttaaattatatagatttaataaattatggcaccaacccgcatatataaaacatgtttaaaatcattttgatcataaattatttagattattactcaataatttataataaatttaagaaaattacctcatatagtattttttaattttttaaaaaaatttaaagtttgagtttctaaagtaatttctttgtgggcatgctatccaatttttagttgtaatttaagttgttctgctagttgcaataataatttctatgtagaattctgtaaaatataaaagaaaaactattttaagtgtaaaaataaaaaacccataaatttataatacaatatcataaaaaaattagttacaatttatttatatacagcaaatacatttatcattacatttattatagtgtacatattgaaatttgaatttgattacaaggagtcggttctacgtaaactttgggagttcaattattcaaagtcaataattactacaattaaataaaataaatgaggatagtaatcattttgtacacgtaatttttttatacattaaaaaaaaggtgaccacacataattttgtacactttttccctagaaaaaatttcaatgtacacgtgatttagtaatttttggtatagagttagacatggccacacaaaccgaacacgaattttatgagttctcttagagtagaaaaaattaggggaatttttactaatataccaaattcacaaattaatattacagttaccgaataaaacaaaataccttatatatatgtatatttctaccgag

SEQ ID NO: 387696 - DNA, 1940 bp, Cannabis indica
tttttttttttgaaaagaaaagtttagtattaataaaaataaaactaaagttagtgttgattatggttataaattttgtcatctgtgaagctgtattactccaaaaaattgttacagaaagcttggtagtcatttggaagttttattagtaaagttgtggcaatttggatggaccttatgtgagcttgtttttcgtagttgtaatgtcttccagatagcttgttgtcaacccagagacgtattcccaaatagcctattgtcaatcacagatgtttatccagaaggagcgctatacgtattcggatagcttgtccgtattaaagctttcagattgtttgtaataaagtgtgttatcaaaactgacgtggattattgttgttggtaatgagttggatcatttaaggcagtgtaaatgtgtcaaggtgatttcataaatattttttggcaacagtgtaaatttataaataactatcaatctttgtaatttgtatgagtttaagaccattattgcttgagtgaaaatcgtgatagtgtaaggttgaatgagagagtctaaactagagagagaaacttcttctcgtaatctctcagagtttgtaaagattcttgtaaccttgtaaacactgatatcaataaagatatggatgctgctgtttcgaccgagatgtaaagcattcacatggctcaaactcgttaaacctggtgttattctattctattttattgttaaattcattaattgacttatgcgatctcttgatttattgtttcttgattgtattgcgtatttgttggtctggtacactgaatcgtaagtcactgattatttctgtttagcacaacaaactggtaccatagcaagttttgtaattatggttgtcgcaaaatacgatgttcaaaagtttactggtacgaatgactttagattatggaggatgaagaggaaagctttgttggttcaccaagggttgtatgaggctttactaggagagaagtctcttcctaatttgatgtcgaaaaatgacaagaaagagactcttgcaaaggctcatagtgcgatcattttgaatcttggagataagattttgagaaagattgtaaaagaagatacagtcgcaggtgtttggctaaaactggaaagtttgtatattactaaattgttggtgaatagaattgtaagcaggtattttctttctacaattgatgatatactacatcagtatatctgaactgagattacttatactaaagaacgggcatcagtgaaccctactagcaaccattgattaaatatctaaaattttattatgttgctaactgttttattcatgggtaagtggtcttaattctccgtacaactacattgtcatagcctcatatatgaataaaaaaatttctgatatttatatataaattattcaatattaaatattaataatttaacattcatgcatatatcaaaatgtttaatttttattaataatcaaaaatgtctttatagattattcagggcataaaccctaacagttcaacagaaccattctagaaagagtcaagtgcatgttattgagtgttggattgcccaaaatgttatgggcagaagttgtgtgcattgtagtttatttgataaataaatgtccgttaacatcactagatttcaagatgctagatgaggtgtggtcggggaagccaacaagttattgttgagattttatgccctaaataaaatccattttaatataataaaatttattaattaataaaagacgagaaattattttatgttgcatggttcacatgattactttcatgattatatgtttaatatatgaattctattaaatcctgaatatatagttcttcatgattatagtgttgtctgcagagtggaaaataatcatgattatatgcttctaagtatttagtctcatgatttatca

SEQ ID NO: 387697 - DNA, 900 bp, Cannabis indica
acatatagagtccaacccgcacccttggagatatttggatcaagtcattcttctgagattgttgctacttgttcataaggaaatccaagaataaagtaagcaagggattggccttttatcgcgaatcgcagtttgtatcaaatatcgaattggctgagctcattttaccatttaagaaggcatccagatgtatcgagcttggccaatacttgtcaaagaggataattagttaatacctcaattgtatgagcctgaaaatatagttgtaacttccttgaagccacaatgagtgcaaaagccaatcattccatttttggataatgggattctaggtcgagcaaatgtttccgtaacaaacgggatattgtctaccttggtcttcatgagtgagcacttgattgcatagacagacactgcgatgtagattgacagtacttctccagatagcatcttatagagtattgggagtttctccagttgcgtttttaaagcctgagaagcctcttcgcatttgtcaatcaattgaaaaaatttatttcctttcaaaatctggaaaaattatttacatttattagaagatctcaaaacaaaacgatttaaagagggacgaccttaccagtgaggctttgagcttctttaggcttagaaggagatcgcatatctactaatgtcttgatttttgcagggttggcttccactactacaaaaggtagaattcgcaacggttccaaaatactttttttggggaccatcgctgaaaaactattgagtattgaaaatcgttgccaatactataagcgatattttttaacactcgtatagattaggcgaaagtttataagtgcggaaaaaattaataaaaaaataatgcactattcccgacggtttagaaccgtcaag

SEQ ID NO: 387698 - DNA, 648 bp, Cannabis indica
cattcaacctaaaacagacaaccgacttctaaagaattcacattctgactcaaagcaacaccataaaaggagagcaggagtttgaatctttcacaagccaaaactgaagcattcagaaagaacaaactgtcataaaaaaataagatatgtcaataattttccctgaatgaccacacgaaattccacacaagagattattatcacaatcccgattcaccaaagtcgtcaagtctttagcacataatgagaataagtaaggggacataggatcaccctggtggaggccctttaaggatatttagtaccataaataccaccattcaaaagaaccaaatattccactgaatagatatactccacggccttaccaatccaaacatcatggaagtataacttttgcataatattttctacaaaagaccactccaccgagtcacaagctttggacatctcaagtttgatagcatagtaccaaccattactgtgtttcttctcttttagaatcttaatacactcaaagccaataaaagcattgtcggtaatcaatctaccaagtaagaaagcaattttctcaataaaaatgacatcagataacacttccctcattctattagtcattgctttagtaagaattgttgggttttatgc

SEQ ID NO: 387699 - DNA, 947 bp, Cannabis indica
cattgaccttgaattctcttcccaatttttcatcttccaccagaatagccccgaaaggatacacttccgtcaccgcaaatggacccgaccaatgggacttaagctttcccggaaatagcttcaaccttgagttaaacaacaacacttgctgatttttcactaaaactctttctttgattctaccatcacgccacttcttcatcttttccttgtacaactttgaattttcataggcaaacaatctcagctcatctatctcaaacagtcgcaattttcgtgcctctccagcaactaaaagatccaaatttaggttctttagtgcccaaattgctttgtgttccaactctacgggaagatggcatgccttcccataaactagtcaataaggagacatgccaagaggagttttaaatgttgtacggtaggcccaaagtgaatcatgtaaccgctgggacaaatctttgctgctgggattcaccactttttcaagaattcctgtgagttctctatttgaaatttttgcttgcccgttgatctgtgggtgataagctttggctattttgtgcttcacaatatacttggctaaaagggcagccaagactttgttcacaaagtgcgtcccttcatcactaatcaatgctcttggcgtcccgaatcttgtgaagacatttttatgcaaaaatttcattaccaccttagcatcattggttggactagctattgcctccacccatttggacacataatctacgaccaccattatataaaaattcccaaaagatggagggaatggccccataaagtcaatgccccaaacatcaaacaattcaacctccaaaatgcaatttagtggcatttcattgcttggcgaaatatttcccacttgctggtagcgattgttggattttatgccctaaataaaactctttacaatctcattagttatc

SEQ ID NO: 387700 - DNA, 2710 bp, Cannabis indica
ataatgggggtccaagagggaccaaagcaaacctacgagccaagctgactttctgagtgagaaaaaagaaacattaaaaatgtcaaaaagccataatgaaacagacgtagaaaatgaaatcacaaggttcttaacatgccaatcatcatactactaaaccagtataccaagttggtgccggggataaacgctaacacttttaattggtttagctagtatcgactaacatacttaattgaaagacctgaattaaaattagaagaaacaccacataactgcccccctccccctacccccaaaaataaaataaataaaaattaacctgcaaatgcacaacacatgactgcacggcaacaaaagcttgtttgaaaatttcaaaagagaaggcttcagtaggaatatcatatgggtattgctgaaaaggcaataaagaaaccccagtatgtcaaaacattagcaaactaaataaacgtgtgtataacaaattactaattacagtatatgtaaataacctgaaaaagagacccagccataaaccacacagtgtcaagctcgtcatattctcttttaattccttcagcccttgcaagaacttcagcctgattcaacattaagtcaaagaaggcctaaaaatctaaaacagcaaggcctccattcaatttacatacaggtagaaagtggtagcagcatttattttacaaagaagcagaaactaccttagtgggactgcctgtcaagtaatcaagttcatcttttgaccacaaaagaggagattccacagccaactgtcccctccctcgctgacgatcaagctctcttatataagggaaccaaaaagacttttttccttgcttcttttcatacatcaaatacaaagccaagcatgccagctccgacaatttattcgtagttaacaattccgctgcaacacgaaccaataatttaatacaagaatgtctccatttcgttaatgtatatgttgtcatttcagaccatacttagaaaatccataaagccagacaaagaaagtcacgatctcaataaagagacaaaatttaggataaagtaacacaaaacgaatgcagcttaccaattgtttcgttccccaatactctctcaagcgttacgactagggaattgggcacagaaaatgctatatccccaatctgcagatatgaagtcaacaaatttcatcaaagaactaataaattcgaaattaatacaaaacaaataaccaaatagattataaaaattcacctgaagatcttcactagcagcaacatagtgaataggtttatgcttctcgttaagggaaggcctatctttaagcacaaccttacaaggaggaaggccattcttgtgcatccaagacttcaaatcctcctcatcctctttcttgctggcaacatcacgatacttcccgtcctcctccttccgcgacccggcgaccaacgtatccgaattagacgcaaaacagagatttctccggcgaaaaaatgacggagaagaagaagtagtagcgggaagagtaggatacttccgaagtgaaattgatacggtggaatgaaccaagagaggtcgaatgggagaggaagagcgaatcggagagcaaatgcatctgtcgtataaagaaccaagttccatgtttaggtttttagggttttttggggttaaagttttgaagaagagaagagagtaaggtgaagcagtgtttggtgggtggtggtgttgttgtagttagggaattttgatgattttttagagtgattttgattgaaattgatatggtgggtgtgtttggataagacacataaaattgtgtgttttttagtattacttcattacttgtgcctgattggagggaaacaaaaatcttattctcctttttttattttttatttttttatcaagaagaagtaaacttcattaatctactcaacaaatacaagcaactatacttctcttagagaagcaacaaaaactcaaagataactaattatacatcaaattatgaactaatttcttcttctccctagagccttttctatctttaatcaacaagagtctatattttacatcacttttaattttgttcactatacaattaatagagttagaataatgagaaaataagcaagtatttcggttgctccacaagtgataaagagctgttgcaagagttagaactcttattttatccttcaaacccaatcttgtgatgcccaaccaaaccgtccaactatcaaaactcttagaccacccttcaaagcccagccagagaaatatgtgggacaacaccttttaagacaatatacatctgaaaaatatatggttgtggctctcgggttctatgtcacaaaccacacagttcttattagaaatagagatgttcaaacggcataattgatccctagttaacaatttggactgaactgcttcaccaggttgtgttcccggcagctggagtgaacttgattttttgaaaacttaatatttatttatttttatttcggagtaatttgtgatataaataaataaataaatatttaattttaatttttgacactaatatttatgttatattttttggaattgggtaggtaattggtcgtgtcaactcaatgttcacatggaagattttgattggtccttgtaattaaatttttattttttatttaaaaattaatttaaatctatcaataaaaaaata

SEQ ID NO: 387701 - DNA, 1649 bp, Cannabis indica
ataattgtaaagaccgcctaagttcaatatactggattattaaataattagggttaattatgatattgaattattaattatgatttacatttatggagatttatttaaatgtagaatgtattaattatgttatatatgtgaattccttgtttctgtatttgtgttcggtagcagtggaatgcgacgttgtggcattagagagtcatacactcatatggtttaagatttttctaataacgagacattatggttaggttttagaagtgtcggggatagtcgggaaattagaatgaccaaattacccttggaagcctttaaatctttgagttatgcttagggggcaaaattgtcttttcctcttaaatcctttgtccttttatgggattgtgttaagtaaaatctggtttttatttaagtaaaataaaaaaaaaaaaaggatatgcatatgtgtttttcatgaagaagctagaaaactcatttccattcaccaactctttctctttctctctcgaagcttctagaccagctaggggttgtagattttttagttcaattcagtgaatcttagcaggatttgagagcttcacatcaaggtataacctttagtctctcttatcttggctttcttaagattgagcaaggttttaatgtgtgattttctaggttatggttatgtgttgtgaagtaatgtttgagtttgtgttctagagttaaattgaggttgtttgagctgagataggttgggttgcttggctgtagtggtgatttggcactttgacctctaatggtgaattgaggttctatgtataaaactgaggtttattgcttgaatttaattcattatagtatatacatgtattctggaagttattgtggagtttagagttgaattgaagtgttggggacactattggtggttcttgcacttaactggtcgaccggttcaggggaacctgtaaaaaccattcgaccgattggcccacaagaaaccccatcgaaccggaattccggttggggaactagtctacaaattaggacaattttggaaccctagtttttcccatttttgtgttatttagggaatttccatgttattcatctatagggatatttctagttttgattttaaatccccaaaaattattttagcgtgtctctcaaagtaattttgaatattgtggtttagggccctgtaaagcgtcgagctgcagttccactcaggttgactagcacacctgagcaaggaaataaggtaagatagcataaagtatatatatgtgaatgtatgtatgttattatttgcttacactactagcactgttaaagatgtagctataagggtgttagtacaatgtagagtcttagggtagttacagtgttaccaacacgagtaccagggggtacagagtgcgtatggtacaacactcagtaactcctagaagtacaataatggccctaccaacacgagtacggagtaagtactctagtgcatatggtaaagtggtcatactttcgttgaaaacgttcttaaccattgggtgagcttagcaattgggctcaggacggcttaagcttaaagtcgcgatagcattgcctatatatattttaccaggatctagatttactaacaagtatgtttcattaacatc

SEQ ID NO: 387702 - DNA, 999 bp, Cannabis indica
gtgtttagaatatggatagtcaatatacaactcgacaagtcacgttcaagaaattaattaaataacagaagaaactgttattacatttattttattaacatttatcttaattaatgggtataattaatgtaataaacggttctatctgactggttatgtaaaatcaaatgacacttgctttctatataaagaagtgatctgaatcaaatttgatagtctaccaaaagtagactaagtaggcaaaactctgactgaactactatacttctctatctcacttaccttttactgtctttttgtctatttcatagtctaatttttgagtattcgctactctaagtgagtacttacatatttgcaagtgtttgtttttggctctactcgaatactcgttatttttggtgttgtccaattttctctgacaagaatagattttaaattttagtcattttattttttttttcttttttggataataaattcaaatttgagacttggaagaagaagcctaaaatcactaagctaatatacattactattagagtaatttgcagcataaatatttaagtttaatttctagttgtaaataaataattaagtttaatttttaacagtaataatacataaattatatttctgaaactccataagtacctgaccgttaaatacgtaacaatttatttaacacttaccatctaattactatacaagttgtagaattataattcaaggtaatttgcggcaaaacctcctaaagtggacaagtttttgcaactaaccccctaatctaaaattttggtggtaaaactacctaaaccactagtccgttagcagttagccctttccatccatttttggttgtaagtgccaggttggaatgtccacgtgtacacagtgtacacgtggcacaattttattagtccacgtaaataaatatataaaaaaataaaaataattcattatttaaaaaaaaaataaaaaaaattaattttctttaaa

SEQ ID NO: 387703 - DNA, 523 bp, Cannabis indica
agagagatagttatatatttttataagtatagtcacttacatacataaatgatacaatacctatatgtttttaaaccatgtatcagagcatctctaatggtacattattttactaaattggtgtggaattttcacagtgtttcactcaaaaggcacattaaattataaaatagtctgttattttagtctttaaattaaaatttattataaaaaataataaataatttaaaatactaatatatttagaagtacaaaataataataacagaaatactaatattacataaaataaaacaacataacactaagttataaaactaaaaaaaatatgttattgattttccaacacacaagtatgcatatcatttacacgtaatagacttacaagattaagattgatccacaatgactataattaattacaaaacaactaaattcctaattctatttagtgacaataaaaaataagaaaatatatttaatttctactaaaaaaacaaagaaaacaaataattaaggtgaa

SEQ ID NO: 387704 - DNA, 2050 bp, Cannabis indica
cggggggggggtgttgggtttcatatcagatgcttttgaggccaattttgctctcaaaatagagatctatgcggggatcattgccattcaatctaccggtgagaattagctttcaaaccttgtatttttttggattgtaaagtgttatgtgatgccacagttagcagaatttggccaagttgggaggcggcttactggtgtgaggttctatttaaattattctttttcacaaactattttttcaattggatccctagacatctcaatgttgatgccaatgatttagcaatttgggctagactttcgggtacctcgattttttcttttaagagggagttagcacattttgttgctaacaacttctatgtttctgtgttgaataaaagctttactattagcaaaaaaaaaaacattaaatgcacattttatggctcttgaatccaacttgattctatttaatttggtcttcttacaataagtaagatactctcacacactttagagtaacttttattaggcttccttcctctctaactcatatgaagatatctcattcttcttcataggtattctattaagaatatgacacacaagtaagagtacatattcttacaagttggaattcaactttgagtacacaattatagaattgacatttcaagaaatattttattctttcggttataccatatatatatttagagagaaagatatacttcagccatattattattattttcaaagaaaaaaataataatagaattgcatagtctttatcactagtttttctttaaatcaattcattgattctctggacccatcatttcacttcattttgttgttttctagtcttggacaaaaagagataaattgtttaaagaagaaaacagaaccaccgaaatttaaaaataccaacgcagctgataaagtcgatattttcttccttgaaaaatgctcagaaacttgttttgaatccaaaatgctcccattgtcatcatcaatgtgaaactatgactcatgtttttttcctctatgaaaaggcaaggcttatatagcccatgtctcagttccaattggattttatggcagcattccatttccatggcagtgaattattccaatttttatgcttatatgatgaccaacaaatggagctgttagcctcatgtggtatacttggcatgacagaaatttcactccatgggactaagacaaagccagcaacagtcatctagaatgttgtgaatgctagctccaatctcacacactaaggatgctcaaagaacaaccgacaacataccttaaagcacaggtaaatttaatgtaccggaacacaagtacaagtttaaaaatgtctaattacaagtttaagcgtagtaaactaaagacaaatggtatttatagactaaacctgctcaattttcggtgttttatgggtttggttctacattgataataataataaaaaaaatcttatttacactgtaagtctttaaatcttataaattttgacaaatttatttctgaattacatttttttgccaactcggtccctaaaaatgtagaataaagaaatattttttatatttgacaagaaatatataaaaacacatttaaaattaacaacaaaaataaaaaaacattactattatttaagagtagaaatttaatgttgctaaaaatataaaaactttgaaattgatttgctaaaaatattggagatcgatttaaaaaaaaaaaaaaaaaaaaaaaagatccaacaacgaaacgtataaacgtaaaataaaacaaagtgacgtttagacgtaaccaagtcaaaatgaattaatcaaatgaaaaagaaagagttacacggcaattatttattggaggaacatggatattctactatgtaatctttttcaatagaaaattgttaaaaaacactagtgcctaacattctcatcgttgtaatcctgttattagtgtaataaatattgagttccatatacttaagaaataattttaagaataattaatcgtaaagtattatctatagaaagtgttagac

SEQ ID NO: 387705 - DNA, 1055 bp, Cannabis indica
atctaggaaacaactcaaacacattcagatatgggttaattttaggaacaataatcgtgacataaaactttgtcactgttatttgtgtttttagatagggacacatgtaattccaaaagcgattacagctcagatactttgggcccagcaataggcccaaataaaataatggaccagatcgattattgaagtcaaatctcctggatgacgaacgtatgaatcgactaggcaaaatagtcctctaaagcatctcacatctaaaaagactttaggcaaagcgtctggagaagtagtccataacatctggacaatccagctccgtgtcatactcattaataaccgtatctcacgatgtcaagatttaactcctaagatcttgcccacagatcgtatcttcataatatgggaaaatagtaattaagtatcaagcgtttattgtgtctttattatccatgattataggacacgaattggaaaactatcaacatgatgtggcatctacatcagcctacaatcagtgcctcataggttgggctccactaaatgggtcaaattcaatatattatttgtatttatcccattagtgggaaaagggaaacgaataagaaccttagtgccataaatataagaacaaaaatccatgaaaagagttaaaatctcactcctcaattgctcaagcaaattcgaaggttcaaacacttgtgtaaatcataaggctttctagtcgtagcataataatattaactagtggactaaggctcattaactctccaaccatgtaaaaactctggtattatttctttgttatttatctatttctttagcttccatttatattttattgattttcaaaaatttcggtaaatattttggtgctttcattgagagttcaaaaaagcagtgtgataccatcaatggctatatactgaaaccatggtactcactcgaaacaaaactagcagttgtgatggagatactcttgtagacatcatagatcctactgttgggttttatgccctaaataaaactcatttcaatataatcagatttactca

SEQ ID NO: 387706 - DNA, 1054 bp, Cannabis indica
tctaacacgaacagatacagaaaatataattagttttgttataacacttctagatcggattattattaagttttattttgaacaaaaaaatcagtttatgatcatatttgtactatttgggaaaatacaaagttaattttattgtttaacaaaacagatagtccaattagtaacttttttttaaaaaaaaaaaatacatttttttaacataattttaaaaatcacatttaaagtaaaatataggaacgataactaaaaaaacttaaacttctctaataagtacataaaacctatgtcaaacaaattaactttatatatatggatatagaatattagtctaattaaacaggttaatttcccaacaaacaagtcttaaactctttttttaaaaaaaataaaaataaaaaataaattaattaactaataattaataaaaccctagctagtgcaatgatgaaatttttgtgaaggtttctagcagcctatgtaagatcgatgttgtggtgactattatgaaacctagttagctattaatatgttttaattaatttttatttaattactagctagggtttaaaagttaattgagtggaattttttttaataataaattaaagaaaaaaaatctaatgttataaaatattgctacatttacttttgaagtgcctataattagctgatgaaaaattacatgttaattctaaaatttctttctgggttccttttttaggagccaattccttttttatttttgaactttttatttataaaaatattttttcagtaaatacaataaactatttttggttattttatagttatcatacggttgttttatattttatttttaattgtcgagagattgatttcttatttgtttttagcatgttttcttacttttttgctgagaaaaatatattttttgtaatcttaataattttaaaaagtatcttcacaaataaaacatttaggtcttaaaattttaaataaaacataaaaaagagtatttttaacttatgtaattctaacattgaacttttgttaattccacaat

SEQ ID NO: 387707 - DNA, 2278 bp, Cannabis indica
tgtcgccttaagggtcgatgtcatcccaaaatacataacttcttcttatcttactcaaaaggtcaaccttgagcaacaatatagacaaataccttccttagggggacaaaaaacaaagctctctccaggctagtctatactccctcggtgttgactaataatagatgtcataggttacattgacctgtactctttctcttgctcactattttaggttaatgtgtttattttatgaattcttagaattaatataaattaacgactttaataattatgattaagttctctataataaaagccttaaattatgaataagtttcttatcataatcataaaatctgaattaactctttaattaataatttaaaactattttcaattaataggttaattttaaattatcagttaaaaatagttagggtgttacataaggataaaggaatttaccgagaggctatgagatacactccttgtaagcatcgccccagatccccattattgattaaatcccattcacgggggaggagagcctagaaatgacgccagcgtgctgcaccaaactctacagtgtattccggctaggtttcccagccttgataagcagagtttcgagggcttggctcaaggaggcagaagcttgagttgtcttgggagttggctcgtcggtacgtgcaggggccagaggaggagttagatcctgagtctcattttctaggacctcgagattagcggtctgggaggctcgcttcttgtgagcagtagtcttgttgggcctttttgggggctccacatcgacatttgatggagcctccgagatggtcaacctcttctttccccttttgtgtaggagaattagttaactccaaaaggtgagttaggtctataccaattagaattgaaggttaagagttgagcgttgatctaatggaattgggttgagtagattttgacaatattcttggaatgatattttgtctaaatatgctatttgtatcgattgtaagttgaagatgatgatcttccattcagaagatgaagaagcatttatttttgtggattagtttagggatcccaatttctaaagattttggcattgaaagccaaggacttgttacaagatgggtatctagtgtttttagcggtggtgttggacaccacttggccagaagacattaaagtagttcaagaatttctaggtgtgtttcttgatgagcttttaggtttactaccacaatgagaaataaactttgtaattgatttagcaccttcagcggagccagtttctaaagcaccttatagaatggctcttgcagaatttaaagaattaaagatttagcttgaggggaaaacagtcttccctaatattaatctccgatcaggttaccatcagtttagaatctgagaggaggatattctaaagactgttttccatactaggtatggaaattttgaatatttagttatgtcctatggactaacaaattctttgacagctttcatggatatgatgaatagggtattcaaggatttcctcgatatacgggttatagtatttatcatgacatccttgtatactcccaattagaagcgggcatgaacaccacctgcggatgtttcatagaaactacgagaacactagctctacgccaaatttaaaaggtggaaattttggctatcccaacagtcatttcttagacacattatcggtaacgatgggatcatggttgctacgggaatgattgaatctataagagattggcgaatgccaaagacagtcatagaagttagaagtttttgtgtttggctggttattatcgttagtttgttgagggattttctaagatttcaatactgttaacggagttaacgagaaagtatccgcagtgtttatggatagacaagtgtgaagcaaactttcaagagttaaagcagcgactgatcacaactccggcattagcattaccattagatcaagagaagttcatggtttactgtgatgcatctagataaggtatggggtgtgttttgatgcaggctgatagggttattgcctagcctcctgccagttataggagtgtgagtagcgatacccaacccatgactcagagcttgttgcagtgatttttttttttgccttgaagatctggcaacactatccctacgaagaaaagtgtgagatttacacttatcacaagagcctcaaatatttccttactcagaaagatttaaatatgagacagaggcagtagttggagctggtcaaagattatgattgtga

SEQ ID NO: 387708 - DNA, 1044 bp, Cannabis indica
gtccaagtgaaaatgttttttttttttttttaaatgaaataaataataataattttaattattctagcattgaagttatagaatagtttgttcccccagaagaactattaaacatcattttcatgcttgccatgatgtgaattgtgaagtctttttcgtatctctatatatatatatttatatatatataattttggaaaaaggtcaaataataaaggaaaaaaaaatgtcacttagttaattttatgaattataattttttttgaataattataacttaaaattactttaaactttttcaataaagttggtagcttagcaatttttaaggtttttatttttaaaaataataaaaaaaaaatatgatggaaacatatatgaaaaatgatgtgtctctttataaaaacaatctaattaaaccttttttttccttggttaaagtcactaataaaaattaaattaaggtaaattactagttaaattaaatccaataatattacattaaatttattgggataatgatttttttttcttatactttgatttagtactttctataattgtttggaaaataatttttaatattttggacaattaattgaaatttaaggtgaggactattttgaaaaaaaaatatcaaaatgaagtcaaggtatgcaagatcacttaagaaaaagaagatattttgttatttttatattttaaggtgaataaacaaaattttcatttaaatttatatggaaagaatatagcaagacacaatattagccacttaaaaaaataaataaaaaaaaaggaaaaaaacaatattggcctcaagtaccaatatagtccataaataatattatatttatatattttaattaagttagacaaagactagtgtttgttctgtcaaatatttggaccattttgtgagttgtgttgtgtgaatataaaaaggccatgtaagagaaaagagcatgcaaacttatttttttttcctaaaaaaataatgtcatttttttctcaaaaaaaataaaataaaaatatatattcttattt

SEQ ID NO: 387709 - DNA, 1140 bp, Cannabis indica
aaaggaaccttaaacatttaagacgatagcgataaatgtatcacacacctggcttgcaacaagtacaaaagcaatggaattttcttccttggcaaaaactgattgaccgcccccagagagtgttgaaagactttttataaccataatattaaatgctaataggatgaaatgcagcaccctaaaatataagaaataagtcactttactgtagatgaccacttatttgagattataacatcactactaagagtgatcaaactatccaaacagaccatgaaatattcactgatcgagagctattaaaacctcagctcaagactgtctatatacactgtaataagggagcaattgggtatgtgtcaacataaagataaatcttataggagactatttaaccttccaaatgaagtgtgtattgaattaatccaagatgtgtcatcatttatgaaatcatcaaatatggtacaaagtctagacccaacttcacctaaccaaaacaaggttttctgacaggagaaggaatttcttcaccttctcacttttaacaagttgcttgaaaattgcaagtctagggaaaaaaatgcaaaagcaaactaaaaggtttaacgttcaaacaatttggtgacagaaatagaatgcgggtatgttcttaagtccactcattagaaaagcagagtgaaagtgataacatgcaaataaataattagaacaaaagggaaatagattaaagtttctgtatgaaagaaaaagcagtggatattatacagaatgaagaagcacaagaagagtaaaagtgataacttacgctccagctccaattgctacaagaaaaacttctggcttaaccatcaatagcagaggccttgacctgctaacttgcatccatggaacctgaataataattacatatctgaaacgtaagttcttttggaaatataggcacctagccctcctttacttaatattgctttcctataattatgtacaaaaaaatataataaacatatcattataatattaaatgttgtaaatatatattttaaaataaaaaaatgttatccatataattataacctttatcatttatttatgagaagggtagataaggaaaataatttaagttggtatggaatggctttt

SEQ ID NO: 387710 - DNA, 1619 bp, Cannabis indica
ttcatttcattatatttttaggttaaatcaggttaaaatgtatgagtttattgatttatttttaaaatgtataatgaatctctgcgattagtgagtttataatagatttaggattgagtttggtcggatctgtattttgggcaaaaaatagtttttacgccaggttcgatgcaaacccgattctttctattgtttaaataattaattgttgaagatgtaggttcgatgtagggccgatgtaggttcgatagtggcccgatgctacccattttcttgggtagcattgggccaccatcagacgtacatcttcaacatttactcatttcaacaatagaaagacatcgagcatgtactagaccaccatcaaatttcatatcctacatttatcggtaccatcagaccaccatcagacttacgtcttcaacttttactcatttcaacaatagaaaggtatcgggcctgtatcggaccaccatcagaccctcatccctaacctttagactacactactatcgtacccaccattggaccactatcatacctgttattcatgttcccaaatagtttctgcacggaagtaccaagagggtgccatgtcagatcgtataggaatatcccgaattccccttttcttttaagataggatcagggaaggcatcggagtatccaggagagcacatccgttgtaaaggaggaatcgatatttgaagctataacctaacgcttccagtattcgaaagcatacacgaagcccactccttcagggagctctcaggaattaggtattccaggaggtcccgagttgcatttccaggaaggcccctgtgacctaacctagagatacactcgacgattatgccttgcctaacaccaagtcagatcttgtcccttgcgtcagatcatagttgtgcgcgtacgtgcctctgtagtgcttattgtccaacaacctatctgagatattgcttttaaaggagaaacatttgaacgacacgtgtccatgtcctcacgtgataacatgcgtcaattaagcaccgcacgatggaagagctacctaccaaatcaacggttagacggtcttgtagtattgtacatccctatttgcgtgttgagtaaggaaccctagtggggtaagagggtatgccctcacccacctacgggcctataaataccttcattttttattggaaatatttgaccagaatctagatttactaacaagtatgtttcattaatatcctaaatatgaatatctctaatcaatgaaattaaacacataagagtttagaaaatcttacattggttgcagcagaataatattactccttccgcgatctctaacccctattcctttttgttgtagagtattaacaagatctgagcctggatctctttctctccttctggtttggttaccactgtcttactcactacgattgagtacttgacctgctatgtatgggcatggcactctatcactataggcttgaattggagaagaacatgtgaaatcactacggaaggaactctctcatctactagttgtctgatataaaaaaacaagatttatggtaggttgaaaatccaagttgaaatgttccttttatagtgtttcaactagg

SEQ ID NO: 387711 - DNA, 823 bp, Cannabis indica
gggattacactaactcaggagacaggcaaacaccctactacggtactaaaatggacgagaattgagaaatggcatgttcggggatcctgccaaaaccggctagctagttttacaagcctggcaaaccggctagctgatttgcaccaggtttcccccaaccatcaaattcttgctcaaaactcatccaaatgccaccaagccttctagagtacctaaacaatgtataaacaacataatccaaccaaaaattcacaaaaaaccccaatgaaatttaacatgccattaaatacctaaacttgagttttaacgctcaagcttactcccttctatcaccatagctcaaaattaataaccagaactcaatattaacctaaaatgaacctaaaagttgaacatcaaatactactaaccctaatagccccaaataaacaaaatcagttactcaactaaccataaaattcaagaactaatgaagcgtgttactagggcttaccttggcttgaagaacccttgaatcgctattgaatttccagaaaaaaaaacatcaactaatcagttggtgcctccttggtttggtgctgctcgaagagaaagagagaaagagaaagagtttctcttagctttttgtctcttttttcgattttctctaagaaaaaagaatcaatgataatcactaatcctttgctgaaaaataagttgcaaggtgtcactaacctaggctgccacctcactctccattttatcaattgattaaaatgccctttaacttaaaagtaaggtattttaaagactaggggtaaaatggtcaaattccataaccccg

SEQ ID NO: 387712 - DNA, 844 bp, Cannabis indica
aatgtgcagactttgtgaattgaaccgccaattgactcccggactcagggcacctacgacagattggattaccttataaggaaaaattagtatcttattcagtctaaccaggcccaagctgcttactataactcctatctgcagcagcaacatgacttttctcaacggcaagtccaggagttaaattctactttctctatgtggaggatggaccccgatgctcctgaccacttctcgcaaccaccgtcatggtacccatactagccgctgccaccaccaccgccatactgatgtggcgctcatgtaagttcccttttctctttctttaatgtcacattggggacaatgtgttagtttagtttggggagtgaacttaattattattctgctagtttttgcatctctttctatttttaatttttagtttttattgtttgagtcaatttgctaatatgagtcaatttgaaagtatgtagacagcatgatttaaaaagttcatttatttttcgaaaaatctgtgtgcttggtgatattacactcttgactgatttcaattttgtgatttaaaagagcgtggaatcatattaggtaattttctagtaatttaattagtttatgtatgctaaatttgatatgtggaaagttgtttgaaaaattctagaacttgcttgcttactatttgaggcaaaataataaattatgcattactaggaaaataatttaggtatttcttggatcgattgtgtctttcaagtcatccctataattttatcctagttaccttttttgagccttaacatgttctttgtttctacacattttgagcctagaaaagataaacctt

SEQ ID NO: 387713 - DNA, 906 bp, Cannabis indica
ttctctttctttgttttctttctgatttcaggtcgtggattccttattagtaagaggggttgatgcttatgatatgtaacagctgaatgatggtgaaaccgattggaatggaataagataattttgcaaggttatcagccaagacaagaataaacatgtggggttatatttcccactgacaaaaataacaaaattgtttaaaagcaaatgaaaatattatgtcaagtaaaattacagcttttctagagattttgtttttgtaggaaaaaaaattagttagctttgcagggaatctaagtcaatcatagaaggtaaacttgaaattttcaatcatgatttaaatatttggttatcttaggaagaaaagagatataaaactgattttataatacttacaggcatcgctttactggattttcccccaaagccacctccaacccttcttgtgataacacgaacattatgtccccgtacacttaaacattttgcaatagcatcgtgtgcaaattcaggaaactgaattgagctataaacaaccatgcagttgtcttcatctggtatagcaagggcagtttgcgtctccatgtagaaatggtactgtgaaggaagcttgatctggtaaaaatgaaactataagttaaatactgcgcaaatatgccaaatcagtgttcatgcaatattctctctctcccgttctttttctcacaatgttgtattacatttgatttcttctaaatagatgggcaataccttagcagacataattttgtgatcagcttcagccattccttctaatgcatcaccaacttgctttgggtaaatggaagtaggcacttcaaaaaaactagatcttctaacagcctcatcaacagataaaatgggtggctctagatcttctactccata

SEQ ID NO: 387714 - DNA, 1201 bp, Cannabis indica
tccaccgtaaaggttgttttcactgctaagaaatgtgcaaacttagtaaatcaatccaccacaacccaaatagaattgtacatcctcgtagttctaggtaacctaaccacaaaatccatggtgacatcttcacacttctactcaggaagatccaaaggctggaacaaccttgtaggactctagtgtccagccttaatagctgacaagttaagcactgggatacaaattctaccacatctttcttcatcctgcaccaccagtagaagggtttcaaatcctaatacattttggtagtaccaggatgcaaagaataatgagtggtatgcgtttctttgagatcttatttctaagttccacactaattggaacacaaactctggttctatacaacaacatcccattacctgacactgtaaaatctttagctttatcagataaaacctcttcttagatctttaataattccgaatcagttaattgagctgctttaattctgtctaacagatcatactgcaatgtcaaattattaagtttgcttacaataaactcactacctgatctgaccatatcatctgctacgtgaggtgaaatcttgatcatactagtcacttccccaggacccttcttgctaagggcatctaccaccacattgaccttccggaatggtaaatgatttcataatcgtagtctttgaccaaatccaaccaccgtctttgcctcattatcaaatcttttcgagtaaagaaatattttaggctcttgtgattggtgtaaatctcacacttttctccttagagataacgctgccaaatctttaaagtaaaaactaccgcggtaagctctaaatcgtgattcaggtatcgctgttcatattattttatttgaccggaggtataagcgataacccgatcggcttgcatcaaaacacaccccaaaccaagtctggatgcatcacaataaaccacgaatttctctttatcagatggtagggctaacaccagagctataatcaactgctacttaagctcttgaaagcttgtttcacacttatctgtccacagaaatcgctaattctttttagtgagttcagttaaaggtgttgagatcttagaaaatccctcaacaaaccgacgataataaccagccaaacccagattacttctgacttctgtaactatctttggtcttggccaatccctga

SEQ ID NO: 387715 - DNA, 1516 bp, Cannabis indica
agcttatctgtagtagacttgaaagtatattgccagatttagtagcttcaaatcaaggcggattcattcaaggaagattcatagctcacaatatcatgatctgtcaagatctcataaggcactatggaaggaaatcaaacaaggccaattgtatgattaaattggatcttcaaaaggcatatgataccatgagttgggactttcttgaagaagttttgacagcattcaaattcccaccgaagtttatagctactgtcatgacttgtattacaacaccaagattctcgcttatgcttaatggttctataaatggttacttccaagcaagaaggggttaagacaaggagacccgatgtctcccttgctctttgtccttggaatggagtacctaagtagaatcatgagaaaagttggtgaaaagacagatttctattttcatgaaagatgcagcgaccttaaactaaatcaactgagctttgcagatgatgtactcttattttgcaaatgtgattttaaaagcatctaccgaatgctccaaggcctaaagttattttccaacacctcaaggctggtgccaaacaagaatacatgagcaatatactacagtggcatggctgaaactgaaatcaaaagggtggttgacatgtctggttttactagagcagatctccccttcaaatatctaggcctccccatctgtgcaaaaagaatctctaaggaggattgcaagctgctagtggacaagatgattgctcgaataaaggttggagctttagaaatctttcatatgctggtagggctttattgatcaattcagttctgcttactatacatgcatattggagccaagttatgatacttcccaaaagagtgattgttgatattgaagttgtttgtaaaagttttttgtggaaaggatagagtgaaatggcaggtcctagaagtgttgcatggggaaacatttttaagcctagaaaagctggtggaatcggattcatgagcatccatgaatggaacaaagctgctatcatcaagaatatttgggcaattgcatcaaaaaaagacaatgtatgggttaagtcggtgcataatgtctatattaacaatgaatcttggtgggagtacaaggcacccacccaaagtagctggtattggaggaaacttgttgaactcaaagatgaatggaaagagcaaatcaatcatacccagtttactgctcaaagctgcaaaatttctaaagtatataagctgctaacaacagcaaatgatcaatgtcattggagcaaacaagtatggtcgaggatgaacattcctaaacatagctctctgctatggctagcaatgctggacagattaaaaaccaggcagaggttggtcaagtttcagattacaacagatgctcaatgcattctctgtgatgcctcggaagaaacagtatcacacctatttttctgttgcattctgtgtggttaacaaataaaatatatataaacctataaatttaacatatagtttt

SEQ ID NO: 387716 - DNA, 1722 bp, Cannabis indica
agcacaaggcaagacatctgaactaggcagctgatgcccttagcttaagcagagttggtagctctaaaggtgttagagagtatgttagctagccaagtgggtacaccaatcaaggaacacatcaaggagaacctggagaaggacccaatcacaaagaacatcatggatcatgtaagaataggaaagacaactcagttttaggtagaggatgatctcttatggaccaagggtggtcgtttgtttgttccaaaggtaggcgatctaaggaggacactactgagtgagtgtcatgacacgttgtgggcgggtcatagggtggcataggatacatgcccttttaaagcatggataatattggccacagatgcgagaggatgtggtggactacacaaggacctatcaggtctaccagcaagacaaagtggagaggcacaagatgccagggttgttagagcctttgttagtctcgagcaagccatggaagagtgtctcaattgattttattacaattctgccaaaaataggagacttgaatgcgatcttggtgatcgtggacaaattttcaaagtatgcaacctgcatcccagtgttgaagtagtgtctggcgaaagagacagctcgactttttttaaacatatagtaaagtactagggagtaccccagaatatagtgagtgacagagactgaagattcactgggaccttctggtccaaactattcaagcttcttgggtcacaaatgaacatctcctcgagctacctcccatagatagatgggtagacagaaagattcaacgggatgttggaggagtatttgaggccctttgtcaatgccaaccagaagaattggccacaactactagatgtagctcaattttgtttcaactctcaaaagagttcttcatcgaataagagcccttttgaagttgtgaatggacagcaaccactgttaccccacacggtggatgagtaccacggacggaatctgtaagccttcaatttcacaaaagactagaaagaagaatatagagattcccaagcatacttagagaaagcctcacgaagaatgaagaagtgagcatatcaaaaacaccgaccactagaattcaaaacaggtgacttagtgttgatcaaactacgaccagaacaagtgagattccaagaggacaaagacatcagactcgagtgcaaatacgagagccctattccagtcatctctaaagttttcctagcctcatacaaagtcaaactatcttcttggataagatacacctggtccttaacgtcagcaacctcaagctgtatcatgaagatctagaagatccagggcacatacagtctatcaggaacgccattagccttcaatgacgcaaccgtagagaaccagaagaaacccttgccaaaagaactgttcttgtgaagagaaagaagagaaaagaatacctggtcaaatggaagggcctcgttgatgaagagatcagttgggagaaggtgaaggatcgtagcagtttttgcagaagacttaagaccatgcagcagtttcatcaaggacgccaaacaattaagtgagggagaatgtggcatcctaccgcatggtacacccacaagggggccattttgtaacatgagcatgccttggtgcttgatcattagtcaagtcttgcaccaaacacctcattagggtggggagacttttgtggtttgcttttctttttgtaattcc

SEQ ID NO: 387717 - DNA, 1438 bp, Cannabis indica
ttttttttttcaaatcattgcttaaaaatgttgaggtactcttgaactggaaacgttaatttttgttttcattttatgtaaattaatgattatttttttttgataaacaattaatgattaaatttagtatatgtatggaggtccttatgggtaaattcccacaaaatgtcatcctacgtacttttacttccttcttggtgcatatacttttccatgactcaattaatgttccttattgctttcaaaaaataataataataacaaatgttccttataattaaaaaagaaaaaaatagtccatcgataatgataaatgctgtggaacttggaataggacaaaattgatgtaatgatatttacacaataccaaatatatcacaagtttcactcaaaatacaaattagaacaaagttgtgtcatttttttttcttttaaaaacaaactaggtgcggctagcatcacatgcatgtgcttagttgtttcttttgttttgttattttttttgaatgaaaaagttgctatattatattattgaaaaagaacaaatataatacactaaataattaactgccttattccgtaaatcgcttaataaaaacaataaaaatattatttaaagaaataagtacacatcgtaagaaataatcaaatcaaacaagaagacatttggtgtgtattataaattgtacgaacaactacttgataattaatttcaataattacttaaaaaaaaattgatgtttaatccactaagaactttcttgacatccactgcttttgccatagggtgagatacaaaatgacattaagtttagaaataaagttagtaaatgtgtattttttaaaaaaataattagccaaatatggccaaatatagtgaattaactgataaaaattataaaaatacatttactacacattaattttttttaaaaaatgtatatataataattaaattaaattatataaattttttagtattgcatattgatatattgtaacaaaaacgaattaatatatattagatcatacatatatatagcagtatttgtatcactgaaaattgatatatcgttgtaataaaattatataccacaaaaaaattataacaatgctaaacttagtatattaatattcaaaaaatatatcttatgttaacaaaattatatatatcattattaaaatatgtatatcataccaatttgtaatagtagagagcgactccaaggttgtggtcaatacactcagcagaaaggagtcttgttgtaggcttgtgaactatgccttattttgtaaaagttcttttctttttttggtgagttgtatgttatctgatattagtagaacttgtaattgcggcctataatcactactacaaaaacctcctttagaggcggtttttaagccctttcagcgtcggtttttgcaaaattcgcta

SEQ ID NO: 387718 - DNA, 1432 bp, Cannabis indica
ggcttcatcaatgacttggaggagtcatgtttctaagtcaggccaactcatttcacattacaatgcgggcttgatcatttcatccattcacaagcaaggcccaataatctctcaatttaaagttggatttaatcatcatttctcaacaataatccatgaataagtaatccctactcaccccaaagtgccccacgcaaactgtcgagcactccaacaacgccatgtggctacctttttccattgtcatcaacattttcagcaactttctccatttctttttacacgaaagaaactgatgcttagactaaatatggtctataaatagtactcaaaattagtgtaaatggggaacaattgagtttagcgaaaatatgcacaatattttgtctcactctctctcttatttttctttatctttttgaatgaacataatgtttagtttgagctaaattttcaattggtgagattagagaggttcttatgttggtgtgtttatatgctacatgattctcttggttataatgtctacaatttgaatttattcatgtcttcttcactttttcttcttattattttacaaagtattatatgccatactttatataagtattagtcatgctctacttatgtaatttagccatataagtattttgttaatgttaatattatcatatatgattatattttactgcaaaactactatgtactatattttatcgctttttggatatcgtatattaataatcaattgttataattgtgaagacttaatttattcaaaataaatataaagtgagcttttagaatcattttgtatgtataatacaaaaacatgagtaaatctttatctcactacttttttctcgttgaattacttttgcaaaattttattttcttaatacgattgtctacatcgtcttctctaaatttttagtcactttctttagcaaattttccttttgagtgtgtttttacctccttgtggatacgacaaactccatttattaccgcgacctcagtgtaataaattgggcgacatcaacccttgaaaaggttattgtgtggtacaatgttaaagatagagttcaagactacgggtcactctactaaaatctaaatcgcattcattatacaaagattcaaatcaaaagacacatttgtttatgttcaatattattgttgaatgatactgcaaaatgaaaatattttttggaaaaattcaagtggaaaattgttggaattttttttacaaagtgaatgattttttttgcaaaataagtgtcctaatgtatgtaaaatagataaagtcccacataggatatgagcacttatttataagaataaataaaatgcaattatagcacttgggataggacccaaaggagaatacacacgcgcgcagtccgttagtgtggtgtgacactttattttt

SEQ ID NO: 387719 - DNA, 793 bp, Cannabis indica
aagaaatctagctccttagaacctccgcgagctactagggttagagattcacacacaaatcaccaagaaaattcacacgaaatcaaaaacaaatagaaacagggttagggaaataaacacagatgaaaaacaccacaattttctaaaaagttcagccccaaaaaaaatagactacatccatgtcgagctcaccactaatatactcgatttctccactatccattggtatggattacatcatcttctttgatttcaagtcacattcattgattgttaatcaaagttatacaaactttgaattcttttctatatttttcttttatgagggattttctttaacacttttctatctctctctctctctcaacacgaatgaagttatctcacactagtcactcttgggatcttctctctaatctatttaaatatctaaaatattaaatgagcttctatatgcatctaaattcataagtaaaatatcaactctcatatatcatagattttacagatttttttatagacttataatgtttctaagttatgccacaaatgaaagaaaaaattacaaatttacatgttacaaatcatttatatatttataattaacaagtgactttgattaatttagatcaaaatatccattaacaagttagtcaagtcatttaaattaataaaataataggttttatgtaaattattaattgaattggtgttgtgataaatccaacacgcaagtatacgtatcgttttaacaagtaatactcaggtaagtgagatcgttcccacgaggact

SEQ ID NO: 387720 - DNA, 2794 bp, Cannabis indica
atgggacataattaaaatatatttatatatattttgtcaaattaaattgattgttatgagcaaaatttgtaataatctaaaattaaatattataaaaaaattattattattttcaataaaaaaaattataaatatatatataaataagtatgaatttatttgaataaatacatataatacctattttggtcattgtatatttgacaattatctaatcatttagtttaccaaacacttatatacaacttttctaactcagttattttaaaattatatttaccaaacactaagtaggtttttctcacagcacaactacaactgctttttctcacagcacaactgtaccaaacttgcccgtagtatgttttttgggtaacacgtattatgacattgagacttgggtgagggaaatattcttttgagtgtccacctaagatatataacttgctagatgtaataataaatagacaaggtaaagcttgtcgtacgggatgaatggatttaacctggacggagaaaaacagtcagcgtctcaagtgacccgattagggcaatcgcatgagataaattcattaaagatactttctcactttatatgtagtcaaacctcaattttagagaatttctatatgtaattgtcacaatttatgaaagttattagtttcttcttttatgacttgccagcttttgaaaaaatgtttttctcattgtaattattccctataaatagtggaacaatttcactattcaaggatccaaaatcatattttcaagaaagcttgacgctgctcaaatacctacagaaagctttcgagatagattaagttgttcttgcttctcttctcacaagtgaaatataactgaaaggggagtaagctattaccaaataatggggctgaacttctataaaatctcgtgttcttagtttatgcttgatattaaatattttctcatttaatcgaattgatttcatatcgctttcaagactcagtgtcattggctaaatgcgaggtcaatattttggtgcttttattaagagtatcatcccaaattttatccacctgacgtggcatgtccacataagccaagcaagagtacatgtggaatacagccttgccaatagcaagacaaagtctccttgcaaggcatggcaaaaccattaagcagcaagcgaaagaagttaagcgagcagtcaaagagttgtaccaccatgtctggctagccaaggggagtctataggccggccaagatctgggcacaagttggtcgcccaaaaggtgactttcagaccaagggaaggttcgttcgaccaaggaagcctagcctttgcaaggaaaaggtgtacaaaggttggcctccatctccaaaggctggcttccttttggtaaagctgaaagcaacatgacttgcaggatcttggcaggcacatgacctgctagatcctggcagtagcatggccagatagacctcaacctacaggtgcatggttggcccgcttttcccttacaggaaattaatgtgcagcctttatctgtggacagcaagtcaagctacaagttgggccttggccactaagatgctacgaaaatatttactttcaatgggcaatttggtcttttgtatttattaatttaatatgtgaatatctcttattttatttgctaattagaatttaagctctcctatataaagagccttaactcaaccctcaacccctagatctcatttaagccataaagctctaagtctgaaaccataatcctcttctctctctctcctacacgcccaaagggctttctctttttctctcgctcacacgcctccaaggtcctatctctctctcattagagatttgcctactgcttcatactttgtaactttaaagagagttatatcagatctcacctatagtgatttaaatagtattatctctctgtatcagtaatcaaaaggggagtaggtcatgacttgctaactaatggggtcgaacctttatataaatccttgtgttcatttattatctagctctaattgtgtaacacgtggcaagcatcagtttaatacgactctccactgtcagttggccaatttctgaggtcaacagtttgttggggattattttaccaagatctagatttactaccatgtatgttgtttaacatcctaaatatgaatttctaaaacaatggaatttaaacacatataaagttcaagaaaccttacattggttgcagcggaattaaatgactccttccactcagatcgctaacccttgttccttttggtcgtagagtattatcaagatctgagcccgattctccttcagtcgttggattcttcacagtcttacacactatgattgagtaccaacttgctatgcgtgggcatgtactctatcactataagggattcgaaaattgaagaagaagagaaggggaaggataaaattagagagagaagactcaagttttactgaaaggctagtgagaacaacttgtctatcatctgtcaatttgattctatcaccatctatttataggaatccttctaggtttaggtttgaattatttggcattaaaaatttgataaataaatggtaaaaaggagcttaagtggccggccataggatgtgggcccaccatttacaattttgccatttttctcaattatttatcatttttctttcacaaatgccatattttccaattcaactacttaaatatcaaaactatttatttgatagttaaatttaattatcaaataaaattgtcatttaatatatttattgattaga

SEQ ID NO: 387721 - DNA, 2100 bp, Cannabis indica
agagagagaatcctaaatctaacatagcaaggagatatctaaaccatcagtagaaatataattcacttctcccaatgtttcggtattagataattgtcacattaggcgttcattaataaaattgaatagaatttgacgaaagtttttaaatttaataatttgaataatttgagagaaatttttaatagtttaaaattttcaaaaggtactatttggtacatgtgaagctttaggaaaaaatactttttataaaattgtttagttgaaaacatggactagaaaaatgacatgaaaacctacccttcccattttcgctttcttttctttttttacttgattccttgtttttgaagttagttaaaaaggcattttgattggctagaataaataaaaatttgacacgaaaaagtccaaaagaggaaggcttaaaatacaagaaaaagcatggtatgggggaactaaggaataatgacaaacaagaattagcctacgtgcttattaattttaatacactttcattattatttaaacaaagcaaaatcttgtttggtatggttcttgctctatattgtatacgtaagagtgattactttatttaaggagacatgtcgactgtcgtgttagagacttgagggaatgcttagtcaaaatcatctaaaaagtgtaattattaaattacgcacgttcaaaaataaaaacatatgctcctaccacttacactgtgtttaatcaacatattacctaaatttaatcgacaatttaccaaaaaaggaaaactcccagttcataaatatatatttatactggtaataaacactttaatttagtatttttatagttttagagttctaaatattgccatggttaattacttatcaatttattgagctggtgtactctttctttagttgttatggctattgcatttaccatattcaaatatgtaccatcctacttgtaccatcgtacttagcagtatttatagtatttttatactattatattactattagtatgttttaatatcgaattttattgattttaattttatattaaaaaaaattattaactatttataaagtgttaccttatagttagaaagaaaaatgctaatataacatgtggataaattttaaagtttcttcaaatattttgtccttttcttcctctctcttattaattatttttttatttgtttttttttctatttttattaatttatattttaattaaaataaatattaaaaatataatatttaaataatatgaagaagaaagaaaatttaatgtatggtataatgtaaaattttgatgtaaaataaaaaaaaaaaataagagtttagtgatatattttaaagaataagaaaagaaactattaatatcgttgcttataaataaatcaatatcaattgaaagaggaaagaaattaattaagaaagtgaaaaaaaaaaagagagaaattaaagcacatgcaaagctgtcctctatttttattttcattatacagtataatttggctaaacatttcacactcactaataaagctagtttgttgcctttgctgaaattagaagtgttagatatgtgtattgtttaattgtatgtgggcacagtttctaagatttgacatctctatatttaatacttttaaatgtctttttcttttcttaactaatacttttaaatgtcaaaatttatttgttatagtttgacggaactttgtcaaacatttttgattttctgtttggctcaaagctatcttggtgactatcattcctcccagcgggccccctcacctactcgccccagacagatgtcaggcccttcttcgtggactcctccagctgcgggtcttctcaagctaaatgtggatgcagcactttctcaatcctcccgaaaagcgggcttcggaggtatcatcagaaacagcgacggtctggtagttgccgcctttgcccaacctcattccgggggaggctcggtcccaaccttggaagcaaaatctctcctttcagcgcttcagtggtgtatcaacgagcatttcttagtccaagaggtggaaacagattgcaaagccattactgatgctctctctggcca

SEQ ID NO: 387722 - DNA, 1558 bp, Cannabis indica
tcctctcaaactcagctggtgttgtggctcttgctgtagcccataataactgcttcaaaataatgccagggtaatccttcttgaaattactatgcatgggtcttatacaaaaacgagtatcaccaccaatgaaaatctttccaacagcattctgcaaccccttttccctatcactaatcacatcgtaaatgcaaacctctcttggatgtaaatcttccttcaaaaactccaaaaaccaagtccaactctctgtattttctttcccaaccactaaatatgcaatgggaaagattgaattagatccatcaaccccaatggaagctagtagtattcctttacattatccttttaagtgacctccatctaacccaatcagcctcctgcatcctctgataaatccatccttgcatgccttgaaacaaatgtaaaccttctcaaacatcattttctcatcaattagccgagtttgtagctttatagtactatcaagattggttgctaatagttgtttgcaataatcttctaagattacatattgatcaagaacagacccctctaaattttcccttgcagttgctcgagcccggtagaattgccagtttgtcacttctgaaaatgcttgaatgctgagtactccatgttgaggtgcatcctaaactggtcaagaaaatgctttgccaaccattgtgcatcaatgtgcctattattcaagactcaaacacatgtatgagtgtccttaagacgattgattcggaaggtttttctatttacaagaaccaaaacaaacaagataattttaacattagtgaactataattacaacatgatgccaactattgaaatagaagatatccaagttacaacttttctattagaataaaagatatattgtatatccaagttaccatacttattgatttataatgatttgatatggtctttagtatataaaaaaaattatattgtgattttttttgcttaaataaaaatattctacacagctattcaaaagcaatgacaagaaattaaattagaataaatatatacctcctttaatatgtccatgtacaaagaaatgacacctcgacgctctacactcagccctaaattttcctaaatcattcgctagcaattatattctgcatcaatgtgtatgaagtactcctttagggcaatcctaagtaattgtacattcccaaattccaagccaacatcccacttgaagtcagctatgttggtgcttggattatgttctaactttgtcttactcgaactatcctcatcactatctacacttgctaaatcaaattcaaattcaagtctttcatcttcaccatcattgtcgatatgcaaatctgttatagctgccgaccacttgcaaacttctggctctcgagtattctgcttctcaatttttggttcaccaaaaatgtaacaccctaactagcataggtgtattacgtgatttttaaacgtactgtgcagctcgttgctaatcaacgaggtttatcgaaatcgtgataaattaaatttttgcttttaattaaacttatataat

SEQ ID NO: 387723 - DNA, 996 bp, Cannabis indica
tacagtaccacgtacgttttttagtttttttttttttttttttttgagaaaaaaactgctattattaattagataagtcattaataacaacagagaagattggggaaggaatttcccccaaccaagaaaaatcttcatccaatcgaagagcaaacttagccaaagcatgagtagcttcattagcatctcttttaacatgagatacttttgctccaggaaagaaggataaaagataattaatatcatccactaaatcataaaaatgagtaaaaaaatttagcagaggacatattgttaacagcattagccaccaataaggaatcagtttcgatattatgaaggtggaaatgatgatcaagtgcccattgaagactgtgataaagtgccactgcttccatttcttttgccgagtaacaaccttgaagaggctttgaaaaaccagcaatgacagaacccaaatggtctcggataagtgcaccaacccctacaattttgccctcatgatcgtaagttgcatcagtatttaacttgtaaaaaccagcaccaggaggctgccacttagccacgatacgatgagcagtgggatgaggatcagaactattcggagggcgattatctgtttggtttaacgcagtaacagaggcttgagcattgtgatattgttccaggtatgttgctgaaaaagagcaaatcacatctgtcggtttagctcttgaaccatgagtttctttgttacgctcagaccatatacaccacataagacaaataatcctctccaaatctgaatcattatgcattgcagcaaggtgagcaaaaatgtcatgacccttaagattgcctatattcaccatagacacttgaaaattaagcttgttccacacagccttagcacgatgacatctaaaaatagcatgaccaacagaatcccaggcacaccggcaaagaccacaagcagtagaagatgaaatcttacgatgaacatgttgggttttatgc

SEQ ID NO: 387724 - DNA, 1008 bp, Cannabis indica
ctctcttgtaatgagaaattttccaacaatttattttcaagttaaaacttttactttttaaattggactaaattttcccgcaaaaataacattgcggtttataatttagctaaatatacttttaagctagacaataaattatactggtttgaagaggtcttagcacctgtcgattgttgaagtcttttcgagaatgtagaccacatttttcaggaaaaaaaaaatacatcgattgtgctccttaaaatgctctcaagttttgagcacttattacaagttttttttggcagttaatcagatttctttattcctcgttcttcttattttttaagataaaaaatagagcagtattaatagtatctaatacttttagaagtagcggtttataattagttagtgatattctttaaaaattattaaattaaattataaaataatttacaacgtaaatatttcaatttaattttcagttgtaaatagataatacttaaatttaaatttttacggtgatagtacttaaaattattattttaaaactatcataagactggccattaaatgtaagtcattaattcattttttattggtatatttaaattaattttttaatgaaaaataaaaatttaatgacctaaactaataagagattgctacgtgatcattgacttgacacttaacggtcaagtacttacaaaatttttaaaaatataacttaggtattattaattaattattattattacaattattattattttttaaaaaatgttgtataatttaactacagatcacatgagtttaacttaaaaataaacataagaaaatgccacccgcccagatgatgtgctatagcacaagccctagttttactaaggtcagctctaagctaaggcaagttaagatcacgcctaggatctattcatcttaggtgtccaaataaaaatattttaaaaaatatatattttttaataatttttaaaaatgctatttatttttataataaaagcc

SEQ ID NO: 387725 - DNA, 2569 bp, Cannabis indica
acttgggacccaaaactcaaacccatactaggactgggacctgaagtcatacccgaacccaaattgggacctgggctaagaccgggactctagaaccgaacccgaatagaaacacaaacttggacccagaccgggaccgggaccttggacctgaacatagatgggggacccggacacaagaattgggcccccaaactgggactagaacttgggcatcgaaacttgaatcaggatccgggaccctaccccagacccaaacctcgaccaaggacccacctcgggacctaggatccgggactcgatgcttggacccgacgcgtagtcggtgtctagatctaggacttagacgagaacccgaacccaaactcgaactcaaaccatgacctggacacagacacccacactcgggaaccaaaatcaaaactttaactagaacccgatcatgaccaaggaacgcgaccaggacctagcatcgaacatgaacccagatttggacccaacctcaaactctaactgagaccgaaacgcggacctgaacctcgacccagaccaaaataaggacctgaacccaaactcggccccaaaatcaacacgaacctgtaccccgtgacttgatactagaaccgaaaccagaagcagatcaagacccaggacaaggaccaggacttggacctaatcctaaaactttaaccggaaacccaaacctgaatccaatcccaaactgagactcaggacccgaacccagacctaaactcagacccaaacatggaacaggactcgggaccgagaattgggattgagacccagaactgcacccaagtctcgatctcgaagctagatcgagacccataccgggaattgtgacatgaaatgaaacaagactgggacctgcgattgggatccagatcttgtccctggatctgggaacttgggcttggagaagacacatagtcggtgtcagaccttgggactcgaaactgaaacatgaaccagaacgtgaccaggaccttggaataggaccgggatcgtgactaggacctggacctacatagagacccagaactagagcagaaccaagcctcagaactagggctcaaacctgttcctcgacccagtcctggacccaaactaggactgagactcgaacctgaacttgaacccaaactcgggactcgatcttaaacctagaccaagcacctgacctaaactgggattctgacgtggacatggacatgaacccagacctggacctatataccgacccagacttagactaggatcgaaacacgggagttgacccaaacccaaacatagacccagatgcaaacttgggaccaaaacccaggacccgaacctggactcagactcaaacttagacccagacaaggatccaaaaaacccatacccagactcggactaagactcggaccctgaccccaacctggacccatacacccagaacaaaacctggatctagaatcagaactggaactgtgactaggacctggacttgagaccagaaccgaacccaaaccataaccaaaactcggacccgaactgagacctgggacctgaaccttgatcgagacccgaactgggacctgatcctaaaccctcgctcggacctaagacccgcgagctagaccaagatccaaaccctaacaaggacccaaacctgaactcggaccaagactgggactgagacctggacccaaacctagagcgggacctggactcataccaagacttaggacctaaacctgaacctcgacccaaactaggacctaggaacaagactttgatggaggacctagaccagggacctaggccctggaacccaaacccaaattaaaatctaggactcgaacctaatccaggacttgtcctagacctgggaatccaaagtcagacctagacccggccccgaaacctgccctagacccaaacaaggcaggaacttggacacgaacccataccaggactaaaccttaacccagactcgaacccaaaatcagacccaaacccgagacccgaactcagacccatatccagaattagacccaaacctaggcctgcgcccggacccgaactcgaacccagatcgggatcgaaacccaggacttagactcgaaactaaactagaactcagattgagatcgaaacctaagaatcagacctgaacctagacccagacccaggaccctaacccacacccaaatcctgatctgaacctagaccgagatctggacccaaactcaaactcagacttggactcgaacccaaaacatcgaaccaaaactcgaactcggaattgcaattggaactggaaccgaactaggactatgactaggattaggaccaagacccagacccgaaccaaaacccaaataaaaacccaaatcgagacccaaacccaaaccccgactaggacccaaacccgaacctacattgggacccaaacctagacaaaaaccgggacctagacccagaatcaggacaaggacctaggcaacgaaactaggattgggacccaagacccgaccccagaacaggacattaacctaggacc

SEQ ID NO: 387726 - DNA, 776 bp, Cannabis indica
tttttttgttcatttttcttttataacaattgtattagcacaatcttcttccaaaaacaattcttctttaaaaactaagagcataacacaagagctttggaactctctagggaattctccctttcttctactccttccatctttcattctttctgcgtgatgctatacctctccattttctttctccaatcatcatgctttacctattttcccatgattactctgcatttaatgtataccactcctatctctgatcgagacccacatttaatgggttttcaaaaaattcttggtttctctctcccctcggatctcttcattcatttaattaccgccattttcttcaggcgaaggctcatcatcatggctctaggcttgcgtagatttgggctaggagatgctaggacaactttggcatctctccaccttcctcttcccccgctgattttatccaggtactatttctatcgtcctatctatttaagggtgcagtttttcattaaattttacctctcatcttccctatcatccctattatcgtttagccctccaccttgcatgtttctagccatgtccacctcttctaaaaatccagttctaaatatctaacttactaaagaagaagccttaatctatgagtttgatcatgtttctcttcatcatgaaccccaatttgagtcctattgcttggttgtgaaaatcctttcctctaaaactatcaaacctgaatggatcagtaatgctatgaaggaagcttgaatagctcgctttctttt

SEQ ID NO: 387727 - DNA, 1356 bp, Cannabis indica
gttatcaattcaaccatcagtttcatcgaagaaaacaatgctggaaacgcagctgctgctctcatggctggtcttgcgcccaagacaaaggtaatacaagcatgatgcatatgttacgatcccaagaattatatgttcgtctaattaagaaactggtgcttactcttcgtgaggtgccttaataatctctttcaattatttccaatcatttggatgaagatgatgctgtttaaggctttggtcccagatatacttagttctatttttgaatgagtggtattactccaattccttaagttttaaagaaaaatatagagttgatggagatttcttgatataatctgattggtgattcatctctgttgattcattagccaatataaggaatagcatctcatattattatttgtgttatggtgatatctacaggtgcttagagatggtaaatggagtgagcaagaagctgcaattttagttccaggagacatcattagcattaaattgggagacatcgtcccagctgatgcccgtcttcttgagggtgatcctttaaagattgaccaatctgctctcactggagaatcacttcctgtgaccaagagtccaggagatgaagttttctcgggttcaacttgcaaacaaggtgaaattgaagctgttgttattgcaactggtgtgcatactttctttggcaaggcagcgcatcttgttgacagcaccaaccaagtaggacacttccaaaaggttctcactgcaattggaaacttctgtatctgttccatcgcagttggaatgctgattgaggttgtagttatgtacccaattcagcaccgcaaatacagagatggaattgacaacctcctagttctcttgattggaggtatcccaattgctatgcccactgttttgtctgtgacaatggctattggctcccacaggttgtctcagcaaggtgccatcaccaagaggatgactgctattgaagaaatggctggtatggatgtcctttgcagtgacaagacagggacactgactctgaacaagcttagtgttgatataaacttgatcgaggtgtttgtaaaggatgctgacaaacaacatgtgatgctgcttgctgcaagagcatctagaactgagaaccaggatgccattgatgcagccattgtaggaatgctagctgacccaaaagaggtaaaagtagtttaagattcatactctagttaaaccttgcaaactgccatgccaatgttgaaagcagttctaaagtatttgaatatttatgcaggcaagggctggagttcgagagattcactttttgccgttcaatcctgtggacaagagaactgctttgactta

SEQ ID NO: 387728 - DNA, 516 bp, Cannabis indica
aaatgaacatcaaagcaatcttaaagttattataatattgtttgaagagtgctcaatattaaatattaaaaattaaaaatatacaaaacaaaacacacattacggaaaaaacatagctcatttttttaaaagaaaaacagccattttcgaacataaaaagagttcaaaactcatccaaataaaataatccaaacaattcacaaacttcttttgtgttgtattgaggttacctaaataaatttaagcctaaaacatccaaatacaacctaatattttattattttactaactatttgtttaaaaaaaatgtaaagccattttcagaaaaaaaaaaaaaatcaaagaaagaaaaaaaaaatcaaaactcatcctaatgaagctccaagtaatcctcaaacttcatttatgtttctcactacaaaaaatcctacttttagtcacaacaaaaacttgtgactaaaagtgaaaaaaattgtaactaattataaatcacgattcttatgttgtgactaaaag

SEQ ID NO: 387729 - DNA, 2277 bp, Cannabis indica
tctccaacaatgaggggtaatctgatatatccaatgaatgcgatgcgtggccaaagaagccatacatcacttgactgtagggtgccaaatcgataagttggagacctatatttttgtatgttgatttaaaaagaatcttagaggaggctccattgtccactatgcatcttgccacagtcatattctcgatttgtgcagtgatgaccagtgtcattgtgtgagaaactaacttgggtagcatctccttctatgaaagagatcgtgggttctccaagatttggttgcttatagactatatctttgacaactaggatgtcacttttcgggtcgtgacaaagtgctcgagcatagtgctccctagctttgcttgtcttgcctgtaatatggggttcaccaatgatgacccctaagtgacttgccactaatggtggcattgatctctattttgggcaccttgtgctggagtctagtcggtctgcacataacgacgtaggtggggattgttcttccttatgaagaattcaatccccctcttcaaattttgacactccttggtgtcatggccaaagtcgttgtgaaacttatagaacttcgacatgtccctcttgatcaattcccttttgatgggaaggggctttctatatgggactattccttgagtggccgtgaagatgccctcaggtttctttgttaagagggtgaagcatgtatacttctcctccttgtcctactagttttgtggtgatggagaattgttatactttctctttttgccaccatttcttctagagtttttgttgttacgctttcttttagagtcattgccactggaggtttgggcagaaatgctagtacctgcatgtgtgcttggcaagtcatggggctacaagatgccttgtgactgcctatagctgacttgccctatcttggcttgtcggagaacttcttctagcttaataaagttgttagctttattgaggaagtccttcattttgttagtagagatcctctagataactttccagaaatcactcaatggaaggatgccccaagtatagtcgtatatcggccttctcttataaggcctttgaccttggtggcctcgaccatgaacctctggatgtaatccttcaaaggttctgtttgttctcgtttgacttcgacaaggtcttctagctgcgatggtatgagccttgaggacgagaattgtgtgtaaaattcttaggaaaactcggtctaggaattaaatcttcctaaagcaagtttgaagtaccattactgagccattgccgaaaaagatactgagaatatgcgatgtcacacatcaccagtgatcttttggatatcgagctgcatttggaagtacttgaggtaagccgatcggtcatctggcccagtatacatcttccataccgtcatctttctcttgggtaagggtaagacatttatatatgccgagaatggtgatccccttaaccggtctagcttaaggtctgaaggttttggaccagctaggcccttgatcatgtcccttatttggtcaaactgtgcttgcacaaaaggatccattgctacagggacttgactaattggccctccttggaggggctgcaggctcgaatgtggtagggtctagccagccatactctgggagagtgtatggtcggccatccttgtattaggtagggcatggctgcctataatcccctaattggttgatgtagtcagtgcattgataaaaggtagattgcaccaatttttttggagttaggtggatctatatacctgaagtgatcagtcatacttcttcaaaaattttgggcatttccacccattctcggctctagctagttaaagattggcctttgggtttcttgttctcagatgattcagggagggagctcattcccctggccgatcaaaggtgcaccagtaggtagctagctggccaaaggttggccatcgagttgctattgttaagcttgagatccctggctggcccccaagtccactagctgttgggatctagttgttctcgccattagacctttgtggaaaggcctatcctcctttggttaggggaaggtttgtcctagttcctaaagaaccgagttggacatctcgtcaatagaccctccccaatctctcgactagtcttccttggagtggatctctaataagatcctagcctcttttagtagttctttgattaaaccaccttatcaggtcgctagcttctctattacggtgatctagctccacctggtgagatcagag

SEQ ID NO: 387730 - DNA, 1138 bp, Cannabis indica
tctcccgttctatctctctggccaacctcgaccggcgatgatgggccactcccaactgtcgtacgcctaaatagagatggcgatcgacctcgcagtttcgaaacgccaaaaccctcgaaggttccttccttttcccctcgtgaaccctctcgatgttcttgaatcaacgcagtgtctcagattcatctttcttatcctaaattttttccacctgatgtggcatgtccatgtaagtcaagacagagtacatgtggaatacaaccttgcctataactgaacaaagtctccttataaggtaaaaaattgtcaagcagcaagtgaaagaagttaagcgacccgtcaaggagttgtaccactatgtttggctggctaaagggagtctataggccggccaggatgaccttgtatggccggccaaggtttgagcacaagctggtaggccaaaatgtgacttttagaccaagggaacttccgttcgaccaatggagcctgaccccttcaagaaaaaaagtgtacaaatgttggcctccatcttcgaaggctggcctccatctctaaaggccagctttcacctccaaaggttggcctcctctttccaaagttggcaagaccttgacctgcaagatcttggcaggagcatggcccaggccggccatggttccaaagccttgaaagggtcagcaaaggtcccatgactcaaccaagaactgtccagggtcaccaaaaacaggcatgaatcgactagctttatagggtgaaacccaagagctgaccaactcccatgattaagtcttaggaccgatcatgtctcaagcaagacctccaaggctggccaaggttagttttggatccaaatgtttgttttttttgaactcgaatatgtgcctcgtgttctttatgaatcaaagagtcaagaatcacaacgaaggccgaaattgtatcttttctatcaagaagtcacaaattatacattaaaaaactatcacgtggatcaaaataccaaaaatattacaatctaacatgagaatcataaagtttctaaaagcttgaaacttatcaatggtaggtacaaaggagagatatcaaagaaaagaagatgagacgtatatagagaaagaagatcaaagatctaaaagca

SEQ ID NO: 387731 - DNA, 799 bp, Cannabis indica
aaataacatcacccaaaggcctaaaccttatcccaaattctctctctctctctctcttcctctatcattgccaacttctacgctctataatcatcaactccccacggaatcaaatggccatcataccaaatcatttgtgggggccatatgtctatcccttctcgtttgacacgtgtcacccccttatgttgacacgtagcaggttggatatatctataatatttttgtttccttagtcatcccttgtgtataataatcataaagcatatatatacacacatgtatacatggaaaggtaggatggtgatatgatgacatgagaaccaccactattattagtattttctttttatttttatttttggttttatgtctcactaatttgctttgtaattgtgattttgaagtttgtttaattaatttcagatggttcattattgaattgtatgaaaagagacctaatataaacagtttttcattatcatataattatatatctattctatataaaatgtgtctatataatagaatttttagtttatgaaaaattattggataactatttttttaaataaaagaataacaaattattaacgtaaaggataagcattatgtagttagttaaacctaaatataattaatccacctaaagtattgtaattaataataaatttgttcatattgtttatttttttatgaaaaattattttcaaatttacattaggtatatattattaattttaaaattatgatattaaaaaaaactaaaaactaaaataaaattaaaatacgtacacgt

SEQ ID NO: 387732 - DNA, 1167 bp, Cannabis indica
aaatcatcatacacatatcaaaccagaaatataaaacacacagttgaaactaaatggcttggaaatacaataacccacgagaattatactttcagatcctaagatcaatgtgaacttagtcctagtcaagcttgaaagcactaccaccgttctttattgattgagaataagagatatcaatctaacccaaaccaacataatcacaacaagtctgagaggagctacaagaaaataatcacaataagtctttcatggtgtaatctctcaaaacttattaactcactaactcaaaccaacataatcgtcaatgttgctcaatacaatttgtcaatcccaactttctctatatatatttatataatagtcaacggacataaaatacttgcttttgacagttaagttagtttgatgaccaattgatttaagtgaatcttggtttgggttttaagaaataattccacaaaatacttaaaaactatattaaatatatataaatttgacatataagttcccaaaaattatgaatttttttgtttaacaatgggcaaggatccattaacaagaccaagtttgctttttgcacaaagtgtcattctgattgcccaattctataatctataataatctcatgattagcaattgtgtcttgtttgattcaagtgaatgattatggagatgataatgatgggaaagtagagttgctattattatctgacaatgatgaagaacaagagaaaaattcttgctttgataacatgtggataaaagataatagaaaaattattgctctgataacatgtggataaaagatataacgtgaaaatatatcattttattatcagaagatatgtatatataatggttgtaataagtatataaaattaaaatatacagattaaaaaaaaaaaaaaaagaactaattattacccgtgtatacattattttgactagaaaatactacaataaagatttgttgaataaaagagctaaattaggaaggaaataataaaggcaaaaacagagagaaaacagggcgtaaaatctggtgtgtattgtattgattgtatattcctcaataaatgtacagtaaagatattagcagatatatagtacaaggaaaggaatcttttcctaacaataaaatattccttttgccaatgattagct

SEQ ID NO: 387733 - DNA, 763 bp, Cannabis indica
aaaaaaaaaaaaacttttatctagaatccatgcaaaggtgtcaaaatttcaaagaatgtccagaatttctttttttttttaaaaaaagaaagggatgtcaagaatttctgataaaggctatcttgcaaaatattgtcaaagtatataaacatatcaacaactacgagtatttaaaaggccattttgcaaattgcaccctccaaaaaaatcacttgtgtttaaaatttctgatagaatatcaacgactacaagtatttaaaagaccattttgtataaaatcaagataaatgttgatagcgcaactttcgaggctactaatgcctatggtacgggtgtcattgcctgaaatagtaaaggtttagccattgaagtgttcttgactttactgctttgggagtactcatccgattccgaatgttgctgaattaatgagtatcaaagaggccctcaactgatcaaaaccaaatggacaatgcaatgtaattttggagacagattgtctagttgcagatcaagctctttatagttcagttgttatggcttttatttttggtcttattgttcaagagtgtaaatctcttctttcctctttaattcatgttcatgtttattttgttaaacggtctgcaaataaaactgcacattaccttcctcgtagttcttgtttttagtcttatggtatgttttttgagaagaatttcctctttctcttctttctattgtaatggcaaatttggctatctaataaagctatccatttatt

SEQ ID NO: 387734 - DNA, 615 bp, Cannabis indica
ctttatgattaacggttttccatgttatatttactaactcaaaataaatataggtcttattaatagtaaaatgtaccaataacatgatgccataagtagttcttaatcttatatatggtgctcgaaagatgcacgttagcattttttttaaaaaaataaagggagtttatcattattttttatttttgtcagaaaaacttagcttatattaaaattcctttatatggaaaatataaatacatatcttaaaatttttaattttagcaaagaaattaattaaatcagtgttatttacgcacgccaactcttcatgtcatttttatttggttttttaaaatcttaatttctaaataattttttagggttttttttaatactttaaaatagtttatttttgtatttttatggaaatctatataaaaattcctatagaaacaaacagaacaaactaaattgcaaccaaaatctacatagaaattactggagcaaccggccaaaccgttaatttaaataaaaaattaaaaattacatatgaagtaattctcctactttttaatctaaaatttatttgagcatgcaaaattcttcatgaaccacatatgatcacacacccaa

SEQ ID NO: 387735 - DNA, 716 bp, Cannabis indica
aaaaaataaaaaacaaactgtaagtaaataataaaggaaaattattataggccatggtacattgaatcaaaatttagtttgatttggtaaagtggatgcactcatacatacctaaaattatcattcaattggtccacctatagataaatacaaatgagaacaaaaattaaggagtagaaataagttttttttaaaaaaaaaatagaatgaaatggatggcattaaatttttatgagaattttttttaaacacaataaatttttatgggattaaacatatattgtttttagtaaaatcttcctcatcacaaatttccacatttttctgctccatttagtctcgtacagagcacgtttttttttttttcttcaagttcttcattttgttacttcaagttcttcatttttttttcattttgttcttcatcgacaagttctttgacgaatttcgtcaggagcttcttttccattccttaagcaggccacatgagcaatggctctaaacaagcaccgaccatcagcaagaatccctgtcatattcaatgcttttatcgtatccatcaccgatcattaaagaataaaaccctaggtaaaagtcgagggagctctaggaagaagaaggggagtgccattcgagttctttgccattcacaatttcttgtctctctgcatatttttaatgatagacaaacatttataaattaatattttttaatt

SEQ ID NO: 387736 - DNA, 661 bp, Cannabis indica
aaaaaaaaaaaaaaatctacttactaaattaataatatcttttcccacaatattctaatttttttgaaagaaaccccgactcatgctgtcggggccgagggacttatccgaatgcatttggaataaagcattcgtgacttcatcctcctcatccgcctctaataactccatattctgatctgctgtaatagagggccgaatacaatgaacaacacgatcccaacttgtatctaaagcttgaaacaagttatcaaaatagctaatcattaactcttgtaaattgtttttctaagtgactttttgaccagcttcattgcaaaggctgctaatatgattggtgcgtcttcttgttttagcaacagagtgaaaatattttgtgttttgatcgcgttctttcaaccacatttgctttgcccgttgcttccaaaaaatctctttatgagataacacctcataaagttttttcttttcctcctggtatttagcagttgactccacatcctctcttccttttagtgttttgacaattttcttacattgctttattcgaaattgaaattgcatgtaatttactcatcccaaccagcgagtaaagtccttttttggcaagttagatgccaaaataatttttacttcatggtaagatttatttgcattcata

SEQ ID NO: 387737 - DNA, 1656 bp, Cannabis indica
acttatacttatcttatacttctatttattatatatatatattttttcaattaatcactagttttctttttataagggctaaaattaaacaaaattaaattaattatatatgattatttgttgtatcattcaaaaataatttagggtgattctacaatgcactcccttaaaatggatgtactggtgcatccttaacttgtttcggcatccagaaaaattttttagtctaattttttttttcatattcatgtacgttatagctatttaagatatactacaaaattttgaaaaattcagaataatttacgatatagaaaacaatgttcaaacagtctattgtacacgcgtataaaataaaatagtcacgagtgcaacacactgtttgaacataatttttggcatgttaaacttttccaaattttttaaaattttgcaggatgtcttaaataattataacgtacatgcccatgagaaaaaatttgactaaaaagttatttcggatattaaaacagatagagatgcatcaatatatctattttaagaggatgcactttaaaatttttcaataatttataacatctaaaataaaacaaaatatactacaccaaaaacataacttcaatctaatttatataaatgagagaagtaagtgcttggagccggctaacaagtacatctacaaaagataataatttcaattttaatgtggtggtaattgcttttggaggtcatcctttcgcattgttccactaccacaggtgataattactttacattacactttccttttttttttttttaaacttaatttagaagaacttttttcttttacaaattatcaattttttaaaatagtaaaatagtggtacatttaaatattttctttaattataatacaattgatcgatgtaatatatattagcaatattttttagtgggtattatttattatataaatattaattttaaaaatattaaactattaaattttgattcgatagcgaataataattaagaaatttggatttttatacttaatttagccatttaattaaagaaaatattaaaaaaataccttttttttacactatatcaaaaatatatttatatgaaaaaatatttaagtcaaattttatttttttttttattattttttttgccaatttttttttttttttttttttttttcaactgatggaccaatctcagcccatataatgtaaaatgaaatatttttctaattaaataaaaaaattaatcataaaaactcaaaattttctaatactactcatttatgggtaatacccattaagagtccacacattaggaatagtacttttataatactttttcacattaatttatcatattacatataattcaaccatacaatatatttcaattattaataatatagctaaatatcatcagaagttataaatttaaaggtaatcatattttttttaatttaatatattttaattaattaaattattttgaactcaccttacaaaacttaaataatgagcattgctattgtacacttggtacttagcacgtttaggcatgtcgtcttgagattagctagcgatactccttaaaagttattaccactacaaaaaaaaatcttacttttagtcacagcaaaacttgtaa

SEQ ID NO: 387738 - DNA, 761 bp, Cannabis indica
ctatcattgatggaactactggagatatcgctgttaatcaataccatctttatgaggtatttttacagaaaaaaaatataatttttcttatgtgttcatgtatattgcagttgtaacttgtgtgtttatataatagtattatgtagttaattatttatgatattttttggaaattaatagaagagaaaggacacagtgaccaggcaatcacttattactcttgtctagatatgaaagatattgcttgacgttgacttaaaaaaaagtaaactttagtgataagactattgaaactctacagcttgatattattggccctttactttttatttcattaattatttcatttgagaattgggtactattattagtgtttagtgttcttttttttttatatattatataaaaatgcttttctttttacttgactaacttattactttgattctgtaatgaaaaacaggaagatttgaatctgatgaattatgttggagtgaatagctaccgtttgtctatatcatgggcaagaattttacccagtatgccttctcatctcacttaactggaaaagcttcagttctgttttacattatagtaacagaatcatagtgattatatataattgtgtactcaattctggaacccagaaggaagatttggacaaataaattgggctgggattgattattacaacagactcatagactctcttcaacacagaggttttctctctctctctctctctctctctctactactac

SEQ ID NO: 387739 - DNA, 691 bp, Cannabis indica
ttgttattaaatattaatagtgctcaacaatattttttataagttatatgaaattattttaattaccaatattattgaaaaattattttattaagttatataaaattaaatactttaataatatgatactgaagaaattgtaaggctctattaatatttttttaaaccattcttttttatttatatatatcttataacaaatcttatcaccatctcgaggtcgaaagcacattttaaattatgtgtagttgatttccttaaagaaaattaatactaagtcgtatgtctctccttaaaaaaagacaaattgatgcttacagatttgtaaatatatattttggtatttgattttttaacaaccatacaaaaaaaattaatccatgtggtcattatttgaggcacaaaggtaggatctcaaatttattgggcttaattttctttcttttttccttcttcaaccgagttatgttagtttgtttgtgcaagcagttttttctaagaaaatagttgaattttcttatgaaaatagttgagtttctttcttacacaaacagacgaaataattttgcattagtctcaccttatctcggtcaatagttaatttccacttttagtgatcgctacacatttagaggtcaatttttttttaaaataacaaaataataataataataaaaaaaaaaactaattt

SEQ ID NO: 387740 - DNA, 1419 bp, Cannabis indica
tcagaatcacagaacaattttatggcggtatcagagcattttgagagatgaataccataatccagattgcctgcaagatacctcagtatacatttgagtgaaatacaatgtgcctctagaggagactacataaattgagactttatttattgagaatgctatgtcaggtttagtgatggtggcatattgaagagcaccaacaactgatctatactgtgtggaataatgtactaaatcactgccaaattgagataatttcaaaccatgttgcataggagtagaaatagactttccagctggcatctttgtttaaataagtaggtcttacaaatacttcctttgagagaggtgtaccccaggtatggtgtgagtgacttgaatgcctaggaaataattgagatctccaacgtctttaagcgaaaattaagagctcaagcttgagataatgcttgcaacttgagccattactgctagtgacaataatgtcatcaacatagactaggatataagtggtatgggtctagtgaactttgataaacagagatgaatctatttttgcttaatgaaatccaaactgagttagagcagctgataacttggaaaactaagctctggtgcctgtttgagaccatagagagctttgtccaattcgcataccatattaggacaagtacattcaataaaggtaagtggttggaccatgtatacttccttgaagatctctagtatgaaaagcattattgacatctaattgtctgagtttccatccttttgtaacagccaaagtgagcaccactcgaattgtttctagtttaatgacagggctaaaagccactttgttaatgatacccttttgcaactaaccgatctttgaactaagatacactgccatcagagttatattgattcaagaaaacccatttacaaccaattagttctcttctagcagaaagtttgacataatgcaaggtcttatttttctttagtgttgtcatttccttttgcatatctgcaaaccattttggatcaagaatagcttatttaatagtggatagaaacattgaagctatgtatactttaaatttatgaatgacatctttagatcttgtttgcatatgttgatttatgacaacaggtgtagggatattgttgttggaagatgaaagagaaggggcaattgctaaagtgttgttgggatgagaaactgtttgagatgaagaagtaggtgttgggattttatgccctaaataaaacccattacaatctaatatgatttgtcaacaataaaatattagaaatcatttatgcttacatgttgtattcatgtttatggtttaatttatatacatatatatacacaaaatctgttaagtccagaacatatagacatacacgattacagtattgtcaacacagtgg

SEQ ID NO: 387741 - DNA, 642 bp, Cannabis indica
atatctcatctaagccaaaatagcatttgtaaatgattgatcactccaacacctaaacccagacttctaaatgaatagtccttgcatatgctttgctttgtttctagctttcttccatggtagattatgaccaaaagcttttcattttgatgtgttaaagttgttgaaattggtgttgtagtatttttctctttttttctgtgagctttgtagatgtctcagattgcaggacatttttcgctgatctgttttattattgtaacctggcaggctttgcaagttgatgaactaaacttagctgatattggacctaaatttgagcatcacgagatgttcccagcccgaaccaacacaggtgtgttcattttttcgattgtggtgtttgtggagactggtgtatggattttaattagtacagatacagcaagtaattatgaaattgattgactttagttcttttgcttttctaaacttgtttattgatcaatctcatgttttttattgtcagaattcgtacaagtgttctcaccttcacatgtcaaaatgcgtgtttgggagcgtggggcaggttggtgtgctttcagttgtttttgcgataagctcactcaccgtagttggttttttcaacttcattgcttaact

SEQ ID NO: 387742 - DNA, 1514 bp, Cannabis indica
tgttatttttgttgttacatttaggagcaaaggaggagtcattgctagttactgcaaccatggttgtgccaccgcagattctggattcacttgaaacacgtgctttgatgatgtgttttgccattttcaaccttcatcgaaaacttttgaacgaaggtagaggctcttgattttggatgaaatcaactgtaccattgtacgtctctggcaaggaacctatgagaagtaacacgagctgcccatttgacaccggggcatcaacatctgcaagagattgaaggtaattgtagtagttgtcgatggtatggtgttcctcaagaacgacaccagtgaagtcttcttcgaggttggttgctcgtgaagccttattatcgtaaaataaagcttcgagttgtttctgtgctccctcaattgtgtcatcacattgttggatagcaaggagaaggtccgaggaaatggtgccatatgtccactggagaatcatagcgtcaaaatgttttcacttggcagggttagctatttttgtagcaaggtatgttgctttggcaagttcctctgttggtggaacaatatgatcgtaaagattgtgaacctgagtaaggttggtaaacaaggcagcccatgggtgatatagagcctgcaagttatctaatgtgataggaataagagatttcacatttgtgatagtgagggtagggtgaaattcggtgcgttcggccatgcttgagagtgagaagaagaatgggagaagaagaaaaagatgagcggatagggttcaagagataggatggaaactatatctgataccatgaaggaaattgattttatgagaattgcattacaagtcaaagaaatatatacaagttacaagcataaaggctacaaattagctaaatgatgcattcatttggtatctttctcttcaaagtttacactcatggtgtgaagaagacatttagaaaatttagcttagtgttatgttcattaaaatctcattgtctatgtgaggagcatgaaggagcatgaaggagtgagttagggagagtgcttgagcaagagaataaaattaggaagtgagacagggaagttgaaagatggcgatatggtgagacagcataaaagagcggggagccaaactcccattgggcgtacatggtgggagcaaggagctaagctctcatttggtgtacatggtgggagcggggggctaagctcttattgggtgtacatggtgggagtggggaactaagctgcccttggtgtgcacatggagggatcggggagctaagttcccattagtgtctgcatggagggagcggggagcttccggttgcatgcgaggagctcctcaggtctgagcagacagtggacagcttttcgcatggggagctcaacccgtgccttggctcctcctcatgttggctcttacactcatgtggtgtctcacatttgttagggtttatatcttaaaaatgcatataaagacatttcttttataaataaaagttgaacat

SEQ ID NO: 387743 - DNA, 1481 bp, Cannabis indica
aaataaataaataaataaagtaacctccaaatgcgccaaatggcgcgtcaaccttctaccactagcaagtggaccctgcctgacccatcacactttatgctgaaaccgtataaaagaaaaaatatgtcagttaaagtaaaaatgtaaatagataaagtttttagttagtttgtgtaaatattcctccataatatatgtacttatttctatgttctcacttttctaaacaaaaaattatatatcaaaatgtgtcctgcttgggtatgttgcagttgtgaaattttaactgtttttttaaaaatttctttcccacttttttctgctttcaattttttccttcttctcttcttgcgataatgctttaactgatgtgttctgtattggttttttttcgcattttcttcctatgtcgtgatggatcccctcttataatccctggatttaacattaactcttactgaagaagaaagttcagttgttgttctgcatgctgatgtcgtccctgcctcggtaaacacctctagccacatccttattgcacgggtcctcactgataactatgttcatcaacctaccttctatgatcaaatgggtggccattggaagggtagatttcctacaactatatctgaatatggagatggtctgttcaaagtttcttttggatgtgcaggtgataagtatcgagttctgaacaaagaaccttggcatttttaaaaccacctagtagtcttttgctctccaaatactttgcagaatgtcacagtgagcaacttgtcaagcactcctttttgggttcaaatttaccatctgtcgttccttagcaagtctaaaatgcttgctactgccttggagaacatcattgggaaatttagtgatgtccacgaagaatcccttgatgagggatggggacctttcttaaggattatagtaagacttcatgtggacaaaccacttctaagaggtcgtatgatcagtttgccaaggatcaaagacgacttttagattgattttaaatatttgaacgattaccaaaattttgctttgaatgtggtagggttggacatccctttgaaaaatgtgtggctttcatggagagaatgggcgatggtaatgaagatgatctcttgtatggtccttggatgaaaggtgcgaagttaccaattaatggctatgacaggtatcaagctgatttctctaaggataatgcttggccactcttgacacgattggctcataaatctctggtttctacaattccaaacctggatgtcagatcacaaccccaaccgaagatcatctttcatggtaaattgtctactgctccttcaactatggctatgaattttggtaatacctctatctccttacaccaaaacctgttggaaatattttaccaggatctagatttactaccaagtatttttattaacatcctaatatgaattctaaaacaataaaaataaacacataagagttta

SEQ ID NO: 387744 - DNA, 768 bp, Cannabis indica
ttagttatggtacaatataatataatttaattaataaaattttaaaaaaaaattataaaacatagttaatcattatattaataactaaatcgttttttttttggaaataataaaaataaaacatgtacttcttacctcttgaaatattgacattatagtgtaaatgacaatattttgttagactctttcgaataaataaagatgttattaatcctttatttttgacaatttaattaaaaataaagtattttaaaatttaaataaatatattgtacattatcgttaaaatattaaaactatttgtgcaccataaaagttcccaacgttgatttttattttgtaaaggttggaagactgatctacttgcttaagtgcatatttttatttcaacgttgactcgtgctccagaagacaacatacacctcactatccaattttctcatacgacctaatttgatcgtcgttttaaggaaactaagtagtggatgggcccatcgttggattgcgcattctgctgacatcatgaatccaaccaataactgaatgccacgtttccgtttgtctatcacccatgttatatgagtcccactaatagctgtcgtccaattatcaggtcactaatatagggaggggagcccctctaccaccaagccggcttgtatctttggcttcagccaacttatccgtaatgcaactttcaaaaccgtggaaaaaagtagagatttttacacctcatgtcaaaattgacaccttttttacatttttatc

SEQ ID NO: 387745 - DNA, 889 bp, Cannabis indica
gcttgaagcgaggacgttacatcagtaggggagaccctttgaagaccgtgaagccaagtcgtgaactcggcaagggtgattcatttcattgtatttgtttattttagtcagtgaggtttctctagaatgcttttgaatgctgagatgaatggtagctttttggggttcaaagtgaattggcagtgccctcctatttcacatattatgttcgctgacgacactatgattttttgtggagttaatgagggtaatgcagttacagtgaagactatcttggatacatatcatttgtggtcgagtcaaattattaacaagtgaaagactaagggtactctttatgtcttgcaagatgatgtcattgctatcctgggctatggtgagttgattggtaggggtaaattcctcgaaaatcattttttcctatcaaatagtaaggtggttgatttttgtttttttgtggacaaggttaaacaacgaattcaaagcttgagttgcaagcttcttttccaagcagatcgagctaccttaatctgtagtgtggtgcaacctttcctatttatttgatgtcatcatttctcttgcctaaagctatctatgaggatattaacaaggtaacccgtaaattttgatgggtgggctcaaaggagaaacaacattttttggccctcgactgttgggataaactttgtaaggcaaaggattgtgagggttttggtttctggtgttgtggagatttcaataaggcccttatgtcgaagcttgactggattttaatgtttggatttgaggctctttgatgtaaaatctttaagggtaagaccatctccaatggaagatctaaaatttgtgttaaatttagcacaaaaaatgagtttatgctatatttgac

SEQ ID NO: 387746 - DNA, 1344 bp, Cannabis indica
ttacctgctccttcacacaacagaaccgaggaaaaaattcaattgttacaccattatcagaagttaactttgaaacactgactaagttctttgcaatttgaggaacatgcaacaactcattcaacagtaaaggtttcgaactgttagtatgtattctaccagtaccaacatgcttaatttgtaacttactgccatttcccacagttattctttccttaccagagtactcagcttattgcccagtttgtctccatcggatgtcaagtgattactagcaccactgtcaatgtaccagttgtcatccttgaccagatctggtgtagccacaagagcttgatgttgttgctgatgttgattgctgtcttgcccaggtggttgtcccatataagtatcatcgtgcctgttatagcatatggctgcagaatgcccatattttccacagatctgacaagtaggtttagagccgttacctcttcctgatcttcctctaccacgattgtttgctgaacctcttccacctcctgagttgttgggatgatatggctttcgtggaaaattgggactgtgtggtttttgagccatgttagcagagggagaacggaattgttgagcatcttaatctgagaagttggctcatttagcctttccaagcgaccgtcaaaaccaagtagaatactctgtagttcctgccaagaagtgtgaggtctagcctcgatttgaagaactataggcagataactgatgtccaaacctgaaagaacattggaaactaaatgagtttcaggatatgggtcacctgctattgccaaggagtcggcccaaacacgtttttgtctgagataatctgtcatattcatggttcctttctttgttgtttggatcttgttacggatatcatcagcatgagctcttgagtgagctccatagagatcttccaaagcagtccagagagaagctgttgttttacaacccattacttccgatgctatgccttctgtcatagatccatacaaccagcccatcagcagctggtcatacacaatccagctctcatgctcggggttgatttgaagtccaaaacctggtgacccatctgttccaacgtttgctggaataaactcgggtggacaaacttttgggccgttcaagtagccatctaacctgtgtccatgaattatggtagagaccatggtcttccatagtgtgaagttctgcctatcaagcttcaacgagaaaggctgactgagagtcttactgaaagggtttattccaccagaaggattggaaagttcatatttagggtgttaatcaacatacttgtgaatagatctaagatcctggtaa

SEQ ID NO: 387747 - DNA, 1289 bp, Cannabis indica
aagaactttaggcttgaactacgtatgttgagctgatatggacgacggtcattaatatgaataccacaatcaattaaccacaatttttcaagggaaggggaacccaacaagagctcatctaccgcagatgtatctaaaaagtcaacagcagtcaatgacaaggattttaatgatggaaaattatatgagtaaccagaatgcaacatcaccatgctcaactccaaaatggtcaaatgtattgcgtttagtgctaatattttaggtatgcagtagaggtaaatgaaaccgacctcaccttccacttcctcttcctcttcgctcaagcaaaggtttaattccttaacttttttctcaacagcaaaagttaaccatttatctaggtaaagattcttggttctttcatagcaatccatttgaagcttaaaactagttatgactgaactgcgattataaaacatagctttctttcggtgttccaaacaattgtgtatataattgcagaacttttcctggtcctgtgaagaattataacgagaagcagtaatggagaaagagaggttggggactaaataccacatgcgtttccaacgatctgaaagaaagcttgtggaaacggcatccacagtgggaagaaccaagaggatgtgtacaatgagctcatcagatagtttcgaaattctgtccacaacatcctcagatgatgatgatgatctcgttttcagtcttttcttctccgccggaagaagaccgttttcttcaacgccattttcagccataaaaatttgacaacacaatttatcttccattaatcttctcctttagtaacacggcaaaagaagaaatacaacaaaattcaagtcttctgtagaaatcaccattggagctgctaaacacaccaagtcactgattttttataagcttttcgttcacttgactacttaagtccatttacaacatataaatgaagtaaacacattaatgtaaagattaagaattgggccagatagcataccaagttgaaaaaagctctcaaaaacagagccctttacaacaaattgcagccaatttagtagtccaaagcttaattcatcaacataccactacgcaatagtagttgagtaatattcaagaccttttattgaagcagaggttatcttgaatgagtccaaatattaatttttgagtcgctaatattcagtattcaccactccaaagcaatcatatcccattaaattaaaacattcacctcataaatgtattaattcattagatttgaactttttaaaatt

SEQ ID NO: 387748 - DNA, 1021 bp, Cannabis indica
ttggttgatcgtcatgtcgtgctaccttattgagagaagctcgttctccaaaagctgcaatctcgtatcattcttcttggtgaataataatgcaaaagtatatgcttccttcagtgtctttgttgacctgatatgctccaacatttcatcttcaacatggctttgcccgcttcaacattccatctcttcaagcaaatgcgtcctccagttgtgtgacttcattgccaccaacgatcttccacaagtcttgaccttggagatatgcctccatgtgcattgaccacgtacatattgtaattttgattgttcagtttcttaattccgctgaacacttgaaggtcactcatcgtgcaacctttgtagtactaaatcacacacaatcactgtaagaaactcaacaaacaactctttgcgtataaaccgacccaacccggctcttatacaactttttgagcaacacaacacgtgaaaacataattactttattattgtaaaagcaaaattacactaagacatgaatactttatcttgatcataatacacaaagtacactctttttatttactagacactcacacttaaaggtttacttgcatactatttgatgggacacttttagagttttgttgggacttagttgaacacactatgacacgctttacttgtacactcaagttatcactaactcatccaactctcctatttatactactcaaaagatggtgcattattatgctagaattttagcaaattgtcattttgttatagtctaaaattttcttgaaacttcttatgactattaattctatataattttaagtaattctataatattccgaaaataataaaaaattcaaaattctttaagaaaaggtgttaatcttttaacataaccaaacagagcattgacaagaaagaactaggttttaaccttacaaataaagtgatcaccccctctgagtcaccttcttatatcttatcaataaagtgaatgataacattattatatatcttcttatat

SEQ ID NO: 387749 - DNA, 871 bp, Cannabis indica
taaatcgaaccttattttcaaaaagtttaagtgttgattatccaatagtattttgttaagcataaaaaatgttaacataaataggtgcatcctactattgaagaaatgctaataaagagctttccctttcgatgagtaccaaatcaataaaaagagtgaagaatttactctccatatataggcaaaaccaaataatatgagcttaatttcatacctgatcatatcggagccagtactttcaaacaattataaaacccttaaaaaaattcttagttgaaatcttcaaacaattatttagaacagttgaaattctttcaaaaatgaaattgttaactaaattacaaggcgaaccaaacttagaaatttagtgggataagaaaaaataatgccttactattgggatgtggcagagctccacctccactgttactcttcaagtcttgctttctccttcatgaaaatcataatataaaatttagtctcaagattttcaaatatatcaagattgtttcagatataccttaaaagaacaccacaaaatagactaaagaacaccacaaaattaagtaccttttaaacttagagtaaaaatacaggacatatcacatgatgcaaaaatagactaaagaacaccataaaattaagtaccttttaaacctagattaattaaagaaagcagaacaatcctaaattctttgaatgggattttagtcatgaagaagatgtaataaatacaaattagtattacacatgtaatctttatttaccaaatcatcaataaataaaaatgacatctattatgagttgaaaattaggtgtacgtattacagccgaaaatgcttttacttcacaataataattatacttccac

SEQ ID NO: 387750 - DNA, 738 bp, Cannabis indica
atagtttaatttctaatactttatttttgattttcattttcattaatttttctaattcatgtgtttattttttttttttactaaaaaatttcacataaattttttgtcataatatttaaaatacactttaattttgtttgataggtatatttttaagaatatagaaatagaaaaaaaaaagttaaaaaaaattagtacaattaaaaatataaattttatataaaataaaaattatcaaatggggtgcctttaaaactttttagggtgtaaataaaatttcaccgtactactataaaaatgtcttcattgtgtgatagttctatagataattttaccctttgtaaaaataaatattaacaactttgccattttgttgaccggtcaaaagtcaatttttaactcttcctttttcttctcaaatctaaacattaacaattttcccattttgttgactaagtcaagttttaactcttttctttttaattttttctaagtctctttctatctaaatctcctccttctctttctcacaacactactaacattaaattgatgataataatgaagattattagtgtgaaagatgagtggaatagaggcatatatagctctagctagctgacatgtatcttagaaagaatgcagccattaagggccatgacagtgaaggcgcagtgtctaacggtgccgctcactttgacatagttcttccaagggtattggtacataacgaccatg

SEQ ID NO: 387751 - DNA, 511 bp, Cannabis indica
ttgttaattatgaaaaggattaatttaattatagctaaattcatgtcatttatgatatgcttttgttttggataaaataaaaagctagtagaattggcataaatattacgaaaaataagctctttacatgctaagcacactaaaaactgtaattaacaactaaacagaaatgatttgctttgcttaaatgtaattaacacaaaatagagtcttctcattttagcatgctacagcatcaataatatatttgagtattatattacaaattcctactcaacatgttgcttaaaaatatatacagaaatattttttttataacaatattcgttatagttagaatttaattttccttttaatattttacaatgtcaaaaataaatttaaaattttttgaatacgcctgctacgctaaaataccaaaaattatgttttcggtagtattaattattcgaaatctttcaaaactttacaacataaatattataactataataaatactactataaaaaa

SEQ ID NO: 387752 - DNA, 761 bp, Cannabis indica
atctatcgatctttgacatcttttatcttggccatggtaaatgagtgtactacaaattaatagatttttgaatcaaatagtacatttcactaaaattatgttagagattaattcaaaattatcatattaatatataggtatgatctactaaggatgggaggaggggccaacaaataattaatatacatttttttttttaacttttctcttttcagtatacactgatcacttagtatttaaaaataaaagtaataatatcatgtgtatttcagagaaataaaatgtacacataaatcacataattaatatttaacgcatacttatatggaaagtcatattttttaggactcatctttaacaaaagataatataaaattacttctttataggtgtatataaagttatatgtgtacatatggtcaatactataaaaagtaaaataccattatacaacctatataaaatattacaacataaattagtcaacttatttaatcaaataatctgagcttatgaattagtaattatgttaatatattgtatttgactactagtgattaattactaattcataagctccgatcatttttttggtaagaatattttatctatttgattttacctaattaattaacgatatttataagtactaatttattaaaaaaatgataaaatatttatgaatcgttaggtaataatagtataacccgatcacatggtaataaatcatgtaatactgtgtaagtacgtatgattatttt

SEQ ID NO: 387753 - DNA, 1350 bp, Cannabis indica
tggaggattgttccgctgaaatatgttctattgttttgagtgaaatttttaattaataaagcttttgatttttattaaaaaaaagaaaatatagatgtatgaatttttagagataaaatgtgatacaataatttaataaaatggataatttaaattaatataatattaatttttttcttttattaaattaatatgacaataagaaatattttttcgtgtaatttttgatgttaaggttggagtgaaagtaatttttaatactaaatttaataatagtgtaattaaatttagtgatataattgaaggaacttgacgcttttcaaattgtcttttcttcttaaatctgaaggaaaagagtgaagaaagctaggaaattatgtattcaaaaaagaaaattagtatgaaatggtaacacattttccccttaaaacataaagtacaacttaagtggacgatcaacttctaaacaagtgttagtgatgtgattgatgaggatgtgaataaattgatgactacacgaaactcacaacaatatggtttccacgtgtcacaccctcagctaatatattatacaagtgagtggtagttgagtcggcgtaatggctacgagctagtatattaagtggggttcatttcaaatatatgccccttcccttcgttttggtcagtgggaaatatggtcctattgattttggactaataaattcttcaattaaaaattttgtggaccatttttcactaacccactttaattaatatgaagtgttcatcaaaaactttaattaatatgaagaagattatatgcacttttcctctctaaaagaaaaatgaaatggaattgtgatgatagtcccataaagtagaagtgttcgcaatacggatagatggtgtatatttaggctattttttaaaaccactctatatgtgggttttgtaaatttttaagagtaaattacggcataaatacttaatatttttgattttatacacttaaatacttaatgttttttggtggcaaaaatacctaatgttacaattctcttataccgttactaccagtacttccgttaacttataaatatagacacgtaaagggttcagatgcattatatttatttttattttatttgaaagcttaatattcttaacatcaaaaactaaatgctacttgtttaaaaaaaaaacgtgttctcattaacaattttcacatgatattgacacttcaattcgataatcatgtttaatatactacactggttcactcaactatggtaatttagtattgcatctctcttatttttttttttttaaaaaaaaacaagtaatatttaatttttttatattaagaat

SEQ ID NO: 387754 - DNA, 1421 bp, Cannabis indica
atacgcaatcttacatcattacgagccgctgaagatgaagtctcatcatcaatgctagttgctttcagactatctaagccaattatataagaaaatacagaactgctgatgccaggcaatatttcttctaaccaagatctgacctaataaatcatcaaaaattaaagtaaatcaattatgacttcgaggctttaataagtatcttcaagggaatattaagactataacaaacgcctcaaaattcagtttttcttccctcatttgaataggctatcatatacataaatagcagtggcaaaaatcttgaaacatatctaccagaaactctgcagtctctataaccacagaccaggaacacaaaaataggtttccaatagagtcaaaatatggtaatctgtaaagaaaaacaagatcactagtcactatgctcaaatagtgaaggcaaaaacactgataaaattgcaactcctctaaccttaatggaatatgacgcagggtaagattgtaaaaaaaataaaacaaatcgctcactttaaatgacttaataaaaaatgcaacagaaacattctaaacatgcaaaccacatacacaagatacggaattcaatgctaaattaaccaagaatcaaaagaccataggaatattagtaccaccaaaggatattctgttggagcttagagcggtctttgaccaaagcaagcaatgagaaataacaagggtggctaccatcattgtataggcttaaaaatcaaatttcattggtagcaagagaaagataagctctctttagtgattaactacgcacccgagctccaaataaaacttttaagcacaagcatggtacatggagagaatgatcctcctccatttactgcttatgaaaaatttataaatattcacctttggaatcaactgcaggagcttttcaggaaccaaaccagcagaggattctgctccagcacaaagaaccttgcaactagataagggagagaatgaaacattttgaagatcaataatctgcattcaaggacaaacagacaaccatacctgtcaattattgttctcctatttcattcggaatagagctatatgtacacaaacttaccacatcaggggtgacataagagctgggatccccaatttcgtatagaagttgttgagcacaagtgctgaaatttaagaccccaccactatgttctgcctttgccacacatactcttccatcagaacttatttcagcataaggatgtgacaaatcaaggagttgagacaaagacatgtcccgtcgtttgtcccctaaacaaaagaaaaaaaaacaaagcactatgaccatatatattatatttatataagaagttacgcttttgccttcaaataccccatatttttaggttgattaaactaagttcacaagtcacctg

SEQ ID NO: 387755 - DNA, 1133 bp, Cannabis indica
attggatctcacagcctaccccaactcgagaaagagaaaggagcagcctacgaccctagacatgaagcaccagcaaccgaaaaagtggattcggccaccaactggacacattagcatcaactgtgatgctgctatgaataccggtactgctggagtaggcacaggcttcatttggcgagactaggaggaaagttgctgattgctggtatggtttatcatcacagctgctgctcggtggagatggctgaagcctgggccattttggaagctctcaagcaccaacctcacacagccaacatgccccttgaaatacaatcggactgcaaaaagattgttgatgcaatcaaaaacagggacaacaagctaagtgctgttagcactttgcttcaccagattcaagttaggatggaaagttctaattgtacaaacattgttcatgttcatagaaacaataatgagtgtgcccatatgttagcaaggaaatgtcttgatactaagaatactcatattttcactcattcttttcctaggtggttagctaccttttgtaaagctgaccttccttgattttgttcctgttttgttaataaagttttaccttcaaaaaaaaaaatcatgttatttttctgtgtgtcggaaagaattttaacaaaataattatatgattaaatatactattttgttaatattataataattcttatataatcttcatttataatataaactaggaaacaaaccgcgattcacgtggggttgtcttttgtttagtgataattaaattatataacgattttagaatgttttgaatattgtattttgatcaatatatgtctaaacaaatattttcaagattgtatttgatcaaaatattaaaattatttataagaaaaatttatatttattgaaaaatttatgttttaagtaaaaatctatatttgagaatgaacattgatagtgaaaaattagaatgaaatttgtgtacatgtaactagggccggcccaaacattttaggagccttgtgcaaaatttttaaaattgggccctttagaaagaaaaaaaaaaaaaccatgtaaattaaaactacaattttattagtagctttttttaaaaaaaaattgcttcataaatt

SEQ ID NO: 387756 - DNA, 654 bp, Cannabis indica
tttagctttttcatccaattttctccgttaatgtcctacatggtgtattccaatattgtccagtcagctttttcatgacatgtcaaaattatattggtccacataatttaattctttacacattataaaaattatttaagaaattattttaaattaaaaaagttataaatttaagtgtctagaaaattaaaacataaatgaataaataaaagaattaaaaaaaaactaaaaaaaaattatttgcgacataaatactttatgttttcggtttcatacacttgatactattttttttctaaaattaaatactttaagtttcattctacttaggagtataaatgggtcaggtcagatttgatccgacccgatccgaatcatgtaatgatctgtctcgcccctcttgctagatcagatacttggatcagatcaaattcgacccggcttattcaaatcggatatgatcgaacccggtttattcggattggatctaatccaacccgacttattttttttaaaagaattttaattttatatctaaacttataatttttttttccaaaatctatcttttaagaattaataatacattttttttcctatatatttttcttttatttgcctaaatcaatgacaaggacaaaatattaaattctt

SEQ ID NO: 387757 - DNA, 1075 bp, Cannabis indica
ctggccgcccatgactcctcgatcgaatggtgtcaactgtgtgttggattggggtaggatcacactagttgctagagttttgtggatctagatgcccgatgtgattggttgcatttcttgaatctccattttcagtgtttccacccactctcggtcctcgtcgatcaaagatcgatctctatgcagctcactcccctagtggaggaagtgatgtaccctgaccggccatgggttctcctgttgatggctggtcggccagtggttgtacagtgggggttgctgttgagccagggatccctggccgggccccatgccgctagctgtcgggatctgactgttcttgctgtttgacctttaagtaaaggtatgtccttcctctggcaggggaagatccgtcctagttcctaagcaacttggtagcaatctatattcttagagacatgaagttgctttattcttccttctttacatttctaaatatattgtacatatatcaattgctctgagtaaaatcatagaaaagaaaaaattgcgaaagtttgaaaattatgaattattattggttattgatcttgaatatagattattgaacagtttgaaagttattaatgttatcgattattgatcttaactaagtgttattgataaaatttaaaagttaataattgttattaattactgttcttaaatatgtacaattgaaaatttgaaatttattaattgttattggttatagatcttgaacatgtattcttgataaactgaacaagaagaggttgaagtttaatttttataaaataatacagttttattataaatattataattaaatgacttaattgttaaaagaattataatgaatacttaaatatgaaaataaaactattaatattaatttctaaagagcgttttattaaatatttaaattatacattaattattttcgaaaaatagttaattatatatatttcattttaaaaaagaatttttacatgttgataacctgctattacaggtaacaaaaatgtaatcatcatgattacaataaaaatgtaaccattaagtagtcatccat

SEQ ID NO: 387758 - DNA, 984 bp, Cannabis indica
cttctattcagaacagggacccttatagtaaagccatatggagctctttgagtttgccaaagcatcagtttattctttggcaaattgtgaattctcaccttctcactcgtgacaacttgagcaagtttcacatccctcttgagtcacggaattatcctgtttgtgaagatcacttggaatcacatgaccacctctttttcagctgcgccttctctcgaagagtggtggaccgaacctttgaatggctggggaataatacttggccaatcaggtatataaattggaaagcttggctaactttgaacaattctagtctgataagaagaattcaaattgccattcttgctgctgtgtgctatggtatttggttgaacaggaacagatgcatttttgacaattgttctagatctgatttgtctatagttgctgaggtgaaaagcattgttttgtctagattacatcttgtaaaaaaatagaaaaatgtctagacaggagagattatttgtcaacaagattcgatgtaattaatttgttgttgttgttggctctatagcttgttggagagagctttgatggtgtatttgctaagttgattttgaatattcttcttaataaaaaaaatattagataattaaacgatacagtaattaatagtaatgaattaaatcttaaaaagttgtaagttgacgaaatgaagtcaaaataaaaactaaaagactaaggtgtctcgcattaaagaagtatatatgtggtattttttctctattttttttaataatgatcaattttataattatataaatctacaataatgtaagatatgacatgtaaagcttgaatattttgccttattttacaaaatactaattttgatgcattaattgaaaagattcaaaactgtttagaaatacacagtgggttttacaattaatatgtaaaaaggcgaatgatcattcatattaaaaacaaaataagtagttgagt

SEQ ID NO: 387759 - DNA, 1242 bp, Cannabis indica
gtgttgtgtctccactttgtcccccacttttaaatacttgtttgttctcctacttaaagataaaaacacaaactcccccttgtacttgatgattaaaaccatataatagatggggaggggccagaaagattacaatagaaaagctatgcaactttgatacatagatgtaattggatatcacttaaccaccgacctaccaatatttaaatgccacgtgctaatatgtcattatactacagttcagtacttccaatcaattatgtctttacaagagctttatggtggaaactagctagcttattgggccaaaaaatcttgattccccaattagttgttctttcaatagataactgtcatcgtctttctcttgttactgaatctattcaattttcaacattaactgtttgttctatttcttcttttctctcctcataactaattaattattttgagtatattcaaaaagagcattgttatcgaacattttaacactttttataagtggcgttttacgattagttaacgatatcacctaaatgctatttttaaagttatatgagactcgatatttaattacaccaataacagtatgacaccaagaaaaagactaggaaccaattataccttttaacaattctcattctaaaaatacatattttatgacatttaatataaggatatttgtgttgttcaaaaaatatataaggatatttgtggaataatttacttaatatttataattgttacacatatgaccctaatcaaaaaaattggcaataaaaatactttatcttacaattttgttgaagtcgtacccttttttgaccattaagtgtcaattcagaaacacatgacgatatattattagactatgtattaaataagctaaagtaatgtgtcgctacgcgtttttgagctatcatttagcgggcttaattgacacttaacaactaaaaaaaactacgagcaacaaaatcgtaaaataaagtattaccacttttttttaattaaagtcatatgtgtaatctataacctatataaaagtgagaatagctttttggactttcactaattgaattacacaattagccttcactatatattcaattataaaaaatttaaattaggcaattgaataatgtacactacttacttctttttcttctaaactaaacttcccctctaattaacattttatcttttgtgaatatttgtgaaaatgatcattttgtcttatatttt

SEQ ID NO: 387760 - DNA, 979 bp, Cannabis indica
tttttcaatgtctagttaccaacaatatcaataaaatactaatgtttggttaccaacaaaaacaaactccccgccacatcagctgctccctaatcctagttggcaaaactgtaagttaaaatagttggagctgaaaccagtcaaaaccagctttagcatccaacataaaaggcagccactctcctttaatcgagtaaggtttttgattccgttgtacattgtttcagacaataggcatagagagaactcaaagttttgagagagtttagagggatgttaaagtcaccctcatgtatttgattgaggggacttaagcgaggttaattgtaaatgttcttactctatttttctcttgcaaaatgtacatttggattcaagctatcctccatgtaaagtgatgatcatgaatgaataaaagggttgtaagttttgttttctttcatgtgttcattttaaattcatcttctagttcttgttcaacttcattttctggtttatggtttcttgtctttgctggttttgtttttgggatcaatcttgttactgctagatgattaacaatgtgaattaagggtgagtttttcaccacaaatgatatcagagcaaggtttcaagattctcattcaaaccttcaagattgatcttcaaacatcaagaaactgttgaaactaaatggctgttgcaagattcgagatggacaagtttaatggaacaaataatttcaatttatggaggattaagatgaaagcattccttgtgcatcagggaattcatgaagctcttgataaagaggctatgaaactgattgaagacaagaagaagaagttggaaatcgaactaaaggcatatagtgccattcttttagtcttggagatgaggtacttagagaagtgtttgatgaagaaaaggcacttgggctatggaacacgatttcttcaatttacatgaagaaatcactatgataactctagaaattaga

SEQ ID NO: 387761 - DNA, 1005 bp, Cannabis indica
atataatatttagattaaataatcaaatgacaaaatagtgattccgtcaaatagtaacatacaataggaagttatttagtttgagtacataaatcatataaaggagttggagatccttgaaagatgatataacaaattttataactcctcttcatattatcactcttaattagtaaattgagttactaattgtatttgattgtaattaaatagtagctaggaatatagttgtcggggacctatttttatcatttatagggtgtataaatgatataaagtcaatataggaagttttaaactgtttagagttatattgctaaatgctgaaaaaattggtaactagttactagttcccagattttgagattttacactacaagcgacatgttgcttgatcattttttcagcatgtattttaaaccttttttgaacattgtgttctcttttaacagctcccaaacctccaaatcactcatttaagtttataaacacccaatttaacattggtaacagccaaagactttatgatagtcatttatgttcaaatgagagtgaaaactctataaatagaggtcatattgttcacttaaaaatgttgttgaatacactttgttgtagttagaaccttgtaaggatatgtttattcttaaacattaggctaagcatatgaggcttgaaaatctttaagagcatttctaaagtttccctaagtgttcatgtgatagaggaaatcactcttaggacaaaggtcatagtcttggtcaagcctattgtgtgttctcgagtgttgttgttcttctttttctctagttttcttgtaatcttgatgtaatatatttatggataaataccattttagaccctgtattttgtaaaagttactaattagattatctattttgttaaataacaaaatggaccatatatttttcaaaatagtaaaaataagactctgagctcaatttttaacaattttattttttaatataaacaactttaagacaa

SEQ ID NO: 387762 - DNA, 1716 bp, Cannabis indica
agagagagagagagttgggaaaatagtagtgttttattatattgattagtatcaaaatgaagaatacaagttacatcataagggatgatgtgatcaatatatatagcttatccaaaaatagaaaagcccaaccgaaaactaagtaacctccctaaaatatcctaactgaataaaccgaccatatattaacaatttccaccttgattgatttattcagtgtaaacaaaggaatgtacaagagttttaaaagaaaacaacagtaaacagaggattaaagatcacatatggtagtgatcctaagtaaattcagacaatgtctgaatttggcagtggtaagtggcttggtgagtatgtctgaggcattgtcctctgttgagactttcttgagcttcacttttccttctgcaatgacatctctgatgaagtgaagctgcacataaatgtgcttagttctctcatgatacatcttgtttttagataagtgcagagcactttgactgtcacagagtatctcgatgcacctttgttctagactaagttctctaataattcctttaagtcatatggcttttttcactgcttcagtacaggcaatatattctgcctcagtagtggatagagcaacaatgttttgaagatttgctttcaactaagtgtgcagttacccagttgaaaaacccaatcagattgtgatcttctagtgtccatatcacctgcataatcagaatctacatagcctttaacctctggtgcttgagaatttgaaccatacatcagtcccatgtcagatgtgcctttcaagtaccttaccacccacttccttctagtgctctatccctggatttcccataaacctgcttatgacactcactgcttcgctcaaatcagatctggtgcacaccatgatgtacatcaggctccctaccaagctggagtagggtatgttcttcatgtagttcagatcagattctgtagtgggtgcctatgagtgagataactatgtcatgtgtgtcataggtgtactgactggtttaacctctaaaaaaccaaacttctatagcactcttgaaatgtagtccttttgagatagcataagtctctttccctgcctatctctgagtatctcaatacctagaatcttcttagcatgcccgagatacttcatttcaaatttagaactcgacatgtctttcacttttcttatctcactcatatgtttgcttgctattagcatatcatccacatataagagtagaaatacagtactcttagtattggatgttttgacgtacacacaaaagtcatagacactcttcttgaaacatgatttggtgatgaaatcatcaaatcttttgctccattgcctaggtgacggctttaagccatacaatgacctttttagcaagcaaacatagtcttctttccccttttccacatagcctttaggttgctgtattagaatctcctcttccaattaaccatgcaagaaggttgttttaacatccatttgctccaattcaaggtcatccattgctgttagtgttaggattagtcttacagaggcgtgtttcactactggtgagaagatttctgtgtaatccactccttctctttgtgagaatccttttgccactaaccttgctttgtatcttacttcttcagagccatgaattccatccttaacccttagaacccatttgcaaccaactactcttc

SEQ ID NO: 387763 - DNA, 2031 bp, Cannabis indica
agtataaaaagatagatagatagagtaggaggagagaaattgaacgaagtagaaatacacacaagacgcctacgttaaaaaggtggcactaatataccaaaacactatgaggtcgcccacacggatgtaggaatcccaagcaagacgaaccccaacaactcatagtaaagactaaaacataattattttattttctacttaaaaatacaaaaataaaaaaattggtaataataacatgacgacccaaatttctgtttcacacgtgatcctttgttccctgtgttttttttttttgcttttcctttcctttctcttttattacatgggatcattcaagcaattaaatattgtacttaatttgttgtgcaatgataatatgaggaatgtatcatccctttttccgtttcaattaaaagggctaacaaaatgtccaagatatatttaaatatatacatgtatattatatagcaagatacacagacaataatagtatatgttataattgcagaattactgtatgcatttatataactagtaagacagtttaattgtaggaccttatacccctatgatctaaaattcttaccatacgtaccaataagtttttaaaattataacacattaataaactaaataataacccgctatgaaattcttaccatacgtaccaataagttaataaattataacaaattaacaaactaattaattatagtttgtaatataatatatatggtagtactagtggaagtgttagtgccttagtaagtgatatatatatatatatatatatatttgagaaaacaaatttagtacacaatttacatttatacagtcgagaaaaaaattaccatagtttaaaaaagttatctagtactttcttctttgaatatgatttattggtttaaatttgttttatcattcttaattaagaaattattaaataaaaaacttatacgcatacgcacatgaatgtcaaactttaattttagtagggtaaataaaatgctctctttttcagccttactttttcgaccttcttgtcctctttcttataagtatatatatttatatatatatatatatatatatctaagtctagagtgattgatgatattaaaaatgagacaaagattgagagctaaacaaatccttaattggggccccttagaaaggaaagcatggattaatcttagtctaaatagcttattatatgaaagcacacacaaacaacaagacaattaaatgtacttagataaaacaattgcatagtgtttgtgcattgtattctattattgaaaaggcagtttggccactaagaaaagtgtcccaactaaaaattactttccgtaaaacattaggagaccaacaaatatataaagagattgaataaacagagagtttgaatatttatatatatacatatgttatattaaatgtttctatacaataagttttcttataactttttttaaaaaaattacaatttacagtttgagttgctctcgtagtttttttggtctggttttaatgtgggttgttgtacagattttgcttgcgatttaggttgctccgttaattgctataagattttctatgtggaattccgtaaaaataaaaaattattttaaaatataaaaaaaaaactttaatatatttagctttcaataaaaaaaatatattttatatttcatataaacaataaaaaatatgacaataattaaattaaaattataattaacaatcaattttaaatattattatttttttcataaataatactaaataaataaaacatattttaataaaaaataatttttattgaataaccttaaaaaaaactaattatataactaagtatatatttaatatatgtaatattaacctaatatatacaatatttatacaacgtttgagatatataaataaatcttctttcgtttgatatgaattatgggtacaagtttgtgacagtcagtagtcccgtgatccgtaaggggaaacaccgggtaagatgtgtaatcccacatc

SEQ ID NO: 387764 - DNA, 1253 bp, Cannabis indica
aaaaatgggctcaaagatctcagcccatcacaaaatattttttcagtacaaacctacctacacacttagagaaaacacatcaaatatgtaaaaaaaattaaactaattcatctaattattgactaagaatgagtgtacaaatgtgcactcatcatggggctacatctaatttgagtttttatttctcatgagatggtaattacagcaatatacaaagtgtcagaagctccaaattctagagaaataaaatctagagagagaagctctgaccttgtgggtagttttctaaatgtgaaaaatgaggtaagggagctctccttttataggtgaaggaggctcacaaaaataggagaaaaatgaaaataagatgtttttgacaattgataatgatctagcggtgaaaattagctcttggtagtgatggccattttttggagcctggcaggtcccgctgcaggtaacctggagcttattttcgtaacttccttaggggtgaattttgacgacgataggttcaaaattatgtctggagtgtgatacgtgacttgatagatcactgaattagcttccaaactcaagctgaatcgcatcaatcagatcaaaattcagtgagttatggttactttactaaaggcagttcatgacccagtgcccaggttgacatcccagggcccaagttgacatctgacatcaacctcgacactaggtaagtgtaagaacatcaaagagatgtcctttaagattcctaagagatatttttacatcacttagtccacttatgtgttctggcaaagttggtcactagttttcagagatgttttgcagaaatgagacactcgaaactcttcatttcggggtgacctggaaatgagaaattcaaagttgtgaatttgatctctctgaattgatggatcaatgtcattgtgaaaaactagatggacagccgaaacgacgtcaaatccagataagcagaaccaagagcattaggccttttgtcaacttgggtagtgggtacttactcccaagctccgacaattttgttttgatacttccaaggcttctgaacttgagaacgaggtctcctagcctatttttgaccattcctaattcaatggtcacattggatttagaatttgagcaattaaagttagtgtcctaggttgattgtcaacctgggcgttgggccccgtttccaaggacccgagattatggttttctccccaagtttgcttgaatatttgttatttctaatg

SEQ ID NO: 387765 - DNA, 1473 bp, Cannabis indica
taaactacaatacaaaaaataagtaagcaaataaaatagaaaaatttcaaagaactccgctgaaatatagaggaggtctctcgaaagcccataacaagcaggcgaaaagcaaagcatcgttgccaacttcctactagaaaagtccacactcaatcccccattgtggttctaaatggtgaaggtgctaggacaagggaagcacctctgtttggctaagacctgagtcccccttctacatctacaacactctaaaagctaacctcaagccagtatgcacaagagccaagatgcctaaatactaacccacgagaacacactgagatctgaaaaaagaggaagtaaaacaacacatcttagccaaagcacacgcttgaggagtaccacaaccaaccgttaagcccaaaaatgaaataatgagagccaagagaagcccaccaccattgctaccacgccgcctaataggatagaaccaccaacaacctcaagctggaggcaagaataatttcagttgagagggccagtctccaagagcggtggtcagtcacctaaaataaaaggtgccatggaactggtcccaaaaaacgacgtctgacacccacctaacacgtcaacatcgaaacccaccatgaagggacttcttccacaacacgaaacacgccagaaataagactctagagcgctaccgtccagatctggctggggggcccaagggaggataagaaaccctaaaagagacttcttgaagaggaaagggagaaagctctatcaaagagaaaatgttaaatctttatatttgattaacttaattaaaataataagatatttgttaatgtataagctcaaaagagataacctagaacttaattaagaaccctataatagaactttaacaacctacagaaatttaagatttgttaccaaattatatacaatttaattttttaagaaaattatttaaattctctaaaataaaataggaaaattgtacaatgaccccctaagagaggtataccaatgcacttctatcaattttggcatctgggagaattttttagtttaattttggccatatattataattatttaagacacctgcaaaagtttgagaaatttaaaaatatttaacagggtttgtagtacgcacgactcttttattttataagcatgcgaaatagactgtttgaacattgttttctatactgtaaatcattttaaatttctctaaattttgcacgatgtactaaataactatatatgaaaaaaaaaaattagactgaatttttgaatgctgaaatagaaaaaggtggcattgttacatctcttttaggggtgcatctaagaagacctaataaaatattcccacgttgtgaattgttgtgaaccatggtcaaaaggaaaaaaaaagtattatgttgcgtattgttgtaggcaaggaacttgacttggccggtagcactgctttgtctataccgt

SEQ ID NO: 387766 - DNA, 582 bp, Cannabis indica
attcatacgcaataaaatatttacttagtgcacgattatgaataaagaaaaagagtgaaaaggattcatccccctaaattattattagtttcatattatgtcggccaaactttttcgcttatccttttgaaatatttattttattaaattatgttatgtctgtttcagttctacttaattaacaaattacttataggtaattagtactttgttggtgctaatgtggcatgccacgtcaacatcgtgtgcataattctataaataaatgttgctacaaatttgtgaacgcatacttttttttctgtcctaatttcacaaagttattacaaattggtgaccctcacaattaggagtgggcaacatctaatccaattaaaccaaatcaaactgattcaatctaatccaattacaaaaaattgaatatccaattacaattagattgaattcgatgctaaaagttagatatcaattggattagattatttgttggatatcaatctcaaaatccaattaaaaatcgatccaatccaattatatttatatatgttaaaaaaaaattatcataaaatccagaaaaccgaa

SEQ ID NO: 387767 - DNA, 960 bp, Cannabis indica
cccaatggagacatccgtgttgcaggagatccagcccggaggagggggttgccactcagctggcatatcatctgtactggtgcgtatggaatccatctcgtctagccttttgttgatcattcctattaagatgtggactggagtagatcgcccatcatgcacaattctatttcttcttttcctttaaaccaataataatttatatataaaaaatgttaaaaagatatttttgatgttaatcattctcatcgttcttatcattataattaattatcagttttatataattttagaaaataatttttaaaaaatattattaaccaatcataaatatatacttatacaaatattgaactctactaatatccaatatcaatctctttatataaatatatatatatatatatggaaatttaaaatttagtccaactcacttgcctaaatgaaatttagtaacttaacaatcattacattacatgtccttccacttgggctctaagagcaagtttggtttgttgtaagtaataataggaaaattacaaaaatatccaagaacttaaaaaaaatataaaaaatatggtatattacaaaaatacggattataagtttgtaaacatgttttttttttttttaatgaagtcaaatattgtatatttatctttaattacttttatagtgaaatgtgatttttttcttacaaaaaaatggtgcaaaatataatttttttcatcaagagacccattagaatgtttgatttgccttaaaaatgacataatattattacaatgcaataataattacattataaatgattaagtgaattaaaactaaactaatataatttgcggcataaatacctaagtttaactcgcagttgcaaataaatacctaagtttaattttcggcggtaataatacttaaattatatttttggaactctgtaagtacctaaccgttaaa

SEQ ID NO: 387768 - DNA, 2934 bp, Cannabis indica
aatttcaatatgctttgttcgagtatgaaaaattggatttgcagccctcatcacaatacttaaatcgtcacaccaaacaatcggaggagtgcttggaaaaatatgaagctcagataggagagattgcagccatgttatctctgtgacaacaacagctaggctacaaaattcagcatctgttgaagatctcgatatgttttgttatttcttcgacttctaggcaactaaattggatccaaataagacacaatatccattagttgagcgcatgtcatcaagatccaaagtccaatcaacttcacaaaaggcagtgatgtcaaagtgagatgttttctgcaggtgaagaccacagtcaagagtgctttttaggtaccttagaatgcgtttaacagctatcccatggaactccaagggagattgcataaactgggagaccttgttaatagaatacgcaatattaggcatggtaatagttacatattgtaaggcacctataactgatctgtaaagagtagaatcaagaacaatatcacttcaaaaatgagacagcttgaggccactagtcataggtgtactactggacttggtaccttccattgtagtcttgcataagagatcctaaaaatattttgtttgagatagatgcatgcccttacctgttttagttatttgaacaccaagaaagaaattaagatcaccaagatcttttagagtaatggaagaactgagcgtggagatgagtctatatacctcaagtcatcactgccaatggtaataataccatctacatacactagaacatatgtggtgtgttgaggaagaagtctaagaaataaagaagtgtcagattttgcatgattaaacccataacagagaatagtagatgataatttctcaaaccgagcttgaggagcttgtttgagaccatataagaccttttttaacttgcaaatcatatttggatattgaggttccacaaaacctagaggttgacacatctaaacctctttttccaaatcatcattaagaaaagcattgttaatgccaagttttcttaatttccaccctttgtatactgcaataataagaagaactcaaatggtttttagtttaacaactgggttgaaggtttcattaaagtcaaaactactttgttgatggaaatccttagcagctagtcttgccttgaactgatttgtatttccatttgcatttcctttaattcgaaagacccacttacaacctataatggatgtaagctaactagaacgcaagtgttgtttttctttaaggcataatattcagtatccatggcattatgccatttggggtctttgagagcagatttgaaattaataggaacaaaagatatagtaagaactttgagcgtgtgtatacatgcttggcactggtttgcatagggtgatgattaacaataggtggaggaacatgatttggtgtgagtataggtaagttggatgaagaggtttgtgagtttgagggagtggagaaattgtttggtgatgaaagagaagcaggtatttggccagcaaaactatttgatgtagatatagactgtgaagatggtgatgatgggatggaggttgatgaaggaggaacaagagttagagaagaaacatgaggtatagcagtggtaggtgtgaaatgttctacaatgggagcagaaacatcaataggagtttggaaaggaaaaatagtttcatttaatagaacatctctagatatgtatattctactattcttagcaagacatttataacctttttgagtgagatataacttagaaaagtgcaaagagtggatctatacttcatcttgttcctattatagggtttaaggttggaaaaacataggcagccaaaggttttaagagtagaatagtttggttttgtatgaattaagtggtagagaagagtgagctagaggagttgaattagattctactatatgcctatgttttctttcaactgctctattttgttcatgagaatgtggataagaaaccctaatggataatgccacatgactcaatcacagaagtgaaagctctaaatttctctccccaatcagattgtatggcttttatttgatgattaagttgtaactcaatttgagttttgaacttaataaaggttggtaaggcctcatctttagttctaagtaggtaaactcaagtgtacctagaataagcatcaacaaaactaatataataactatacccattagaggagaccacaagggctgaaccccataggtctgtgtgaagcaattgtaagggagcattataaacagtttttaaatttggataagaaaatttgtggtgtttaccaagacagcatgcagtacacaaataaaaagtatttttattgttaggagagatattacatttagccataatagattgtacaattttcttttttggagaaatggcctaatcggttgtgctaaaaattaaaattggagaaagatacattaaaattgtgagtgtggcattgaaatttagaggttgaagaggatgcaccagcaacaataggtgaggtggaactggatggaagacttgtgtggagaggttgatcaaacttataaaatataaagccctttatcaaccctcccaaccaataaagtctacataatagcctgatctttcacagtaaaagtgagggtgaaattcaaaatgaacagaattatcttttataaactgtgaaacactcattagattttttgtaatattaggaacatgaagtaaattgtgttagggctgtacaaaaaaactcgtaaaccacctaaactgaataacccacccaaatcaaatcggaaaaattgataaaaattacaaaccgaaataacccgaaaaaattacaaaccccctaatctgttaattgggcaggttgaaaataggtccaacccgcccaa

SEQ ID NO: 387769 - DNA, 2275 bp, Cannabis indica
ttgaaacaatttgagtgaacccaacagagaatcgatctcagttgtattataccctattcttgctcaatcaataaagaagatttgacggtgttccagaactggagtagagccatagatcacatcaatctataggacttgaacaagtatatatcttggtgtagattttattgtttaactactttaatcgtttctgaattttattactctgtgcatccctatttttctccaattattatttgtaatttatcaatcttgtcattgctaactgttcgatgattaaattttagttgatttcattatgcacattagtcctaattttcccagaatatgtaatccaactttaatagttgaagaaacaaagcacccaacagagggcagacttatgttaatagctttgcaaaagagatatttccaatttgtttgtgatcaatttttacaggttaagtatcctgtaactattaccaactacacaccacacacaaatcatcacttttattgcagctgagaaagatgtgttacaccttcacttgtatacataaaaactctgaactaaaagaaaggaaaaaaaaacaaagaaatacaaagatatataactgactaaaaaaaacagaatttgagcaacatgaatgtatcattctcaatgatgaagtcccctagaccattgtcgtcttgctctagttcttcgctcaaagaatggaattccttctaccacaatctccacaaagctgaaataagtttcgctccaagattttttcattgccatcatgaagaaaggaactaaaagtcctgctgcaaatcctaatccaacactcaaataaaaccacctatcaataaaattgtcatcatcatgaatgtgatctttaggagttggttttttatcgaaatcagtaccattatcgcctggacattttacaacgaggggcttgccacaaaggcctttatttccagcaaaagaggaagcctcaaaggttgtcatgtggccattgtaaggaatcttaccagagaaatcattgtttgacaagttgagatgtcccaagaatgaaagtgatgacaagctattaggaatagtacttgagagcctattgcttgagagatcaagagatagcaactgccccaatttcgaaatatcctctggaattgaaccacttatatgattgttagacaaattcaaattcaccaaacctaacaaatttgtcaaatttgaaggaagttctccgctcaagttattgtcagaaaggtctaagttgacaacaagggaaagaatcttggtgtacgttagttctcggccattcaaattcaaaacaacgctttcttcatactctccaaggacaccatcataggatcgaataaagttttccctttgtacttgaatcatgcctttgaaacatccatagctaccaggaatgctcccattaagcacattatcagccaagtctaaaacttgtaatgagctcaaattcgatagtagggatggaagttcaccaaaaaatgcatttgacctcagtttaataattcttaattgttttaaagagcataggaagtgtggtatttcacctacaaatctattgttaccaagatcaagtgtctccaaacgtgacaaatactttaaagatgatgggatgcttccagaaaacttgttgtcacctaaatgcagtgttttgagataaattagttgacccaacgagttaggaattgtaccagacaaatgattcttactgaggtccaatgcatgtaggtctgaaaattttccaaagctaaggggtatttttcctattaagctattacttgagagatcaaggacactaagagaatacatgttgccaatggaatctgggattgatccatctatttggttggtagaaagagagaagaacaccatgttgccaaggaaatcacctatgttttttggaataggaccagaaaatttattgttggagagatcaagtaattgtattgttggttctggaagaggaatgggcccttcaaattggtttgagctcaaatcaacagctgcatgttgagctatgttgaatgttttgggtagctggcctttcaattgattgaaggaaacatttaacgagctaagattagagaaaatttcccagaaccaatcaggtacggaacttgaaatgctagcatttgacaaatccaagcttatgacattattttgtgatctaagccaagttggaaatgaagggcctaaatggcatgaacgcatgagaagttccgttactacatggaaaggaggggtccaatttgaactgacagttagtgt

SEQ ID NO: 387770 - DNA, 695 bp, Cannabis indica
attattttaataggacatctttctctataaaagaagagctccttcagctcattttgaagattcttctaaaatccttataaggttagagcatctatctttactttctcactctagaaattttagtcccatacttagcaagttttcttgtaattttgtgagaaataaaaactcaaagtagatgtaactatattatcatcgcgacatggagagtgaactactattaattttgtgtctctttatattattcacttaaattcattattcatctcaccaaactagcgagtttgtattatttatttttcaacatcaacatatatacttatatatagcttaaaatatatttgcacgtgaaattttactccatcttttatatagaaaattaagtataagttttcccattagtgtattaagtgacacctcttatacatacacttcaagtttctatatagctatcatatagcggtattttttagttatcattaaagtaaaaactacatttaacaagtagaagataatttttaagttattgtttgttaatatacattgaaaaagatattattgtaaattttagtataaatgttggattttatgccctaaataaaacttcattttaatgtaatccattttatacaatatcaataaagaaacagaaatattttccattcatttgtatgttttggttcatcttatcaatt

SEQ ID NO: 387771 - DNA, 1642 bp, Cannabis indica
tttttttgttatttttgtgaaatttcctgtataaatgattagtgccctataaggtatgaaggtgtgttagtttccaaagaagattaaattgccaccaaactctctcaattttattcttggtagcaaatagcaattaagcctcaatttatttttgataattttagcaccattatactattattggtataattaagtatcatatttcatataacttaagaaaatagattttaaggcatatcggtaattaattatggagcacgatctatatagaaagtgtcgggcaccacttgtgcccaataacaatgctctttatatttttttatccaatttcttcgtttaattatcatgttggacatttcacgtgttcactcaaatacatgtggtacatatacattgatttaaattatttaaaaacttcaaagttaaaaaaaaatattcttaaaattttaaataataaaataatgatcattaatgaaacttgtgtgagtgtgtttgttcacattgttcatgtataaatatataatatatagtatttgttaaatgtttcgttattttttgttaagcgttctgcgaatcgtgccgcgcatttcattgcccgacattctatttctctagctgaacgtatattttctattaatagtgttcctttgaatttgatgtctattttaatgagtgattgctcaagttaataaataacacttctactcaaaaaaaaaaaagcagtaatttataaagttttaataacttgataaatgttatgatgagtgtcatttatcaaataataataataataataataatataataaaataaattatttaaatttaaaaaatatatactttttaaaacttttttttaacaaatatcttaaaactaattgaagaaataaaattaatagtactcttcaaaccgcttttacaagtttttaaatgacgcttttgtacatgagctttaatgactctaaaatacagatggtctcaaaagtagggggacaaagttctaccatgaagatcaatatgttagaagggtagtggaggaatgttgttcaaatgtgactgtgtacttggagtgggacaagtagtattgtctctactacttgtacttgtcgtactcattgcacaacaacctcctcctcagagacgtgcttgctttaacatatttgttttagatcgtacactcctttggtatctttcacgctatagctcatgctcatagtgagggaacaacacttgaagattttgcgaagtcttggccccgcagggtgtgagacgtggtttaaatttgggtggaatctcctcctcaactctattgatggtcatcccatctaagtgctattgtttcgatgtgtaaagtagtgataagtggtgattatgtgaggaaggtgaaagaggggctgaggagatatttggccaagataaggagaccatggagaaagaatggagagatagaaaagagggagttgttggaattattttaccaggatctagatttactaataagtatgtttcattaacattctaatatgaatttctaaaacaatgaaataaacacatataaagtttagaaaaccttacatttggtgcagtggaatataatgactccttccgttcagatctctagtcgttgattcctttctgtagca

SEQ ID NO: 387772 - DNA, 858 bp, Cannabis indica
tatgtgtagtttgtttcgtgtcataactagtggattcagattttgtgattacaaataaatgcaatgtatataattaatgaaaaaaaaaaattgattaaaaatctatcttggatacgaaaatagatagaaaacgtactgaaataaatagtacaaattttttctttatttatttttaggctatttaaaaattttgcacttatagcttatgaattattcacctcgtgaatttttcagcccgtcaaaaataaattcataaactatttacattgttgtaaagtagttattctatcaaatttatcacacatagcaaaagaatttaataacatggctgcttaaacaaatgtgatgtcagtgtcacgtgtataatttaaaaaaaaaaaaaattagcagtaaaattcttcaaaatgttcactttgttgtagattagtttccaaccttgataaatagcgacaatactccttaaggtcacactttttgtaagtctattagtcttaaatttaactgctctattaatttatttaaaagtatcaagtgttgaagttttattggtccagataataattttaattaaaaataatttaaaattaaaaaaacaaaacttaaaaatatattttaaaatcctaaaaaattatttttctttttctatttttttctcctccgtcttcgttttctattttaaagtctattttaacacttaacataccaaattggataaaaagagtacagagcaaaataattgtagagatttgagagtttaatctaattttttttcattttaaggatcagttaatcgtatcaaatttcaaaattcaaaaaatttgaccgcaaattacttttttagttatatttttttttttg

SEQ ID NO: 387773 - DNA, 2191 bp, Cannabis indica
  modified_base (1764)..(1764): a, c, t, g, unknown or other
tttttttgcttcttcaaataatgttaatggaaaagaatagaatcaaagagagagaaagagagagaagaagaaactaaagataagccatgttagagaagatgaaaaatcatataatagagaaatgggaacgtggagtgtggatggcgcgagtgatgatgggttggataggcttgagccttgaaatatccgccatgagtaagatccatggatgagatttatatagcgagaaaccaaaataagctaagtagatcattttatctgttttctcccacttctctacaaactctgtcctttcaattgtttttccccaatttatttattttacagtttttatttttattaccgtttctttaggtaaagccatctaatttctatttggagtgtttgccggttaaatcttcttaattattattttatttgtatttaaactcaaattttaaaagtaaaattctttaaactattaaattggtagtgttatttattttatatcattagctgctaccattcattttaaggtgacacttaattggatgacaccttaaatttactatcagtgcagtagtttggaaaattttaccgttaaaatttgagtttaaaaaattaaatacaaataaagtcacaattaagaagaatttagcagcaaattcaaacaaaataaaactacaatttttttttttagtagaaaaggtttgttttatagcattttttttttttaaagaagcttttcattaattgaagcaatttttttggtagcttgttttttatggaaatttttgtgatggttgaagttgagtgtagtgtaatgtatattttccaaaataaaaaataaataagaaaagaagttggagtaatatacctcgaaaaatatttgtctttttccttataaataacctaataattgaaaaaatggtaagaaatccttacctaattctatgatttttttttttcaattttattttctttccttgtaatataatgtatcatgttatttgatgactatatagtatacatatgcatttttgaacaccaccactaaaaagagtactcaaaccactaccttcttatatatgaaactaatgttcatagtacttttctaacccaaaatacaattttcatttcttaggcttatatataaagtaaagggaattttgaaagatacttttctttttttttacagtttaaaattttaaaattttaaaaatttattttgtttaaactcacgataactataaataaactataaaagaacaaaaaaataaataaaaaaacaactgcataacaattataatacaactattaggggtgttcacaaagtatccgatccaatccaatccgcacgatccaatccaatccaatccgcaaaatgcggatatccgcacttgtgcggattggattggattgaaaatctaaaatccgcacttgtgcggattggatgttgtttgaccttaaaagtaaccgatccaatccaatccgcacttaattatatatatttaaaaaattataatatgtaatgtatattattaaaaaagacacaaacttctaatttcttaatcttttttagtaatatattgagtttgtgcattttattattttgtataaaaacacaagaaaataatcttattaacatagacacatacacataaagtttaaatatatatatactagtttattattttagtaattagattacatatatattttagtgtaaatctaaagataagtatatatacattgatatatatgtatattggtttaatttgtatntaaatagagatggaaatagattattattggacattaagaaacaatagtcttttgttaatttttttttctaagacatattaagtaatttatcattaaaaaataaccgatccaaaataatcgatctgatccgcactattgcggattggatttaaactgttatgcagattggattcgatccaaaatatgaaatccccacttagtgcgaattggatgttgtttgaacaaaaaagtggggattatatcggatgaatacccctagaaactgatgtcacaggtttaactgttctgtaatgaggttactccatttttatgatattattgtatatgttttagtttgtataaaaccagttttattattgtatggtatttgaacaacattattattttattttaaataatcagtttctgacacacatattattttatt

SEQ ID NO: 387774 - DNA, 1028 bp, Cannabis indica
aatataattttattttttagtttgatgttgtgatgttttatttttaattttactattaataatggaaaggcgtttttcaatgtgctgggatgttgtttgaagacgttatagttttattgtctaaattttgggagtagttttgtcccatgttgttcacgttaagaatttagcagcccatggtttgacaaagcatgcttttcggttagacgatgagctatcctggtttgaggaggattctacgctgattgcgaatatttgtatcgtaaattcatcagtgattctaatcactatgttaaaaaatatgaagaaatatactttaaaattaaatatcaacatttattttaagcttaatattccataaagatatcttcattacacgtttaatgcaattaaaagtttaaaataactaaaacaagccaaattttaaaatggaacaaaacatcacgaaaataaaaacacaaaacaacctagcgttacaaattctacaccaaaaaattaaatagctactaatttttttttccaatatttttattattataaataagtttttaaatatatataaatataattggattcaatcaatttttaattaaattttgagattaatatccatcaaatttaattagaatccaatttttaatatccaatctataatcttattataattggatatccaatttttgtaatttagttgaattgaatccgtacggttcattggttttcaaaaggctctagaccaaggtcggcatcgatctgactccattcgtagtagacattctagagcaacccatcgacatcgccttggagcagagaagtaggctactgcggttagtagggatccaacttttttttgctgattctctatgacatcagttgggtgaaataaatattttcacttatgtttgataatgaccacgtctttaatacttgtaattgtacatattgtttcctacaaacaaatgtaatattgttgagaatcatggggttccatctcaaaaccaattggcaatgagtggagtagcccatgt

SEQ ID NO: 387775 - DNA, 1583 bp, Cannabis indica
caaaacaaaacaaaacaaaactatatcacacaaacaatactaaaacacttaaaactatgtgtaatatcccggaaaatactatgatatttaattgggcatattttattaaatatgcaaaatattctggtaatgaagtaagattatgatcttacttaggttaattaatgtgagtttaataaataattaattaaagcgtaatttattaattacggagattttattggaatatgtgggtatcgtggataccattttttttttttgaaataaaaggttttcgggtccggtgcccataggaactcgatggagtggtcacatatgtcacgataaaaatgtagggtttggaatgggaatttaccgaattaatttggaaagttaagttgtcggtttggcagatttactagaattaccaaaataccatagggttagctttaagtaaaaggttattaggaggggtataatggtcatttgttaatgttagaaatgtgttttgtcctatgttagctagtggctgatttcattaaatattttaaaaaataataataataataaaaataagaataatgaaaataagggggatagctttgttgagttggaaattagaagagttaaggagttataactcatattctcctcttttcctttcgagcagccaaggattcagcctagagccaaggaaaatgttcaccaattctctttgatttctagctcatcttcttccaattcggtttagaagctttgggggtaagtttcttgtcacatgaacttaagatttcttagtttttgaattggttttgggttagggttttacaactttatagctgtaggattaaaataatttaatgttgtaattataagactgaatgagagtatattggtgttgggttttgatgatttttgtggctgctaggttggtagcataaattttaatattttagggttcactttgggttttaatgtgataattgatggaacatgatgaactgtgatgaaatattgaattgtataccttgatttgatgcctataaattgttctggaaggtttcattaggtttggatgacttttggttcggttttggggcaaaaccaagttttcccatttctgcagcagggaaaaccggtaaactggtttcacaggtgctgtgaaaaccggttaaccggttttggtagcaggggaagaaaactttggtttttagcctcgaaaccagttttgttcggggtatttttcagagcttagatttgggtattttagtaacgtataagctattttgaaccagtggagagttagaaatttgtcttgttatggagatagggtttgtttggaatatggatgagttgtttatcgaatttccttgtcgtgaaataggactcgggattgtcgtgctttattccattcaggtcggcccgcatccttaatttctggaccgaggtaagaaaagtattatgcatcgttttgtggttgatgattataattgtgatagtttcgattacagtcgagatcctgatatgtgtatgttgtgacttgattatgattgaggaaagaaggtatggaacgattattatcgttgtgactcgattatgatcga

SEQ ID NO: 387776 - DNA, 1148 bp, Cannabis indica
tctaggcttttgcgtagtaagatttccttaaggttagcttccgcagatgttagctttcacgtagttagcttccgtgaaggctagcatccacgaaggttagcttccgcgtagtaagcttccgtgaaggttagcttatgcatagtaaaattctacgaaggttagcttccacgaagtgagcttccgtattagtggagtttccatgcagggtttacaaataaggtcaatttttgtattttggctataacttttcacttgagtgttcgttttagatattatatatactgttttgaaactcttaagaagctgtatagcatgggttttattttagagtcaaaataagtaggtagattggcagaaaatacttgtttcttttcgagttttaagaagtattttaaaatagacacttatcaattttatattattgtgacttagggccttcgattatcaagtaggtttttctactcaggttgactagaacacttaattgtggaagcaggataagaatattataataaatatatgtgattacatgttatacatttccaaatagataacatatcaataagagcggtttcgatgtacatagaaatgtattgagttttgatggatatatgcttagcatttagtatagtatgggttggcgctatcacatcagtacgattagagtgcttagtataggcttatattatggttaaccatactgtcttgaatgttcgcaacttataacgttggatgcgggatagatttgtaattaggtgtatgggcacctgaatacgaatcgattagatgtttacatatattaatacgagtctgttgactcacaattattatttacatgtgtaggtaaggaaaagcaaagcttgaacaacagtgagtttggggtgttacgaattttatgtttattacgtaagtgtacgcaatcaagtagtatctcatgcaagtgaggtcgaaccacagggaattggattaagtactactgaattatacttatgattctatttggtaaaataataagtttgcaatttgcaagtaaacaactcagaaattaaaaagaaaagaaacgtagattaatcaagatgagagattagggaggtgaatcttgttgttaagctaccaatgttaatatctaattgctatccttatctcaa

SEQ ID NO: 387777 - DNA, 716 bp, Cannabis indica
aacatacaaagtaactaaaacctcattacactgtctaattatctaccttcttctcactatcatcatcatcactgtccttatcatctttcttttggactcggaatcttcattatcatcatcatccttctcctctccgtcactaccctcctcctcttcattaccactaccttcatcaaaatctacatttgcagcatcttcttcttcattgtcatctgcttcttcaatgtcatttgaatcaatatcttcttcattatcacttccaccataatcatttgaagagttactctctttgtcctgcaataaaaatataattaaaaacagatgaacataactaaaaataaactagataataaccataaaaaaactaacataccttagcaatagaatcagcaaaaacaatagaaaactgtgactgcatttaagccatttgagcagcaaaggaaaaaaactgtgcagaaacaaacactttcaactcaaccaaatcagaagaaatcttctgttgggaagtatgcagcaaatcaatcttcatctccaaaccatcaaacttttcaaaaaaaccgtcaagcttgacagaaatgtcactctcaaccacagaaggttgttccagaacaggattactcttgtaagaattgtaattattgtcaaacttgaaattgctcaatttcaaagcttcgaactcagcagcagtggatttcatattagatagttgcagctga

SEQ ID NO: 387778 - DNA, 1602 bp, Cannabis indica
atgattcgagtataccaaaagttgccattaataatgaaatctacctcaaaaacctcactaacatgtccaaccatcagtatgcaaacgaggtcacacatgcatccctatgaagtgtgacacacataaactaagaaattgatgacacgtgcactcaaactcatggaaaatgaaaggtctatgggcctccgtgacatttcactttagaattccaactctcgagccttgaaggattgggaggtaaatgttaaccacacgagtagcacatatgcatctagtttccccaaatgatcaatttacggccccattctcaaggcccaactcgacagtcgcctgacccacgaaagaagccagacaggtgttctagattgggttaagacttgattgcaggaaaagttagactagctaatccaaaggactgactcgatcaaaactaccaaaagtttgagaaggcataaacggatgctccatggacgtcccagaaaagaagtccaagagagtttgtggaggtcgatctgacgtggcacacttctgacacatatcccacaaaagtaggggtttgttccctatgtcagacttgggaaaggcgcatagcacaaaaaagtaatatacctttctttcaatgctcactactctgacatttactgtgcatgatcgacaacatatggatatccatcaacatcatatgtactatattgtacggacaatggttatccctcaattagacatcacctaccaggcctaaagtcaatattatattgtatgttaccctttcagtgggcttattttccatgtacaaaaccctatctggtttgacttcatccgaaacctagtttttagcctataaataagctttaccccttcacgcaaagggttacgaactttggctagaaactctggagaaatttggcaagaacattcttgtataaaatgctccatagccaaaaagtttaattatattgactcatggactatgactcatttcttaattgtggaaacatttaagatctcttctcaatccaagtcgagatgaatccctttgctagatatctctaatatgtgatcatgcttgaaagagacttttagtgctagatatctctaatatttgtttgattgagtcttaaatatttgttttttaaaatattaaaagtctcatatgtgtagcaattaatatcttccatccagctaaattttccaccagaatatttttgttcggctattgaactgcagaagcatggaataacttaagttgaaacaaaacaaaacatattacattatatgcttttttgaatggatattacattatatgcttagttttgctttttaattaaattatttgatacattgtttattgtaataactaaaaatttaattgcataaattactggtaacaataataatctagtttattattaaaagtatctaaaataatttcaaaataattaaacaaaacaattgaagataatgtaatttagctctacttgttttatttaatttaccaaatttccacagtttttttttaatgtttggtaatatctaagtaccaaatgaaaattatagataacgttaccaaaatagtttttttttttttttttaattgttgat

SEQ ID NO: 387779 - DNA, 818 bp, Cannabis indica
aaatgtatcatttaagtgcatatataaaagggtgtgagagtaaagagtctaattaattaagaagctaatcataatcataattaagtataggtcattaatataccaacacaacataattaatccatggctgaaaagcttattggaactacagtgagggctcctgcatacaatatttccaactggtttagcactaataatcctaaccctaatcctaatcaatcgcgtaataatctttcttcttctgcttcaaactctgatagacgagatcgaaatcaagatcataataacgttgttattaatgatcataatcgtaataatttaacaacaacaaagaaaggtcaaaatgatgtttgggtgaatattaaacgcggtttgctggtatgtacgtacttataattaaattaattttttactaatttatgtaaatagtaagagttaattatattaatagaatttttattaattaatttacaggtaaatttagagataagtagtgaacttgaaacaaagataggagaaatcactaaacaaatactcatcaataacaaatcatcatcaccggaggaggggacaataaggttgtgcagttgcggaggagcaaaggtcatcagcaatttttgcaagaattgtgtgttgagtcaaatttcaaactgtcttcgaaacaatggttacaatgctgccatttgcaaatctatctctcgatcttcacaccagttttctttaggtaaataaatataattaaaatagagtaatttgcgacgtaatacttaaatttaactctaggttaataatactcaagttatatttctgtaactttc

SEQ ID NO: 387780 - DNA, 769 bp, Cannabis indica
gagtgttcatgccatgatttatgttttgatttattttttctacagaaattgaaactatattgtgtttttgagaatactttttattcggtttagatggccaatttgtcaattaaacttgccattaatgccaaaattagaggtcttatttcttctctaagtaacaaaagagacactgatgtattgtacaccatctgtaacgcttaattttctggtttttgtgtggggctgccttaatgggtagttgcctttttgtttgtaatttgctttgtttgaatgaagtttttctttccttaaaaaaaattagttaaaataatagtttacaatctaatagacatctacaagttgtagacatgactaggattagaattagaaaaacaaattaaataattgaccacacaattccttagattatttgataaaaaaactaaaaaataaaattaatcaaatgaaaaagattgtagtttcacaatcaactttaaaaacacttatatttagtttaatctaccgctcaaaagacacaatagtaaaaattattacatcaggtttattcaacctcgtagcttaagcaatgttgtgcaaggtacacataacacctcctttaatctcagaaaacttgctattcacaactactaaaagtgatctaatcagaacatttacacgttgtagacataattaggattagaattagaaaaataaattaaataattaactgcacaattccttagatcgtttcataaaaaaactaaaaataaaattaatcaaataaaaa

SEQ ID NO: 387781 - DNA, 530 bp, Cannabis indica
ttttaaacatgagttttttgacaagggaaaattgaggaaatctttgtatgatctcatgtaatctcctcgagctaggtatgatcactttactaatatttaaaaaggttttgttattctcaatgtcaaagtgatcacacattgtttgtaaaacaatctaaaaaggggaagctggctattacaattgaataagttgataatataataatgacacgagatcatgaatagaaaataagtcaggttaaacaatttctttttaaagaatttaaagtcaaagacttaggaatctcaaatatttcctattgttaaagatgaaaagagaattctttctcattagttttattgaaaggagtggtaaatttatacacaaaactaagtatctaccttaggaaagtagaattaagccaattgacaactaatttcccaagtacaatcggtcgaaacaagtctgttgtattgggctttctgaaagaaaagatgaggaagcgtatacaaagttggaatggtaaactcttgtcacgtgctagtaagga

SEQ ID NO: 387782 - DNA, 4085 bp, Cannabis indica
atatctgtctatctatcataacaaaaattgttacgttttttcaattttaaagggatgattttgtaatatttaatgttttttttttctatagtgatgatttttttcaaacatttacttaataataataataataataaacaattaaattagtttttattgggagtgaataaaagtcggaaaagaacaagaatacattagaataacatatcaaagtttagttctaaaattacgtgtaatgattttttttcatcatatttgttgttggatcactaaacgaaacaagttccaagaaaaacaaagaaacgaagcctcaagatttcagatagtgaatttattagttaggagtgtgtataaatcaatccacttaattcaataagaatcgatcgatccaattacaactgattgtcaaatattaaatatccaattataatcggatcgaattagttgttatttttaaatattcaattaaatcggatcggatggtagatgtggccgtgtccaaaaatctaatacatcccatcaaactaattagtatttttatttagttttgataagtaattagattttatattgttatacgtaaaatctatatgtatatatgaaaattaacattaaaatttcactttttttttattggatggatccagtctaatccaatacatattggacctaaaatattagatgaattcaaattgatctaaaaataataggtctaaaatattagataaacccaaattaaaccaataattaatatatatgaagtacatccaatggattgaactgatccaatctaacatccaatggatgttggtttgattggatgactaaaataattggatcagattggatggtaaaatctaacatccaatatataattggatcagattggatggtaaaatctaacatccaatatataattggattatatctggataggcctaaaaatattagatgtgatccaataaacaccccaatatcagctatgaataagttattaatggaggagaatgaatcacttgcaaaaacaagtgtctcggctggtttcctataaaatggctatatgcggcaacaattaagtaatatcctagaaacctaattatgaataattagaatttattatatattatgaattaattaggtagtaatatgcaagattatgatcctgctaacctaatttagcttaaattataaattttactataagtggataaataagcgtaatttattaattagagagatctatttagaatatgtgaatataacgtaagttatttttgaaataaaaatatttttaaattcggcgactctgaaaactcgattggaggccaaaaatattacaatggttttagttggtaatattgatgggattattcagataaattgattttaaaaatatcgagatattttggggtactcgaagttgaccaattaccataaggttaaaaaaggttaaaaaattcttattggttaagaaatagtaaattattattaataaaagaaattatattattgtattatattattattattaataaacgttatcagttaatatatatatattaagttttttttttttaaaaaaatataaactgtacaaaattttttcttttggtgcaacgaaatgctcctccgccttaatttattttgttcgatgttcaacccgaaatttagtaattcaaacttcgatagtagcgaaatagtaaatcattgaagatggaaagcttaaggtaagaattgattttgtttgaaggttaatacgattggttttatatagtggctttgtgatttagagtagttatggaagtttgactttataaaattattattgggtagctatgaaactagtttcgatatttacttgttaaatttgaggtgattttaagttagaaattgagtttggaactttttaaagcttaagtttgaatgttattggcgttttctatttaagggcttgattttaatttttgttacgtaaggattgttgtatgtatagtatatatgtaccctataaagtttggaatgatttggataggtttcggtggtgtttcagtgagtgtgaaaattgagattttcgacccatgctgctgcaaactggtccacctcttggtgcaaccggttaatcggttcgtggtgaaacggttaaccgtttcccaaccagtttgctgtttcagggaatttcaaagaaattgagaatcgtatttttgtcataactttccactctggtgtccgttttggatattctatataccgtttcgaagcttccgacaagctctacaatatgatgtatgttttagagtcaaaatataagttttattttagtgtatttgtaccacgggatttggtaagaaaccttaggttatcctttgcaaatgttaagcagtattttgagataaacacttattggtttactgttgttgtgacatagggccgagatcatccagaaggtttctccacttgggttgactaacatgcatgaatttggatcaaagataaaaaaaaaaaatagtataatgtaccacatgacataagtataatgtaccacatgacataacaggtttcgtaattatcaactgtttgattaggcaatgataatgcgaatgtgatatacaatctcacctgattaggtgatgtgatgtatggattccagattatgatatgggcttacttgattaggcaatgtgatatacaagtgcacctaattaggtgatgtgatgctaggctatggcataagcttacctaattagatgatgtgatatatgaatatttgtgtgttgtgtgtcctccaattcataaacactattagttacaaaaaaaaaattaataaataccattaccaactccatttttattggatttttgtatttatatacatatatttggtgtatattaaatttttgaacacaaacttattaaatttaaaaaaataaatacactttatattcatacccataatacccttctcccttctattctcttctcttctaacttcaccatccatactcctcattcacatctatactgatggtgattcgatgggggtccgatggtggcccgatactacctattttttattttatatatttttttacataaaaaaagtatcatcagactaccatcggaccatattctacatttatagatgttaagttccattcactaagctcgtcaggaaggcatcgggccactattggaccgtcataagactaccattggaccatagcatcgggacatcatcggatcactattggacattcgactacaacatttactcattttaacaatagaaaggaatggggcaccatcggaccaccatcgaactaccatcagatcatatcattaggccactatcaaaccttcgtcttcaacctttactcattttaacaacaggaaggtatcggaccaccatcggaccactattggacgttcgactacaacctttactcattttaacaatagaaaggaatggggcaccatcagaccactatcggaccactatcgaactaccatcagaccatatcatcaggccaccattagacctttgtcttcaacgtttactaattttaacaacaggaaggtatcggaccaccattgggcctggcaaaaaaaccaactttttgcccaaaactcatatctggttgttttcgaccttaaatttaacatctactcacagataacaaacattaatcatacaatttattcctttaataacattgtcgatggtgaagccgtggttgatagagaagtcgttgggtctgcggtggtcattgagtctgtgagtcgttgggtctgcggtcgtggtcgtagagagaaaagaccgaggttggtaggttgtgggtcgagtgagcgagagagataagggagaaagagaaagaattaggtatttgaaatgggaggggcagaattgagttttatgaaatattaacctattctactaggttaacttaagtttaagaaaataattttaacccttttttatttctaatcatctctacatttggatctagccacattaatagattttttttttacataataataataataataataataataatattaatttactattattatcattatta

SEQ ID NO: 387783 - DNA, 813 bp, Cannabis indica
gcaccacaataagtcgtgccatattttcttaattctacacagaccctagctactctcttaaactttctttctatcattacttttatctttacttttctatattattattaaaaaaattaaataatattatataaaattaatgggaccacgcggctccctatgctgcagtccaatcctttctttctcacttctcaataaaaatgggaaagccttaaaactaaaatcatattaattttattttttattattttatatttacatatatataaatgtattttatctcttccaacccacacaaaactaaaaccctagccgcctcatacttatcttcttcctcttcactcttttttttctggttcaaactcctctctatctctggtttctgtctcacacattccagtcctttgaagacgtcgcacctcttcggcgcaatctctctcacaagtgatttaaccagatctggcacaccccggcccgtggttgtgaagcggtgcagtttgacgagaaacggcggtttgtggcgttgagcgcccagcgaggcgaaaagcataaattgttagacatttatatgtataaactgaaatatatgtatgtgtatataaaatgcggaattaaacaaatatatacactatataacttaaggatcgaaatacctccagccattgaatcttgagcttcaaacccacataagctttgatctgcaaaggaaattgactaccatgggtaatcgggcttcctcgctctctcaactctctttagatagaatttgctgttatgaacagaatgagtgaggagctcggggaccgagaccct

SEQ ID NO: 387784 - DNA, 1969 bp, Cannabis indica
ggccccaaagtatggccagttgttacaatctgataatgcactgatgataaacaaccgaaaataagtcgaacccatttatcagcaaaactcattcatctcaacatagcacacaagaaatgccaatctactctgtcataggctttacttaaatccaatttcagcgccaggtatccatctttgccaacttgctttctcttgaaatagtacaaaacttcaaaggaaaccatgatattatctgtaattaatcttctcggaatgaacgcactttgattcaaagacataatcttagataataatcccttcattctgttagccagaactttagaaattatcttagaaataacattacaaagagagataggacgcagctcactcatccgatcgggcttcttcttcttaggaattaggacaatattagtgtcattcatcccattcggtatttgctcattgcagaaaaaatctcgaacagtattgattaatagaccaatatttttgaaagaatttaggattcataccatcggggcccggagacttatcggggtgcatttgaaaaactgcatctttgacctcatcatcgccaatcggccgaagcgaaaaatcattgtgttcctcacaaaatgtaggagtgacacaatcaagcacatcctcccatttagtaggcttagcagtaaacagtttagaatagaaatcaacaatgacattatctaaaccgctatcccaatgtcgcaaaattccatcatcatcctttaagcagaaaatctgattgttgcgtcttctagtactagctttagagtggaaaaacttactattttgatctccttccttcaaccaaagtcgttttgatctttacttccaaaacgtttccctttgattaagcatcgcaaagagctcctttttggcatcataaaaagtttcttcacctcatcatcccttctactcttataccgcttcaactcatgattgcaacttttgatatgagaagcgaaactcccaaaagcttcttttccccactaatgaagctctcggccacactcttcaagtttttcctcaatgtcgtggcctatcattctattccaacaacttcgaataatctcttcacaaccttgatgagtcgtccaccaattctcaaacttaaactgttagtcttgtgtagaaaccgtacccatctgaagttccaaaagtaacggagagtgatccgatggagaaatttctaagttagtaagttgagccgtaggaaagatgctcaaccaatcattgttcaccaaagctctatctagtctagcttcaatccaactaggagagtctctactcttttcccaagtgaaaggatgcccatgcatctccatgtctctcaatccacacagcaggattgcctcctggaacctttcaataagccacaccggataaggttgtcccccaactttctctgattgattaaggacattgttaaagtctctcataaggcaccatggcaaggttgaacgactaagaagtgttcttaaaagatcccaagttttccttctaagactcctattcagttcaccatacaaccttgtgaatctaaactccctttgtccttcaaaagaaaccttacagtcaatgtggttctcagaaaaagtgtccaccgagacctcttcttgattcttccataacatagccaacactccgcttcttccttgggcttccaccacaaagaacccctcaaatcccaaagctctactcaaatgatccaccttcatctttttacacaaagtttcacacaaaaacacaatattgggtcgtttattagtaaccaactccttgaggaactgaacattccgtgacggcccaagcccacggcagttccaacacaagattttcataatgattggcgaaccccaatgccaaggcccgccaaagatgagtttcttgaaaagttactcataacctttttgtaacaccctaactaacataggcgtattacgtgatt

SEQ ID NO: 387785 - DNA, 2485 bp, Cannabis indica
aagtcacaattgcttttgaaccacgtgacttggagtttgaaataatttctcccaagccatgtaaatcaaagattctgcaggaacctaatgtcaccttcgaggctgagttcatagaatcgaaggtgcgaactatctcaggctacgtaggtgattcactaacgacttatggaattgagcacgagtgagaatgtcgggtcaagtcagtatgagctggtgagtttagctgttacccacctgtgcgtcttacaagcaagacatctgaggagacctgtggcgagaccagtacaagtgggtcgactggtataggcgcttggagccttgagcacatcaaggcaggggaaataatccccctctgtgattatttcaaggattttgtagaccacctcgggcttgccccattttaactaaatcctgtctcctatagaatccttttaagtttgagggttatgtacaaaattctaaattgggagtgccctactcccgtggaaatagagtatctttactccgttaaagccgttccagcgaggaagaatgctgcaggaggcttttattatcttgacactcactccggcgagcccaaaattattgtggatttggcaaacaaaacatccttcaaggaaaacttcttctgaacaactagcctctccccaattgggaaaacctcttttcgtataattcgtaagtgatttctcgcattagactttaaaattaattcatgtctttttattctaagttatctaactaatttttttttgccagctgtcttgaaaagacctatccccactcttgagacggccgagcgacaaaagcttttgctaactcttccctacgatcttaagtcatgcgattttcttctaagcgaactcaatctgatgtctgtgggcctcttgactgacaaggagtttacttgtgattacaagtgtcctaagtattcttcttggtagcaagttcttgtccctgacaaggagaaagctcgggatcacgtggctcgggcactgtatcttcagaacaccgtccctcaggaagctagtgagggagcatctggaattaatcaatgtggttggtcacccacactgcttagggctgagcgtaccactctaggtacattccaagatagccactttaatttttatatttggaaccctctccttgtagatcacataacccataggtttgacaactggtaccctagattccatgtctagattaattgtaatgatttgtactacggtatagtcgagcaatatggtaccatgatagatagggaaagtcacatagatgcgagttgggatttagaaccacttgattcctttgatatattcaagatcacaggttgtagggattttaatggatattatggtccttctaccccatcttctagtcataccttgtcttctagtaactatagtaaattccttaggctgaaaattataccctaaactcctctttttcgttatttataattagtgctaacacttttctcttgactcacagacatggatgttatgcagaggaaagggaagaaaagagcgaccaactcaggtgctccttcagatatcgaggtggagcctcttaagagataaaggaaaaccactactcatagaaagaagaaaagctcttagtctactgaccttgaggttcataagactatgattcaggatcaaactcttcctccggtaactgcaagtaccaacgagccttcccccaaaacaactgatgcctctgcctcctcatgtcaggccattgaaacattatctcagaggcaggaaagactggctcagagttcgtccaagagtttggagccgcttgttggcccaactcaaggctctccttccccatgattgggatttaatcaatcatggcgattgggaaggaatgcttacgaggggtttgtctcataccctcttggtaagtttattgccttagtatgtatacatattttatttcttttcttcttcccccttgttttttagacatccttgtttatgaatattcaggcgtctttcatctctttttcctctcagcgatgagttatagaaaggataaaatacttacagagcgaggtcaaaaactcactaggccaacgtgaggtcgtagtcaagaaatggaacgatggtcaataggaaattaatcacctcattaaagaagccgagaggatgaagaagagtcttgaagatgctgagaaagcaacaaatgccaaaactgatgaatgcgaggaactcaaaggggtgctcgaggggaaagaggctgagaccaaatattgatgcaacatgtggccttcgtaccatttatcgagccttgatgggaaatccagacatggacagaagcttcttggaggaagacgaggaggaaatttttgcttattacgagaagactaggaaggaggaggaagaggccgaggcggtagaagaaaaagatccatccaagtctcctacaatgtaggcttggtttttatttatcttttatgtaagaaaatggccctagg

SEQ ID NO: 387786 - DNA, 860 bp, Cannabis indica
ttatattaaattatatgagaccactggtacaccactggtggtgcctattagaatttctcaatatatatatacataggccaaataagctagttcatttggttaatgactaatacttatcttgacttgtaattttgggatttgagatgatgtacattttgaaaaaccaatcacggtttcagtcgagaattactcgattttagaaaatacccatatgatattaaatccaatttaaacatctgagaacaatattttgaccaaattcgaaacatttaattagctaaacaaataacagtgataaatgcaataaaagtaatagtgaagaataaaatataagttgaaaacatttaattaccaagatggtttagtatcccaaacggaatcatattcaagggaaaggtagttgagatagccatccatatcatcaaccactccattttcatccaagaactgggattcgtttgggtcggttgacttgcttccaaaggccaccacagttttatcccgaaagccactcaatttgagagtagtagaagaagtgaatgaatagtgatggacaaggttcgagaaatggggttggggagaggggagccggggacggagctgtagtatcggaactgaattggaaaaagagaacagagaaagtgttgccatatttgtctttgttaagacggaaaagaatatcttctctgcctcgctctcttattatataatataaaaacatttttaataagtgatgtaaaaattgagttatatttattataaaaattgattttgtgatatttttaaattaatttttaccatggtgttatattgcatatatcatttaatgtttttatttttttttataatttattaaaaaa

SEQ ID NO: 387787 - DNA, 802 bp, Cannabis indica
accctacattcatttttctctttattaatgaaattgtatgttccactacttaaaaaaaataattagttagtaatatttttcaaaatttattatattaaattatataaaacctactaaataccactaatacattttaatatttttgaatgattattccacattcgaatatgacaaatagattgctatttggcactatatatttgaaataaacacaattactcaaaacaatatttgagataacatagagaattaggatgtgaaatttgaagcaatcagcaaaacaattataattaattttgttttttcttcttcgaaaaatcattaaaagatgataaatttaccaaagtaatttttaattgatgcaactcatgaacaatcaaacaaaagaaaatagtttattattaccaaagaaaagaggcaatatctttattatcacaagttaacttacaagtagtagtagtactatttattattattattattatttattattgctacattacatagtagaagctctgcttgtacaagaaaaaaaaaaagaaaagaaaagataataaaaagcataaacagccctaatcataagattaaaaaggccattttcttattctctacaaactacaaaagtacctcaaaacggtaaaatgcctatgcatactaataatgtaattatacattatgtagtaatgcactatttaattggattagtttaggcagtagccctcctctcgtaccggtcctcgcggcgagaggaagtggatgaggtcaagaggacggtttcctctcggttgtacttgaggttcct

SEQ ID NO: 387788 - DNA, 1195 bp, Cannabis indica
ttcttgacaacattatgtattgatgcactctagtcatactgatgtgataacatcaagccatacttattaaattgcccaaacatatatctatcggtatctagtgcaactctatgtacaccaataccgctcttactgatatgttatctaataggtaatcataaaaatatgtacactaaacatgtatgcatgtataatcattatactaatcttacatcatttccataattaagtgtgccgatcaactgtgtgggaaacttctcgacaatcaggggccatacgtcacatttacataaaactggtaagcgactcactaaatcactctcggggacttaaacttaaaactagaaggtttttttatcgataaatagcgtggtaataactaaatatcaagaaaacacaaaacttgaggcacctgaaaaccaccccaaccggtggactggataccaaaacaggttttcttatatatattgatctttctttaaatttttatttgtttattagaaaatatgaaaaaattaaggagagaagaaaaaaatacatttaaaatatttttagagtgtcatatcactgcttcatactttagctttatatatatactagacaatctagtcaatctttgcgcgactaatttaatttttttaatattataataaatagttacttaataatataataaaaaaattattaataatcctgtaaaagaaacataaaaatctgtattatttgctacaacactataaatatatatatatatatatattatgcaataataatatgttaaaaacttaaaagaaaaacataataaataataatgaaaagaccttctataaattatattgcatgagatcataatattagaaaacaaaaagaaaaataaattaataattatattaccttctataaatcacattgttttaaagaaagaatacgtgtgactgagtaaagaatgactaatacgaagcaatcgattaatctatatatacatactatttaagggtacaaataaataaatagaggaggagaaaatagataagaaagaggtttcaatggttacatttttattgtaatcataatggttatatttttttaagccattggattactattaaatgattgtgattgatttagaaattaaataaaaataaataataaatactttataacctgaaagtaacctgataatttttttcattat

SEQ ID NO: 387789 - DNA, 912 bp, Cannabis indica
tgtgtgtgtgtgtggagtgagttatcagacttagaatgaggcttaattatttaggatgagacttaggatcaaacttagggtttttagggttgagttgaggctctttatataagagagccctaatttacaaataaaataagtagaaatttacatattaaattgattaaatacaaaaactaaaatgtcccttaaacatagatctttttcatctactttattggactgttaagccacaatttgcaatccacgtgtaaagttgtgcaccaaaatcctactaggtccaatcctgcccggccaggcacttgcaggaagcaagctgggcggccttgtgctttccagaagttggccgaccataggaccgaccagcccccttgaggtgattggtttgtcacttgtcgtcctatttgagtgtcgagacccatgttggctagggtgctgacttgacctccttgctggtgagttgtattgatacgtggcgctaatattgtccacgtacgcatgccacatcaggtggaaaaaatcgaaataaatcttagacatatgtaaaccaacttaaatatcaaccaattaaatatattcatatagcttaccatgttatagaagtctctttaaagcgagatttctcttatactagcaaatgaaacacctacatatttgataaacactattattttattttcatatttcaatttcaaaacgttatgaaaaccttaataaaatgataatgtaactataatgcaacatgaaaacccaaaaccatattttgatgtacttggctgtagatgcatgcgaatttactatattttttcatgatttgatattaataaattcactattagaaatttgtaaaacaacgtcaatgcaatgagataaacactagctatagtattgatgtttttttttttttggatt

SEQ ID NO: 387790 - DNA, 565 bp, Cannabis indica
tatatttttgaaatctatctaatcaatcatatctctatggcgtggtctcttgaacaagtaacaatatgcaaggattcttgacaccatgtattaaaaactttgtatgtttttatttgtctgcactatttattttttattgtattctacagttacagagttatgttctgcagctacagaataagtgtttcaatgccaatattattatttcgtatttaatttaaaaataaattggtaaataaaatataaaatttcatttggtatctattgacattatttttagccaacgatgcggagtcagtaaagcgataatataagtgtctaataataaagataattaaaaagctacaaacgacacaataaatttatagaggttcgacccctgtcaatggtaatagtctattttcctttttgttgtatttttaagaataacaagataacatgaaccttgtcatgtgagtttcttgctgtatctcaaggttacaaatatttctgcagagttttggctctcttcagaatactgaacttggtcctcttaatagtgaatatgatccactatttataggaa

SEQ ID NO: 387791 - DNA, 674 bp, Cannabis indica
aagagcttcaagtcttgcaacatgtaatacatggacttgaaatcaccattaaaaaaaaaaaaaaaaaaaaaataaaagtaattagactcatctccacacctctatcatgaaacttagaatccttcatttgcccaaaccctcttcataactcgagatagatatattccatgccaaaaataaaaagaagcagtgaaattgaatcttcatgtctcacacctctttatgctttgaaaaaccatgcatttctcttataagtataagagagaaacaagttctaatacaattcataataagctttacaaatgtacttggaaatcgaaaagcctcggcaagcatttcttcaagaaacttccattctattgtgtcataagtttttcgtaggtcgagtttaataataacttagtttacaatttttccagctataatgtctaataatgtctaccttaatgttattttgccagcttattattattattattataaacgaatttggccatcttattaaaatagtaatattcatgtatataataagctagcactatatgatgaacataaatatttatataaactaatcttcattaatgtctgtaaatgcgcaaggatattttaaatttgggataattgcggcaaaagtccccaaaaacttgagtttgatgccgattagtcctcaacct

SEQ ID NO: 387792 - DNA, 2255 bp, Cannabis indica
ccctaccaacacaagtatagagtgggtgctctaatgtatatggtataacggtcgtacttccattaagaacgttcttaaccatttgctaagctcagttatttggcttaggacggcttaagcataaagtcggtatagcatagcttatatatatatatgttttgcatatcttactgagttcgttgactcatcagtttgctaccttgtgtaggtaagggaaaaactaagctggaggaataatgagttggagcttggcagtgattgtacatatcgcggcagtgtaatctggagggtttcgctctttcaacattttgacttgtattatattgatgcctgtcgtttttaaaaaagtaataatattacgagattttgtattagtgactataatttcaactgtgttttaaaacttgggatcccgacccataagtctatataaataaaataagattaatttttggtttagcgagttttcaaatacgagcgttacaattgattgcaattttcactcaatgatagatcaataacctttgagtggataacattggggatgcatcatatgagttgtacaccatcctaaatccctcttttccagcatgctattattatcctggatgaattgttaagggtgtaaaattcctagttgaggattggaataacaattataacacccaaaatagtggtatttttatgcttagaaaaggtggtaaaaaatttatggcatactcaaacagttgtacgagttcacttacttgaaggattgtagtgttattattttcaggtgtaagttgggagacacaaatggtaataggacagaaagtgaactctaatttgatgtattacattcccgacttgaagaatgaatttgtttagaagcttggcaatgtttacaccccgcaatgtctgagatttcccatatgtggatgaggatgagaccacgactatacaagaaagaaataaaatcttcaggaatccagttagtcggtcaactttcacaattggacgttgtcaaatatgtctgtgatgatgtcaacccaattgaagtgaccagcatggaccgtgagcaacctcaatgtcaagatttagatgatttcgttatttatagtgatgatgaagagactagtgatagtgataataaaataatgtaactattaatgatgatgataataattatgatgacttgtagactttaaagtattgtaatatttaaacccaccgttgattaaatcaaatacatattccttttgttaataggttgattaattaatattttctagcttgtatttgtagaatagttaatgcaggtgcaagtaaaagtaagaaaaatagagttaaggaaaagtacaatgggataactattgaacaagaactggccaagcaccctgcgggaaagaaattaaaatttatatttcataagggaactggggtcccgatagacgactatggcaacaagtttaatagttatatcaagtatcttatttgcaataccattcctttgaacaagttcaactttgaggatattgaggaaacggtcactcagactatctgggacaaagtagcggtaacatttaaatttttattctaataaattaaaaaaactataataccaaatatatatatatgactttaatgtttaatttttttcatagcaagtttgagttcccatatgacaatcgttcaaattttggtaggccaaaatagttgagattcatgaaactcaaccagcgtcgaccaatgtcccccagcaatataatgtcgaccccactcaatttcctgcagacatgcctgttatgacacatgtgatgagtgagcgatcaagcaacttgagagggatgggccagttatcgagacttaggataggggcaaagaggaaaattcctagggtaggttcctcatggcaaccaactatcacctaggaggaatatgaggccctgaagtaaagggtagaagagcaggaagtacggaacgagtggcagcaacaaatgatgcaatctcaaaatcaaatcatgagcgtgtttcagcaacaaatatgcaaccggtgttgtattttgtacccaaaataaaacccatttcattataattagatttactaattaataaagatcagaagtcgttttatgttgcatggttcacatgatttatttcatgattgtttaatgtataaattctattaggtccaaaacatacgtatttgttcgtgattatagtgtcgtcaacacagtggaatataatcatgattacatgttcataagtttaattcc

SEQ ID NO: 387793 - DNA, 1331 bp, Cannabis indica
taagcaaccattttttcacctttggcctagtagagtccaaatatttgattcaccacaagctgggagtcactatgcacttcgatattctaagcacctacttcttttccgagatgaaggtcgccaatcattacttcatgctccgcttcattgttggaggttgtgaatttgaagcgaagggtcctctagagctgatccccttgcagagaatctaagattatccccgttccgacattcttctcattcgatgctccgtcaacgaagattttttagatttctagtttcgggactggttcttctgaattatcatttattccggtacattccacaataaagtctattagggcttgccccttgatggaaattttgggctgatactgaatatggaatctgttgagttctattgcccattttaacaatctttcagaagattccagtttctttaacacctagcgtagagggtaatttgttagtaccttgatggcatgggcctaaaagtatggtcgtagcttccatgaggtgattagcaagcaataggataatttctcaatcattggatatctgggagaacaaacgcacatctcgccagatgaaggatctgtcaagccaagtcagcataaggaaaagtgtcaactccatgtacctggaaggggttctcaacgtgtatccgaaagccaatcccagtttcccttgtactgctccacacaaaataaagaatacttccctaaaatattggacagagaatattatcctgcctaaaaaggaaaattgaataaattgaagattaagtaattaatatcacattaattacccgcgatcataggacatggtatgaacaactattaccgtgatcagatctccacattagcgtacacgtattacctcatgagttggaatttatcagataagtccaaaattatatattatgtaaactcctcattagagggaaatggttattaagtatgacatcttgtgctctataaatacaaattgaattttcatacaaagggttagaaatttttgacttacttgcttaaaaagagaatagagtactcatactcattgtaatcgcttaagttttttttaaccaatttcatagtaatactgacttatggactaaaactcattaataactcaatcacgtaaaaaacgtaaaaactctgagtgcttctttaaattttattttcttagagcatctccaatagaagtattgttgaccgaagttttcggaaaccaataaaataataagagtttagagagctgtaagaaattaagagagagatttttttacgtggttggggcgttaatgagccttagtccacgagtctgtatat

SEQ ID NO: 387794 - DNA, 902 bp, Cannabis indica
aaaaatcaaataaagatgagtaggaagcacctgcaccaggacgtaagttcgagtgatgccaatccaatactgaattaattttagctctcctaaaaagatcagcaggatacctgaagtaatgaacatggaacttggaagcatcagatatgggctgaatattataaacattaataggggaaaaaatgtcacttataaaattttagaaaagatatgtcattaagaatcagagatacagaacctaagaattcaacagtgaaataaaagcaaaacacagaactaaaattgttgtagtaaccatgtctctaatcagtcattatataaacttacttttttcttggaagtgctttattatttatactaaataccaaattcgtactaataagctaccaattccaatttgtatcattatatatcagcttaaagaaaagatgttgtaaatgaacaatggtggctataatgttcattgagcttatagcaaaccagtcgtacctacattaacccatacagaaattgagtataataacccatatttcaaacacatgataaaatagattatccatttcttaatatttgtaaaacaagttgaactcttgaaaataatgccaccaattatcaccacgatctaactgaattccgtatatttcaaaagagaaaacagttaagaacatcaaatcaaaattacccaaaaaaaaaaaaaactatataaaaagtatgaaatccatgaaaccatgattattctagtatataaaatcgggtcaccatttcaattgatttcgtataaatgaacaacgaagcagcccattatctacagaaaaccaagagaacctaaacctaaatgacagcaccggccttggaccccaaccccagatacccccttcctcacagcccagaacctcaaccat

SEQ ID NO: 387795 - DNA, 655 bp, Cannabis indica
gagttcgatcgcagagttcaatccagaataggggctacgtctccatcaagctcgccttatagtagcttgatctccactaaatcaacaagtaattacaaacttgctttagatttcaaaccatagatattggttgataatcatttagtttaactctgtgtttttcttctccgatttctctcaatctcactctaaattttctttctttggttttatgtattataattacaatggagctctgaggagcttctctctctaatttctcactctaaactcaactcacgaaggaagaaaatgctttaggtgtctgtcttaaacttaatatggtgttttataggcttctgtaagttgataggggtagttgggatcgcagatagctgacatgtcattattcgtgtttttgttgatagtttcactagaagaaagaagatttttgtcagcacaaatttgcgccagcaaaactagtgcatgcgtcggtaaacttttactggagcagattccttctaccaatacgtagtcggtaaaataggtttttttggcgcaattggtaaatgtgtcagcaaaacaactttacactggtgcttttcttcatcggcaaatggtgattagggttgtacatcagtcggtttggcggatctatcctatatattttctaacc

SEQ ID NO: 387796 - DNA, 510 bp, Cannabis indica
tttattttaatataattaaattagtttgtcaaatttcttttggttatggtgacgaattttttaaatctatttactatattattataaaaaatgatcaaaataaaatataaatttacttttaaattatttcataaaaaaatgagagttaaaaaaaattaattaaaaaaacaaacgctaataattaatattacataatcaaaatgataccaaatctatcaacagtaatattaagaataaataggatttcctccatattttgtctaggactttttttttttctgttactataaaagttgtagcaaatattcatagtactaatgattaattatgagaatagagttaatatttatatatttaatattaataaattagatttgaagtaattaaaagtagctaaatagacatttttaattttttacatcactagaatcactcatggccatatagataaattaattttataaaaaaatcgtagaatataattgaattaatgatgggggtaattgtaac

SEQ ID NO: 387797 - DNA, 523 bp, Cannabis indica
tttatgttttgatttattatatacacatgtggagatccattaggatatagtacaatgagaattagcaatacgaaactcttccgctgcgtatccgatttattaccataaaaccaacatatagtacaatcccaaaatggtgtttcaatacacccttatctatttcggcacccaaaattttttttaaccatttgttttttatgaacgtgtacttgtagttatttagcaccacctataaatttttagaaaattgtacaagaaaaatcagtcatgcatgtaacaaaatatttaaacattatttttttttgtaaattattcaaaaaaaattgaaaatttacagattgtcctaaataattattgcgtatacaatcatgtaaaataatagactaaacaagtctcctaaatgtcaaaacaaataaaagtgtatcgaacatcctttttagaaagtgtattatagattttcgttattgtttatagatagggatattggcggctaaaccacctgaactttacagtttgttacact

SEQ ID NO: 387798 - DNA, 798 bp, Cannabis indica
ttgtaaaatataattaaataatagagagaaatgtgtgaatgagtatctttttctgatcaatatatataatgctagtgccacatgattttaattttgctgaagttctttaattaaattaaagtacattggttagtatttaatagtacttatatatattaattttattttggtatatttaattcacaaattgattgtatattgtgtatataagaatatttattctttttatattttttaattatttatttcattaaaagtgaattaagggttaagcttttctaaaataagaaagtttgatacaatttgtaaattttaatggaaaaatctaggggtgtgcataaatcgatctaaatctaatgacaaccgaccgccaaacattggatatccaattgtgatcggatcggattggatgttatttttgaatatccaattggatcagatcagatgttggatggagtgtctaaaaattcaatacatccaacatctaattaaactaattagtattttcatttagttttgatgagtaattagattttataatgttatacgtaaaatatatatatgtatacataaaaattaacattaaaattttacccttttttttcttagattggatggatccagtctaatccaatacatattgaacctaaaatattggatggatccgatccgatccaaaaaatattagtctaaaatattgaataaatccaaattaaactaataaatatatataaaatacatccaacggatagaaccgatccaatccaacatccattggatgttggatcgattggatga

SEQ ID NO: 387799 - DNA, 805 bp, Cannabis indica
ctaattaaaatggtttttgaatgcatgcaatagtcccttcacaatggctatgatatgattgtgtttgcattaaaaagaagtatctaccacactgagctgagtgctgacatttaaaatttaataataataattaatgatgggaatatatgaagaaattacatttatctatttttgtacaaaattcacaatttacttaatggctacagaggtgccaaatgttgttgtgagaaacaaacacatcaaattgcaaaatatggttcgcattcaaagccctgcacgtaattatttgacatattcttcttttgaagattaaatatataaaaacttatccacatttcatattaatgactcaattaatattgattataatcgtcataaattgtggtttgactaatgttgtcacagttatgatccacttggaaacaaaaaatctagaggaaaaagaagaaaaaataaaaataaaacatggttttaataaaactgatttatttatgtatgttagactaagacctttggaagttttgtttggaccaaaaaaattaatttatattttggagcaaaagaaaatgtgattgaaagaagcagccgccaccagccaactttcaactgttagaaatcgaccaacaatcaaaatcatcataaaaatagaagaagaaaaaatacaccaagttaagaaagtaaccaaaaattaggaggccaaccccaccaaataatttggatgttcactgtggatggttcgggtagtgcggtttttgaccattttttttaaatcaatcaatacatacagttttttcaatttctcaaa

SEQ ID NO: 387800 - DNA, 1170 bp, Cannabis indica
tcattcctagcctcaagaaatttttcaacaccagagtttggctggcccaaagatcttgtgcaagcttcggtcttgggccagttgggttctttggtagaatccatgaccacgtcaattgagactaccttcctcttggattccatgttagcctgaggaggacctctaaactcgctctcagaatctatttccattcctgtggagacagagataaaagatcaatggagcaactaaaaaaaatatataatccagttcaaaccaccattcacgggggatgatacttactctcaaaaatctcttgtgaggatttcccataacgatcaacgacatctccttggtttggattgatcggaagctccacagccttggaatccttcgtttttgatttaaattgaggtttgaagttattgggagcatacggagatgaaaagtggttggtgcattctggtgttacgaatttggagggacaagtttctgaattcggatgggacatcttggcaagagaataacaatccaatttcaggatgaaactcaccgaaaaccaggagcatatggaacatggcaagcctaggccaccattttatactcagaacccaataagcggaaaggccaaaggttgggaaatctaacggttgtgagtgagggataagatgaaaagacggttcataatgaccctcaaaaccgtaaacccgtcaaaatgaaaggacgcatttttccaaatagggattatgatgaaagtgccctctgtaattattaaaaagtaatttttattaaaaagaactttttaagttgcaactcttatatccaaaattcaactaccatttcaataaaggacacatgtcaagccaagggaaatatggatcgatgaaatcacttttaatgggataactcattaattgcgtaagtaacagagtatacttgcaactcgctgactataaggtcttatgcgaggtaaagatgtacgaaccgttgtcatgtattaatgagaaaccatacatcattggatgcataaagtgagacatcaacttcgttacccttgcggagacgagaccgatgcatatcgattgtgaatacacttatcgcataatatacaaactaagtatattagttgggtaaacacaaggcctaataagcgaggcacctatctcgttataggaaggagcactcctgtta

SEQ ID NO: 387801 - DNA, 1702 bp, Cannabis indica
actcgtggactatgcaaagttaattgcaaaagcacgtaaataccttatgttatttctgtttatattattttttcttagatcacttgtaatttctgtgccaaatatattgcgaaaataggctcgtaattgttaacgaaaatatgcattactagcatcaccttaggctggcatagtattccccatttcacccaaggaatcttcctttgatctgcagatgaactccactagaattgtcttacaatagactttaatttttcacaagtttttgctgaaagcttaaagacactcatcatataagttagaatagcttgaagaataaatatgataagtacttctctcccaccggctgaaaagaaattttgcttccatcctcacactcacttcctaaccttctcatagatcccctcaaacgcctgctttttgtttctaccgatcaccgtaggtcatcccaggtacatgtcatgcgtagccactgataatactctcagatccccatcttgatccacctgttgcacatttagattaaaactgagagcagacttctcaaaattaatcttctactctgtggcagccttttaagttagaagaatatgttgtatagtttcattataacctccattagccctaccaaacataaggctatcgtctacaaagaataagtgagtaacacgtggtcccgatctagagcacctaaaccctttcagttttgatctagcttctggaagggagaataacaaagataatgctttgcatagaacatgtgttaacctcactttaggccaacgacaatgagtcttaattgtaagtgacaagtagtataatatagaagtaatataatgaaataaataaagacacagaatttttatagaggtttggccccgagcagtttggtaatagcctactcctcttgatctgtattgacttaagaacacaaaatgaagtgattcctttcttagagctcttacaatgatatctctgagtatatactctttgattagtttctcgaccctttgcctcatgagaatagatcactatttatagggttataagttttgagggaaaagtttcccttctatttacaatgtctataattggtaggattacacattaaatacagaatacactaatcgagggatttggacagcttgccatatctctgtaatatgatcctagaattattgggattgcttttgtgaattacgatgcaagtattgaagtttctaagtgttggcacgctgcctggaccgtccactactcggctaagaaagcttcgtccgtgcacatatttacaatgctttgttcgacatatcctttcaagaagatatgtgaagtcaattccacgtgtcactagtatgtggtgccacatcagagtactgaaattggcataacattgccccccaagtctgtacgagacttcagaagttgcgtgaagactttatccgaactacttatgtgtgtaaatgggtgacacgtgttaggcgcgtctgttcgtgattcgatgtgaggctgaccaggcgtctctttaatttttgtctaattaatactctgacttaattagtgcctcgaaacacagtttttcacatcacgcttggacagttactcatgattaattttaatttccccagatttgcttttgggtagggaatcgaagcgtctaaggcattttgaaatgattacctcttttctaccagattgcctataa

SEQ ID NO: 387802 - DNA, 2063 bp, Cannabis indica
ataagtgtttaagtagtacaggttgcttatatatctcaagaaatgtcaagtttaatgagaatgaattcccattcaaaaccggtttcttaaacacttataaaccagaacaaagaacctcttttccagtcacctcgtggtctgctacttttgatgtaaatccaccatcaacatctcaagttgataaaggtgatcactcaatccagaaccatcctcagccatctgtccaagaagaatcacaccatgatcatgaagaagagtctgaaggtaacaactctctctctgaaattgaacatactgctgctggtttatctccaataactgacagtgcagctgagctgccacattctgaatctgaaagttcaccagaacaatcaactaagctcgtacctacgcaccctatggtaactcgaagcaaggcagggatattcaagcctaaggtgtaccttgggcagtcgaaatggaccaacattagtgaggaacctgcctctgttgaagctgcacttgcccatccaggatggaacaatgctatggggagtgaaattgtagccttgaaaagaaacaagacttggacgttagtgccacgaagggctggtatgtatatcatatcgaacaagtgggtctataagattaaaaggaatgcagatgaaagtctccaacggcttaaagcacgccttgtagccaaaggattcacacaaaggccaggaatagactttggagagacgtttagtcccgtgattaaagcctctactgtcaggattgttctcactctggctgttgcaaaatcatgggatgtgaggcaactagatattaataatgccttcctaaatggaaccttggaagaagatgtgttcatgtaccaaccaaagggctttgaagatggtgagaaaccagatttcgtatgcaagcttcataagtctttgtacggtcttcgacaatcaccaagagcttggttcgataagctaaagactactcttctcagctggaactttgtaaactcaagagctgattgttccctattcttctacaaaacacagaagttgatcattctagttctcatctatgtagacgacattatagtcacgggaaatgatgcagaaatgctacagcagttcattcttaaattaaacaagatgttctccttgaaagatctcggtccactccactatttcttgggcatagagattcaacgagataacactggaatgtatcttacacagtccaagtatgttgaagatctactcaaaagagctgaaatgcttcacctcaaaccgtgcccaacaccgatgacagtgggaaaggttctgtctcaaactgagggagaaaccttggtgaatgcaacatcttacagaagtattgtaggaggcttacagtatttgacacacacaagaccagacattagttttgctgtgaataagttaagtcaattcctacaagcacctacaaccacacattggaatgcagccaagagaactttgagatatatcaaaggcacaccacatcttggactgcatataaaacccagtgatagactcaccttgactggtttttcagatgcggattgggcgtgttgtccggatgaccgaaggtctgtggctggttactgtgtttactttggtgaatcccttgtgtcatggtcatccaagaagcagtcagttgtgtcccgatcaagtacggagtctgaatatcgcgctcttgcccatgttgcctctgaaatagcttggattcaatcactgctgcaagagtttggcttccctctccctgctgttccagtgacctggtgcgacaacatgggcgcaagtgctttagcatcgaatcccgtttatcacgctcgaactaaacacattgaattagatgttcattttgttcgtgataaagtactagagaaaagacttgagattcgttatgttccttctgccgatcaaattgccgactgtctcaccaaaagtctgtcagctgcccgttttcagtacttgattgacaaacttggagtggtgtcacccccactcagtttgagaggaggtgttaagaaatgagtattctcaagcagggtcataatagtcttt

SEQ ID NO: 387803 - DNA, 641 bp, Cannabis indica
tatatatatatatataatgatatctagaaagagaagtaagtatatatatatactgtgtactataacgaaactaaatatatacatcatcaattaatattatatatacaatacacgtggaagaaaatttcataatatttcatgatatcatatgtgtgggtggagaggagccatattaaagaagaatatagtcacgagaaggagtcgtattcatagaattaattttcattgtcaccactaataatattattattacttatatatattaatatatatatatatatatatacaagtgcagagtgaccgatgctgttggtgctgactatactatactacaattgaacctgattagaaactctcctttaattactctctggcccaacacacagtactctatatagcttcattaattcataccaacttatattattccaatagtgtatctaactagactttacccctttgtttgttcccatccccatataattccatacccttttcataaagctattcctatatatatatacccctcatttctttattatatattcattctatacaattcaaaagtgaaaataataaggtaataaacaaagcgcaaagctacaaaaaagtctctaattgtcaatcacgtgacatgctaa

SEQ ID NO: 387804 - DNA, 7072 bp, Cannabis indica
aggcctaggttcatcatgaagcttgtgtgctctcaatctggtggatgcatcttgatttggttgtaacttaagtaagcatccatgaagcttagaatctcatggccagctgtggcgtctaccagatggcgatccttggaagcggaaagcaatcctttggacatgctttgtttaggttggtgaaatttatgcacaccctctacttgttatttggtttgggcaccaacactggttggatacccaaagtggatagaatgctttggtgataaagtcgtgggcactcaacctttcgacttcatctcttagtgcttggacacactctttgtccaacaacctctttttttgttgcacaggttagaagtttagatcaatgttgagggcatgggtcattacagaggggtctattccgaccatatctccatgtgacaatgcgaagaggtccaggttcgcccttagaaattttactaatgctgattttatttccagcgctaaacctttcccaatcttgagtcttctagctggaaaagtgggatcaacatccacttcttccagttcttctataggtccaaagttgtctgcaggatccccaaaacaaggatctatgtctacctccccgctttgggctggccttcattgccctttattgggctcttcatcagagttcttggcaggcatcttctctttcttggctttggacaaggccaagttgtgacagtgacgggcagactgttggtctcctcaaacatcctaccccatgccttgttgggaacttcaggcaaaggtggtagatggatgctacttcctttaggtcatacaaggttggatgacctatcatagcattgaaggctaagggcacgtcgattactacaaattgtgccatcaactatctggttgttggattctctccaactgttggggtaatgccttggccaaagaagacatacattacttgtgtacaaggtgccaagtcagttagttggacctgatctaaaaagaatgttggaggaagctccgttgtccaccatacaccttgcaaccgtcatgtccccgatttgtgcagtaatgaccaggggtcattatgcgggaagctgacttgggcagcatctccctttgtaaaagagattgtagtctccccaagcttgaatttcttggagccccttccttcaacagccaagatatcgcttttaggctcgtggcgaagtgtctgagcatagtgtttcctagctttgctagtttcttcaacaatgtggggtctgccaatgatgacccctacgtgacccaccactggaggtggcataacgtctctgttctgggaagcttatgcacataacgaggcaagtgaggattgctcctccttataagcaattcaatatccctcctcaagttttgacactcgttggtgtcatggccgaagtcattgtgatatcgacaaaactttgacatacctcttactcatttcccttttgatgggagggggcttcttgtatgggacagtgccttgagtggccatgtaaatggtctcaggtttctccgtaaggagggtgaagcaagtgttgtacttcccctttttatcaatgttctctccaaagctattgttattgcgcttgcccctagtgttcttgccactagaggtatgggcggcactactatagtgcttgtctgcgcacctggcaggtcttggggttgtaaagcaccgtgagactgcctattgttgacttgccctattcgggcttgttagagggcttcctctagcttgataaagtcgttagctctatcaaggaactccttcatgttgttggttgagatccttcgaatatccttctagaagtcactcaatgggaggatgaacccacaatggtcgtataccgatcttcttctgttaggcctttgaccttggtggcctcgaccatgatcctttggatataattcttcaaaggtttgccttgtcgttgtttaacctcgacaaggtcttcttgctgtgatggtatcagtctagaggatgagaactgagtgtagaattcttgggaaaattaattccaagaattgaatcatcctagagccagcttgaagtaccattgtttagctgtttttgacagggttaccgggaagatccaacaccgcacatcactaataatcttttggagatcaagttgcatctcaaagtacttgatgtgtgacagtgggtcttctcgttcagtatacatcttccataccagcatctttaacttgggcaacagtaaggcattgatgtatgccaagaatggtaagccccttgacctatcaagttcaaggtctgaaggtttcagaccaaccaagcccttgatcatgtctcttatttgagctaactatgcttgcacagaaaaatctgacgctataggggcatggttgattggcccttcttggttaggctacagccttggattggccagaacttggttggccataccctaggagagggtatattcgaggctggccagccctaaacctggtagctagctttggtcgatcaaccttgggcaagggaactgaccatggccgattagccttattctgggaaactgttcttagccggccatccctatgctaggtagggcttgggcgcccattcttccctgattggctggtgcagcctgtgtgttaagaggggatagatcacactgattgctggatttaggtggaactaagtatctgatgtgattgtactcacttctcaagttgttattgtcttgggtatttccatctgttctcaaacctatccggttaaagattggcctttggtaactcgctctcgaatattctaagaaggaagttcaccttattggtcggccagaggtgcaccattaaggggctggcgagccaaagattagccaagtgggggtgttgttgtgctagatatccctggtcagcccctaagccgctggttgcaagagcctggctgttctcgccactagatctttgtgacaagacttgtcctcctttggaagggaaggtttgttttggttctaaaagaacatggttggaccgttgtttgtagaccttgcctaatttgttgactagtctccctttgagaggatcactgatgagatcctgacccctcctgacagttctttcattaaactgccttttaaggtcattagcttctctattacggcggtctagctctgccctggtgagatcggaggatgtactcctggtcatccatccatcttagaaatttgcatttctgttgtgcgaatgcattgcagccaacgacgcgtggttcttcagtttggctaacttgccagacgacctctctaagtctggccaactcgagatcttctcccaagtctacatgaggctcaccaaatcctggccccgtctctccagcataataccgaggaccagatccagtggtggtgccagggggttgctccatgttggccattccttcagtaatgaggcacgagtggagggccctaccggggcagcaaaggttggccattaagaccaattgggttggtagtgtcaacctgaccagttgtggtggccaagtttgtggtgtctgccggtttggcagggttggccatattcgtctgattcgtgaagatttcagttgtgactagaacacgaacatcaggattagcagtcatagggtcttaaggaagacccaatcaatgaggcagaagttgtagccaaagttctcattgtgttaaccatagtgttagatcagataaattgacaactcccactcaatgaaagcatcaaattgttgatcttagatttggacaaccgacagtagagtcgtatttattactgatgctacaatgtgtacacaataagaacaggaaagtaaaggagacacggtatttttatggaggtttgaccctcttagttagcgagtaatgacctactcctcttttagttgtattaatgccagagataataccactctaatcacaagggttgtggattctgaagtggctctcttaagattaaaaaatatgagaatcaagtaggcaaacctcaagtgagggagatagcctgagcgtgtaacagagagggagagagagagttagggtttcggacttagagcttgagagctttagggagctagagacttagaaaaatcagagttaggctaatgctctttatataggattacatgaagataataaccttatatcccaaaaaaaataggaactataaagtacttgttacataataaaataataaataataaatagattagttatcccccaaaaataggtaaatagctgatattgctcccctattttcgtgggttgttgaagcccaaatcgcagcttagatttttgtcccagatgaaggttgcacaccaagtgctttccagtctgcaaggttgctggccaagttcctgccggggtacaagctggtcggcccttcatttgtttgaggttgtccggcctatgctggccatagggccagctaggggtggtcggctagacccctcaaggtgcccagtttgttgtcccttcgtcctgcttaaatattcgtacttcccaccaactgatatgttgtgtacgatgacttggtcttcttgttgacaagctgtactccacatggcattgatcctatccacgtggacatgccatgtcatgtgggtgaaaattgggataacagaatcaatggtatagtattgattcccacaaaattgtttactaaattctggatagaaagaaattagtgggcccacacaaattagggagaaaataaatggaaaagttctccacccatatttgtagggaatacctttctctttcctaacttagtttattttaattttaattttattaattaaaaacaaaaaagacaactatgctcttttaaaatctataaataaaaaataattacatgttctaataatgataattttgtcaaattaaagtattcagattcccttttttagttatgtaaacgaaataatatgattatggtttttttttccaaacaatttagtaaacagcataataaaatattgtttcctaatattttctattttaaactgattcatttctcccattaattattctgctttcagttacagtttaataaacgcgccataagttttagagttttgtaatccctttttgacctttcttaatttcaagtgttttctacctcattttaatcacataatgagcgtagtaacctcatctaacaactaagtttactcaaaaattggcccttatgatgtagacattatttttgacacgtggcaagaaggaaaatattttcggagtaacgtatccctagtcatagcagtcaacctcaggaagggtccctagcccagagtcttggttgatgtagggggctcccaaatgagtatttggatcccgccacactactacaatataagtctttagaggcagttttttcagcagattaataaaaagggaagctaaagcatccaaatattcatgctcattgaaaattaacatttagaggcacttatgttataaaaattgtaattagagagtgtacctaatttctttagctacaataatttttttttttttttttttttttagtggtggatgggttatataaactcctataccattggtgatacgtgcacacgatagttgacgtgtgtcatttatgatgtcgattattttctttcatccattctttattcatatttaattaaaactacttaaaataattaaatcatattttaagttagtattaattattgagttttcaaattgatttttttattttagttctactatttaaaagcatataatttttaaaaatttcgaaagcgtttcctctgtttatacaatattttttaatttaataatcgcctattaattaacagcaaaaaaaaatatataaaatttaaaaaattatcacccatctgatcgcaattaatcgcataacttatttcattacgaatgaatatttaagatattcaaacttatctaacatgcatattattctaccaattcgaccgcagtgcatatttaatctcagaagatactttgctatggatgaatatctaagatattcaaactctaaaatttagataatattattaaacaacataaaagtcattgtacatacctattgcaataaacaatcaaagcaaattttaatttcttttgcaaaaaaaaagtttgttgattatcaagtaaacttatacaatactaagaatattataacaaatttttaagaaaaataataaagttaatatatacattatgattattttttattattttgaaagtaaattccttaattcactttattcaagacaaagattattacaattaaaagtttaatcaacactatacattgtaagttttagaaacaagactttttctacattttaaccattattttacatatctcaacttaattatgtttatatttaatgttacacaactatggatttaaaaagaaaactataaattaagttaacttatatattacaccaaattaaaaatttaatccaaaactttcttatgaccttaaatatatgtatgtttttctcataagattaccacactttttttttttccataaatctcaaccacacttttaattgaagcaaaaaaacaaaaatagtcattattttaataaccataaccaaacttttcaattcaaaattatataaaacattaaggtagcgtttagtaacacttttgtttttaaaattttttaatcacaaaaaataaaaataaaagttgtgtttttaaagcaaaaatgtgttaaccacttttattttttaatttaaaaaacataaaacaaaagtgtattccataatttttatttttatttttattttataattttattttagtcgggtctatgttcggacttggggctcggattgtggtccgggtccgggactggggccagggtcagagtccgaatcccagtttctagattggagtcggagtcccaaatattgattaagaaataaaaaatagggcattttacaaaaatactggatttggggtaatacttttcaattttactgccacacggcagaattaacatttatactgtcctccctttttttttttcttttatactgtcaataccaaaacaa

SEQ ID NO: 387805 - DNA, 585 bp, Cannabis indica
aaaactcacacaacttatggacaaaaaacaaaacaacaaacacatagtttcaagtttcaatattaattattacaaatgtatgtccttcctttgaaaattatacatcattctactatatagtgctaatgtcatcatcaatatatagtacacttttaaaagaaaaaaaagagatcataaattattaagataaatttaatatttgtgaattttcatcacatggtagtgtattatttgagcattgttattgagtactaatggtgttcaatacctattatatgagatttgatacttaattaattacagtaatagtactaaagaggatactagtcaccaataatatattttagcaattctctattaataaatttttatttgtaattaatgatatttgtctgtataaatatataatacacgttaatgagatagtaacaactcccgaacaagaaaagaaggtaataacatcatgaaaaatcatgtgtaaatgtaacgccccgatattttgccttattttacaaaaatactattttcatgcataatttgaaaagataaaaaaaaataatttaaatacaacagtggattttaaaa

SEQ ID NO: 387806 - DNA, 917 bp, Cannabis indica
aattatttaaataattaaaataaggtggaccaataaaataaggtaaatagcaaaacaaatcaaaacatgcacaatttagtttgtttttagtataggggtttaacgtaatcataaaattcaaatagtttagcctcaattaaccataaattaataaatattcaaaacgtttaggtggttgcaaaatgtgtggcaactgataagaagaggccacaatgacgtctctttgcttacgtgggcataaaaaagaagctgacatgtgttatcaaatgagtttcattcttcctaaaaaaaaaataagtttcattcattttttttggaaaatgatttatgaaattagtttcaatctcctgctacacaacacatctggctcaacaattgttgaccaaattttaacttactgcaaaacaccagagaccctacattaaaggctaattgctccgaaattcagagaaaaaaaaaatgtgtctttttacacttatttctaaatctttttattaaggcagaattttttttgaaagatattttataagttttatattgtgtattgtgttaattttttatgatttgattgttttttagttgttcaattgttgttttaatttttctattttgttattttacagttgtttttatagaataacagtatttttgtaaaaaaaattttctgacagtaaaattataatcttttgctcaaaatccagtaagtaataaagttttttgcgggtaaaccctttcaactatcactcatcttgcacttaatcctctaagtttaaattatgactgtaaaatcctccaaattattgaactgtatttgcaaattttaggtgttatctattttttatatttaactgtttatatagacgacttatgtggacatttttatatctgtgtcaaatttatattggtacacctaatat

SEQ ID NO: 387807 - DNA, 667 bp, Cannabis indica
aatatactattaaaatgattttttttcttcttttgggcccttgagctaggtgggccttaacccaagacaggcccaataccgaaccaaaaacaaaagaaaacaagtgaacaaaaataagtgttccaaaaaaccaactttttcatcactttctcaattctcattttttttctttttaatttgaatgcagatatactcacaagcagtattttcagtggtagaaaaatggttcgcaaagaaatatccagacaacagttttgtgaatgattttcacacagtaaaaatcccattactaccaaaattcaaagtgaattcattgagactttgcttcagaacattttatgtgatatgcacaactataattgccatgattttcccatatttcaaccaagttttgggtgttttgggtgttttgggtgccttgaatttttggccattagccatatattttccagttgagatgtattttgtacagaagaaaatagtgtcttggtcatcaaaatggattgttctaagaacttttagcttcttttgcttacttgttactatagttggcctcattggatctcttcaaggccttattacagccaaatttagttaacaataattaattaattaattaatattacaattagtttagagtgcatttttttttgtttttgttgtttgt

SEQ ID NO: 387808 - DNA, 1243 bp, Cannabis indica
gaaatttaaaaaaccttttaatagctaaatgaattagtacctctatttgattttggtcacgaatgaataaaaaatgagttagcaccaagattgtcaatagcttcttccttcttatcaggagaggtacttatcactgtaactttaacctccataacctatgaatgtgtcaaaaagaacatattatctatctacatgtgtaaaaaaattaaaaaaaaaaaaaaaaaactgaagaacgatggagacttgaacaggttcgaagagtatgaccgcatcaagaaaccaaaatgaataaacagaggaaacaaacaaatccataaaaaaaaaatcaaaatacatatatctaatcattgcttacgatattttataataaactaattataaaaacaaaaaccataatagacaaaatgatgaaaaatgatgaagagaggaatttcaacaatcgaagagtaatccgtgattaggatttttgggttttaacccagatagtggtcgatcgactctatgatagaaatcatgagaacgattaaaagggtcactaattagcatattaatgacaggtaataagaacctagatcaaaaaatccaaacttagattacaaaaaaggcattaaatgatgaaaagaggcatacattaaactctagaaacaatgagagctcataaacaatcaccagaaaagtcgaagccagggcagtatgaacagaaaaaaaaaatataattaatatagaaaaataagaaagggtaaagaataagttttgatgagacagaaaacatcacacccatgaaatgggtcaagaccagttgacgtcaacgatcgatgcttcaaatacattgcgccagaaaacatcaattgcatatcctcaaaaaataattacaaaaacctaaaataccaatttaaaaaattcataatactcacaatttaagatttatctatttacaaagaaaattagaagttatggagatttaatactcaatgcatcggtgaataaactgagaattttttttgaataaactgagagagaattaatctcaaggagaagttaattactttccaagtttttagggctaagttgtataatattttttatcttttaaaaagaatatttatattttttattggaataatttataaaataatataaaatcaattatggatattctgttaaagaatggtatattctgttaaaataaacagataaaccaaaaaaaatcgttaaaccaagaattgccgttagataggcactt

SEQ ID NO: 387809 - DNA, 2119 bp, Cannabis indica
tcataaaatataataattataatatatatatgtatatatatataataacacaatgctccccattttctatggtttcataagatccatatatataatatatggtcattttcattatatatataggtttaattaattataattataaattaatttcatgtggttgtgtggtcagtatgtacctactcatagatatagatgggtaccattttgtaggatgttataatgaattaaaacccacttgtgatttataggttagttttattacaatgccatataaccatctttcactttctttcaattttcatagccattatacccattaagtactctagagtttatattaattaatttcattatatttatttcactataattcatcattaaaaagttacattaatttcttatatattatgatcatcttcatcaccaatatcatctatattagtatacatatatataattgtgttttaaggctttaatcttgattaatcatgtaggaatatgtaatgtatagagataataactatatctatatattgaattttgtaagtaagatttgttagtgtggataaattaaatgcgtgttcttaatattacttatatatattgctcccaaataatatacagttaaattatttatttattaataaatatatatgagaagatcgattataaaacatacaagtaaacttcctatgttgacatgtttagttagtcaatccaaacttgactaatcgtatttgcgtgtcgactataattattttacatttcatgttgatcaacatcattggtgaattcatatatatttttaattttatctttgactcatttgattaataataccataaataaaaggatataaattgcaaattgtaaattattatgaatacaatgaacaagtgttttcatgtcaagtgtaaataagtcatcttatgagtaactttgtttctacttcagttcttttttttatatatataaaaataaataacaatttaattaaaagttaataatattaatgatacgaaatataaacaggtcaatttgtgtcaatttcttatcacaaaggttaccctaacttaagccaaataatattgtcactaagctcacatttatttttgcataatcctaactcacaataattcgtattgagttcatttttactttcaatatataaatatacacatattagaagttacatgtttaaatctaaattaattaataatgataaaaatcagattcaatatataaataaaaataacataatatgtagctacaatctacacactacatatttatctatgtgttattgaaattatatgagattatcttgaaatataacttacaaatttttagtatgtttgagatagtaagtaaatatatatttatatatatatatatttatatatatatataaaatttgttaaaaaaatacctattaatgaaaatattcattttttttttccaaaaaaaaaatagtatatataaatatatatttaatattaaaattaaaaaaaatattattatgttattccaattaaaacctcttagtcaatttttacgtttgtaatcatatgcctcaatatttttttttcaatttttttatagcggcattagttatagttataatatcatttctgtaaattttaaaaaaattctaaatagtttacagtatcgaaaataaaatttttgatatttcagtttaccacgcgcgttcaaaaaactttaaatttatttttcgacactgtaaactattctaaatttttaaaaatttacaagaatgttgttgtaactataatgaataccaccataaaaaaaagttaaaacaaaaatattttgacatgtatcttcaaacacaaaattgactaaaaagttgtaataaaaaattaaccgtaacactcctattattgtacttaatttctagaacattaaatgacttggctcagataaagttacatgtgatatttatttcgttctgaaaaaccgtgcttttgcaaatgtcaattatatataagaaaatataaaacagtatgcgtctgcagaagcagaaagtaattctactacaacaaaacaaaacagacagaatataaaatatttgcagaaaaataaataacttgacaca

SEQ ID NO: 387810 - DNA, 1321 bp, Cannabis indica
cacaaaagaagacgttgacgtggaaatgagaaaaataataccatgattgattattgtctattgatttgagttccaaagctccttctgtgtttttaattatgcaaacacacacaaaaataacaaaaaatttgacaatcgcatgaaaaacccctaattagtaagtatagggtttttatcatcaagggatggtcaactctaaactaaagtgaattagacctgtttttaagacccatccaactcataggtcctaattattttattttttttttaaaaaatacacatttattttagtaatttttgaaaatattataaaacaatatatttttttttgaatttaaatggatcattttattaatttaaataatcattctttaacaatctctactaactcagaaggtgagttgtagtcataaaaaacacgaactgacgaaaaacaagaactttttaatacatagtcaaaatacaattcgaataaacaacattttcagagttaactttttaatttggctaactaaaaattcaactacaatgcaaatgaaaattcaattttgaaaaacctcaaggttaccaaaaagtacgaataaatgaagaaatacaaatgcaatagtaaaataattattattataaatttagctaaatcgttacatttacgcataatcataattgattaaataaataaatctatataatgcaagaaaaaaaaaatacaggagaatgattatcttaagttttctttttataagagaatcattatattatgttgcttgtagaattagaaattagattcatggtctttgcacttagctacattgtggagtgttagcatctcccattgatgttgtgtgtaagcattgttattaagcatcactaatgttcaacattttttataggtgacactttataattgattagcgatattacttaaaatttattttcttaagttatatgtaatattatacttaattatactatatgacaatgaggaggcaccaataatactttttaacaattttcaattatctatggagtaatctttactacatatgcattttggtcaacattttaaactaattttatgaatatcattgtctaaaatgggcaatggccatgtagcattattattattattatttttttaaaaaaaattactttattaccaatcattttttggagagaatatataattataaaatttaattaaaaagttgtctgtgggactatgatggacaatttttgaagttgtccactataagctaaacatcagtcggtttggtcagtttttttctatataaaaatttagaattcgattttcggtctggat

SEQ ID NO: 387811 - DNA, 502 bp, Cannabis indica
tattttttattttattttttagcaatagtttattatttatcattaaagaaatgttgattaaaaccgaccacccttttcattattaattcacccacttttcttcgcgtcaatgtattataattagttattaatctcactccccacctgcctctctacaattgtcatatgtcaataaagtttgtgattaaaaataaaaaatgtgtaactaatttaaattattatttttataccgtggtgactaaaggtaaattattgtaattaaattaaattaatgataatttatatttaaatattatattatgaatataagttaaatttagtaaaaaaaaattatagtgtgacgaaagtattttttgttttttagtgtgcccctcatatatttttaactacacatgtttttcaacattttctgactacatctacagctgaagcttcttacatttgcactcacataaaatcatttctgcttgcgtattaaggtagttttatatataaattatag

SEQ ID NO: 387812 - DNA, 1417 bp, Cannabis indica
ccatgatgatcatcatcttcttcctcatgatgatgttgttgatgatgatgatgatggtcatgatcatcttccttattctcttctccattttcttccatcttctgcttttctttgagatttttgttctcactgctggtctctcctctatccttgttttcatcaacaaaccccataatcttggaacttaaaacggctagctccaatagccaaagatttcaactcagccacagtttaatattataaggaggatatatttattgtatattaagatttttatatgtacactacaaattaagcccaaccaaactattgaagcaaagaaagttgagagaagcccagcaaagaagaataaatatatatttggtcaattaattgaaaaggtacaaccagaaaggaaacaattgtttgagttggagaaaacccaaaaaaatgaaacctaaaaacaaaaggatccaaataaagacaaaatgaaaaagaaaacttgatttgtccagtacttttttgaggtgtgagttgttgtagaaagtctcaaaaagaagaaaaaaaaaaactaattgaatgacaagagagaataaagagagggagaagcgtggtttttggttttgttaaagtatggaacgagaaatggtcatattagctgtgaagttcacaaattttgggtggcgatccgaaatatatgatgttataaaggaaaagaaagagagagagaacgtgagggtcactaatatatgttttgagcttagaaacttcgcaatagattaagggagaacatgctctctctctctctctatatatatattatatatatatatgatggattaaatgaaatcaataaataatattaatgataaaaattgatggaaagtggggaatgaatgggtacaccttgtgttgtgaatgtcgtagcccataatcattatgtgagaatgtaatgtttttggacattgaagagtacttgtctcttattttggtcctgtctccttatttgtgtgataatatatatatgagtggagatgtactaaatactattggtgcctaataagaatgttcacttaaagaattgctaaaagatattattataatgcctaatatcattctcggtgtcatactacaaaattggtaaaagcatcactaatgactattacttttttcggtgtcatatcgctattggtaattaaatatcagaccctatataacttaagggctcgtttggtacgcaggactgaattggattagacaggttaatttgtgcaatccagtatttgggcatgttagaagcctggataactaatccagctaacctcatctgtctaagattatttatgccattcagggtgggataaataatccatgcaggtgagatttttttttatcgtttttttaattttaatttgattaatatattttaaatttaata

SEQ ID NO: 387813 - DNA, 982 bp, Cannabis indica
aaaaaaaaaaaaaaaaactccttgaaatttccccaggttaacaaatggcaatttgggagatgggtgagcaccaggtgtcaacctaggcgttggtccactgttctggcacccaagatgggttgtttcttcccgaaaagcacttatttccacatttttaatgaagtcaaagaagatgcatgagttatattttttatatgatgcttagaagtggcctaggttggtagattgtcaatatgggcactgggtgcccgggcaccgggtgtttggggtgctcaaaatgaaatttctttgattctaattatgatgcctcaaatatggttttggtatgtcaagctcatgtcctaatgaaaattttgacacatttttactaagatagtcttggaactaaaaccataggtgccccggttgatttctgtggtgcagtttcgtgtattttcagctctcagggcctagtctttgaagcttcatgtcttcatggtacataatactgaaagatagtgagttgcaaacaacttatcagaatctcaatacacatttcagagttcccagagtcaaccgtggtgcagggctagggaccgctcctaggtcaaccgctatgacttcagactactcaactccgcgatgttttattttttgccacatgaaaaatattgatgtacatgtcaccaaaaaaattctttgtgttaaaaattgccccccaagtcaagttcacacttgtgtggggttgacttgatgacgtgaacatagctcgtttctctcaaaactactagattggcatcaattttgacaatctcagacaattgtttctgttctataagaattcccaatataattaggacttcaaattctcttgctctttgtgtttgggaaatttcaaaaattattaagtgatggaaaagaggaaaactcaacatttttcacttatcttttaggctaattaggttttttgccccctgaattttgacatgtaccaactcatgtc

SEQ ID NO: 387814 - DNA, 1014 bp, Cannabis indica
caataatacgagcatagctttttctccatataataagaatacgattctcaatggttggactagtaaaatagccccagttaggaaatttcatatcaacaatttcttttatttttttcattctttaactttgtttcaagcaagccacaaacacttattttatgcaattaacaaaactcatacacatcatcttgtttctcttttttattgatgcccctcacattccaacaagccatatttgcattatccatgagcaaacaaagagatatcagggtcaattacctcctttgtgtccttctgttcctctcttgaggcttccaataactccttttgctcattctccatatcaaccacatgctccttcaaggcagtaaaagaattactagtgctaccagtagccttctctctcttatcttcatgattcttcatcattctaacaacaacttttttctttggaatacccattgttgttgatcgttgttgcctcaaacctccacttctgtttttttgttctttttcccatctttctttcctttcgcatttcatcaacacgacatgtagccttagtatggccgaatttcaagcagcttgtacactttgcaggcagccattcatactcaatggattgatcttgcgattgtccaaattcatcaatgtaggggatgaattttggaggtgcatctgttatctccatttccaccaagatttgagcaaactgaatacgagttcgatccttagtttgttggtccaccataataggttttccaattatgctaacaagagcactcaagcttttgttcccccaatattgaagacctaagtcatgtaatcttatccatagaggaactaaatgaacaagattcatagacttcaaatcagcagaccaaggtcgaatgattaccggcttcctgtcaaattgaaccactccagcttccaccacttgatctcgtgttgcttcattattgaatctcaccatgattaggcccaagtgttgggaatattttaccaggatttaga

SEQ ID NO: 387815 - DNA, 625 bp, Cannabis indica
gggcaaaaatcctaataagccttaaaaagatgtatttcgtgcctataatcagtggcggagtgagcgacactttttaataaggatatgtaatacattttgttacttttttttttcttcttcttttgcttttttaccaatttgtacaaaatatttgaatggtatgtactgataattattattttgtaagccattgagaatagctcaacggtaagaaaggggtgggaaattagagagggtatgagtttaaaactaaaacttttaagttaataatattatcattaggttacactaaaaaaattaattttaagaaaattttatatattttgacgcacaaaaagtcactccaaattacatgttttctgtttagcataaagtttagaaaggacatctctctaggagtgtttataaaatagtcgacccaattcaatctgcacgatccaatcaaatctaatctgtaaattgcggatatccgcacttatgcggattgaattagaaaatttaaaatccgtacttatgcagtttggatgttgattgacatataaaagtaaccgatccaatccaattcacacatatttataaaaaaaaaattaaaattatatatacaaataacattttaatgtaaaga

SEQ ID NO: 387816 - DNA, 1500 bp, Cannabis indica
ttttttttaccactacaccaaaccaccataagtgaccaaaaaaaatatttataggggtgccaaaatttcattttacatattgaaatgaattaaaatcgacaagggatcccaaatagttttggaccggtcttaacttagagatccacaagtgtaagtttaatggttggacttgtgggcttaatagtaattgtttgtatttttggtatgaagtatttttcaccttggaatatattaacttccaagttttagttttactatttatttggtaaccgatttgcattgtactccattcatgttgacaagttttgaattttacgggaagaaaataaatgaagactttacttgaatagaagaacttctttctttataatatctttgaacatagttttgtggctttattacataaaaaatggcatcgattgtataaatgtgcaactgtatttgtcagcatcttcttgttctttttactcttaaaagtgataaaagaattcaattacaatttacaagtgaagtgtgtttttagagttgataatctttttcagttggtgttacttgggtcacaagtcaacttaaaacataaaagtgcaccacacactaatattgtttaagctctcactaatattaatttgagcactgttaaaagatatcgacatagtgcaatttaatatggtgttttgtacatttgaattttaattaatatataggatctaatattaaataacattccctcaaataataatagtaataattatagggtattggccagccggtcttacggtatatggggtttaaggtacaaaattaaattttagggttcttttaattattatcaagatgatagtattagtgttttagtgtaatggtaaagtttttaaaagctcttagcttaaagtaagaattttactactacactaaataatatttattatattttcttattattcaatattttatttatatattaataattttttttacaattttggggcctgaacatttgaatatttgagacgcacgcttagctcgcctactcggctttaagtgttggacattattggatgcctttagcaatttttatattaatttgctagtttaactttacactattagtttgctattatttctttgttttttctttttctttttgagaaaattccatactctacaaaatatgggtcacatgtggtcatttttcttaataatgcaagctcgaagataccaacaaaaatatcatattatttttcaattaaattacacaatttcattttctaataaataaatccagtaatgggtcatactaaaataaaacagaaaagcacacatcatttattatacattatcattaaaaagaaaaagaaaaaaataaagcatgcttgattagttgctagagattcatataaatacgagaatggctaattaggctccctaaactttaacatgtactaaatcatgctctctgaatttttttggccgttaaaaattttccctaaactattgaga

SEQ ID NO: 387817 - DNA, 1433 bp, Cannabis indica
catgtttttaaaaatattttcacttttctaattttaaaaacaaaaaactgattaaaaaagtgttaccaaacgtcaccttaattagcttggtggtcatgatcctctctctctccacaatcaattttattattattattatttatttgattaaaaaatagtttatttacaaccagttgggagtaataactgaggagggaacagtagagacactagtgattgatctgattcagatccacccaaaaatagaatacaataaaacacaatcaatggatgttctttattttttttttatccaaatctaatcaaaattatattaaaccactctgtgcgtaaatgggcaacagtaagagctgatgcgatgaaataacggtggcaccaaatcataattcttaatcatttccaacaacaataatgcaatactttttgtcaatatttcatcatatttatttatttcttatttttttttaaataaatttcatcatattttttttttataaataatttagatttagaaatagctagtttcaatctttagttaaatgctttgattactttttaatttgttttgactttggagatttctttgtattgccgtatcggcttgttgctggagtcagtgatttctttgtagccttttgcctttgattgtttcaaaaaaactcaagaaggctcatatagcaaggtgatgtagattagagacaaattataaatcaattgcaaaagcttattaaaaatgatcaatcaatttatttttataaaagggtatctaattactattttttattagtagagtatttaattagcaaaagttactaattagactttctattttcttaaataacaaaatagaccttgtattttctaaaattgtacaaataggaccttgattttttgttaaaataaaacttaataataatatgatctaatgatgctatgacaaaactgattacattttctgtatttgttcgtgttagaaattgtcttagagttggttatattaaaaaataaaattattgaaaatttagggtcctatttttactattttggaaaatataaggttcattttgtcatttaacaagacagagggtccaattagtaacttttacaaaatatagggtccaaaatagtatttacgcgaacttaaataaatattagtttaaatttatagttttattatttataattttataaataatattgtttaaattagttttaatattatcatttcactttttattatttatttatgtttttgttatttatttctttgtactcgtggttatactacattattttcttaattttaatgtttatttttagttttattattgtttctagaagttatagagtaattgagtttttgttaggggttttttcattagtgtacaacaaaaacaattatattacaaaaaatgtgcaaaaaaacacaattt

SEQ ID NO: 387818 - DNA, 730 bp, Cannabis indica
tttttttattatatatatacaatacatagtgtctataaacaaccatagattagatttgtttgttggagatgaataataatataaatttaggttttttattataaacaaaaaaaacatctctattctaaaacataaatacgaggtttggttggtttatttcattgtgctagggtaccataaacttaaggtttgattttgaattttttgattgggtggtttctcaattgactagtgatgtagaattcacatggtccaccattaacaaggaggaaggaacctatctttatcttcttctctttattttccaagaatcagtcactttccaccattattattattattattattattattattataatttttggtatttcactataaactacagtgttcattgcaccaaatgggttctattcacattcgatccaattatatattagatgttagattttattatcagatttaatctaattaattttaatcatcaaatcgatccaacatctaatgaatattgaattagatcggttctaattcatctaacattttaaatctagtatttattagatttaattaaattcatccaataaaaaattaatgttaatttttatatatcgatattttttttacgtataataatataaaatctaattattcattcaaattaaataaaaatattaattagttcagttgaatgttgatgtattagattttcagacatcccatccaatct

SEQ ID NO: 387819 - DNA, 2973 bp, Cannabis indica
tagtgcaaaaagcagtctttggactgtcctcctcttggattctcaagtgatgatagcttaatcagagatcaatctttcagaagaccgtcttcccctaaagctgattgaaaagatcatcgatcgtaggtaaaggatacttgtttttgacaatcagtttatttaattctcggtagtcaataaacatgcgtaaagatccatctttcttcattataaaaaattaagcgagctccccagggtgacaaactaggccgtgaaaaccctaggtcaagtaacctttgaagctaaattttcaattccttaagttctaccggtgccatcctgtatggtgccttagaaactagttctgctcctggtgctagatcaatgatgaaatcaatttctctctatggtggtaaacccggaagttcatcaggaaaaatatctaaaaattcttgaacaaccctcatatcctttggtcgaactgtctcaggccatgtggtatccaataccacggccagaaactcaaaacacccgtcttgtagtaaatctctagctgttaatattgaaatcactagcatcagagatccctgaaccgatccttcaaatacaaactgttcctcgccctcgagttggaaaatcaccatcttccatttacagtcaatactagctgagtacttggataagaaatccattccaagtataatttcgaaatccgctaaaccaatttctattaagtcagcactcaactccctatcctcaattctgatcggcatagacctaatcagccttttagagatgactaattctctgccaggcaatagggttccaaaccctttatcataactatcatgcagtctatccaatttgtgaaaaattttgtatgccacataagagtgagtggccccagagtcaaacagtacagagaaataagaattattgaccgagagctaacctctaacaattgagaggctaatttctgcatcaacctgtgttaaggcaaacacccttgctaaagcgggttttgaagctgtctgatgttcttctttcagaagctacgagcagtctcttttatagtgtcctggaaacccacactggaaacatccttgccctttacactcacccaaatgatgcttcttacaactgggacacaccgcgtaagtgtatcgggttttggagccaccctaacgatttcctcgacattggttccctcagaacctcttattgtgaccagagacaccgtgtgcaaatggtgcctttcgtttcttatcaatcgtcgagccacaaccaccccttccaaaaccacggggtaggaggagtagggggttccaccaacaacctgagttcctcgagactcctgagtgcactcaactacgccttcatctcgtagtgcctttcccaccatgtcagtataggttgtgttgtcgtaggagtaatcataagatcatgttttattttcggattcaagccatccaggtacttttctttcttgcttaaatctgttggcacaattccttaggccaacctagctaatcgatcaaactgagttgtgtattcagtaacactcatattctctttctaggtcagttgggtaaattcttttctttttgcacttttgaccgcttcgtcgtagtactttgcgttaaataactccttgaacttttcccaggtcatagtagtaacatcataggtcagggacaccatgtcccagctaacgaggacatcctcatgcaactggaatgttgcacaggccactctatcgttgccggtgatgcccataaaattcaggattttagtaataaatgccagccattgctcgactttcatcatatcgggacctcccagtttaactggaggtgcccgcttgtagaacctttcatacagtggttccatttggttcactgcagcaactgaacctgcctgcacagtaggggtaggagccatctgcttttctggagcaaacattgcaggagtaccatgatgccttgggcgtctgatttcttcttctttttcattgattctagcttgcattgctgcaaacctatttccccattcctgggcaacctatggctggttaacatcttcccgaccgcgtgccctgcctctaaccctacatggaaatgtttttccccttgtgtgtgctctggctggaggatacttccttcttagccttggccactgcaaggttataacattcccgagcagtctgctggtttcctcttagaaacactaccccattctttgatggaaacttcaggcccgggtggaatatcgatgtgacagcctttgagtcatacaaagccggacgccctagcattacgttaaaggctgaaggaacatctaatactagaaattttgccataagagtaatgatcatcagagcttgtccaacagtgaggggtagacaaatttgtcctaaaggtgctactccttggccggagaaaccatagacaggcaggagacatggggctaaatccttgagttggaggagccccatcttttcataagcacttttgaacaagatatttgaagaggctccattatcaatccttgttctggccaccatcttgttttctatctgtacatccacgaccaatgggtcattgtgcggaaacctgattttgacagcatctttgttgttgaaggttatgttaggccctcttgccctggaattttgggattcctttcttctatggccaggataacttcttcttgctcgtgctgtgctgttcgggcatacctctcccgagctttgcttaaatctctagctatgtgcggacctccaatgataacttacagatgtccgtctactggtcgaggtagcaagtcttggttattgtcgttcctctgactctaatcggtcttgacatacttcggtaagtgcgggttatttctctttatcaggaattcaatttctcgcttcagattattgaattcattggtgccgtggccgtagtctccgttaaatcaacaaaacttggtcatatctctcttgct

SEQ ID NO: 387820 - DNA, 2537 bp, Cannabis indica
aaacttgtatttagataatacacagagtaccaaatgatagacacccataaattatatcatgtagttattcacaaaaatcaataactacaaatatttaaacaaagacaattaaataatatacaaaataaaatacacaaaatagaaaaaataattaaaactcaaaaatgtaatataatataaactatgatatatatattatatattttacttaaagtattaattaaatattaaatatgcaatgtggtcacttattttattccatcaataggcgtaaatgtatatatatatatatacataattaacaaatttagtgcctaaactgctatattattttatataatataatatttagattaaatatttaagtaataaataatttaatttaaaaaataatatttattaaattgtaacataaaaatatgaaattataaatgtgtgaacaataatctaaaaagagctatatagatccttttattgatgatcatataatttgtaacttatcattgatcttcactcttaaattagtaaattgagttattaatttgtaacttattgtgggaagttttgaactccttgaagttattttgtaaaatgatgaataaattattaactagttactagttactaagatttttaaaattttacactacattctacatgttgcaaagagacaggtgacatatcgcctggctaattttcagcatcaagttttgaacattgtgttaggttttaacaactttcataactcttaaattacttatttaagtctataaatgctcaattcaacattagtaacagtcaaggactttatggtggttattcatgttcgaataaaagttaaaactctataaatagaagacatactattcacttgtgacacatacttgaaatcacttcttgtgattaaaacattgtaaggatatgtccatccttagacattggttgagcattatatgaggcttaaaaacccttaagagtatttttagagtttttctaattgtctatatgagggaggtaataacttttaggataaactttcttgagtcttggtcaagtctattgtgtgttcttgagtgtccttttttttcttctctaattatcttctaatcttgatgtaatatatttatatgtattttgtgtatttgattgtcatccttcatattctctcttgtaaaaaatctctaacattctaaaagtcatttgtgatggcatactcttcattaaaaaagacaatatgtcatggagggttatacaatcaaaagaagttattcatgaaagaagagcatcaatcaatatcacaagaataagaatatgtggtaagatattgaagtcattcatggataagtatgataaatttattttgtgttatattatttaaatattagtaatatattaacgtatttcatagagatatagaaatttttacatattaatatatatatgtatgtgtattatattattatatgtagtgctttataattttataattgagattatagtatattagtatatgtatatatatatgtaaaaagatataatatatatttgtaagattaaatatgtagaaatagtaagtttttatatagcatatatatatatatgatatatattgtgtgtatgtatattaatgtatttgtatgttaataaaaaaaaaaaccagtaacatatatatatttataaaaattaatattaatattatgtgtatattatataatatgatactataagagcatatatacataccatattaattttttgtgtttatatatatgtacaaatcattatattaatatgtatattatatgatacgataattgagatgatgataatagaaatgtctttattttattattattattaataatattataagacttattttgtgattataaagagttacttggaaatgaagttctattttagcaataatcatcttatattatgaaataaaaaaattgaactatgagagttacagttttatgagatttctcttgctatatcaagaacaaatagatcaaagtgaatttaaattatgagttgagccataaaattggaagaacaagtttagactcaaataaagtaaatcatagtggattgaaaatgtgaaaagagattacaaaattggagaagccattttgaatctttaaaaatcaaaatggtgaaaaaaattgatgaaaaatttgttaataactttgataatattttgaagtaatatcaataaggagacaaccatacaattgaagaagtaattttattattatgtgaattttgtattatctatcaacaaagtttcaataataattttgttaataaaaaaataatagatgaaaataattttattattttgtaactggtgttttggatttgacaaactttaattttgataaaaaaattaaggtggcatgtggttgagaggaatgaaattataggaacaggtttgagagtagcactaagaatggatagaatcaaatttaaaatatatataaaaagaaatgataaaaaaaatattaattttttttttatcttgcattggaatg

SEQ ID NO: 387821 - DNA, 1258 bp, Cannabis indica
ttttttttttttcaaattttgtaaaaagagaaaaaaaaacatacgaaaataaaacacatttcgttatgtactgtaatttttttttgatcaacttaattattaatctaacggttgtaataataagctaaaggacacactctgtatatatatatagctatggtaataatataaatgaaaacgatggatatagctagggttttgcctagaaaatgcattttggaccaaaagtttttggttaatatatttattaatgtattaattctttagggcatattacaaggtatatatgtatacatatatatatgccttatttaagtaataatcccaaatattaataactaaactttggatggtgtgttattttaaagagagagatattcaaaaatggaatatgagatgtgagtgtttgatgttgatataaggaatctggacaatgctgggaatttataataattaatatatatttatgttgaaagatgttgttgatgttgaagtgactaacaattttgtttagagagatattttgttgtttagttatatatatatttatatataaattttatatatatatatatatgacatgtgataaggccacagtccattcaattaacccttgggagacagtgtgtactgttggtgttggagatgagaattttaattattaattaataaatcataaatagaaaattatccataaaaaccaacatcccaaaaacgatgtcgtttattaataaacagtgtgtttttcaatatattggagccaagatccaaattgtcccaaagattaacctatgtacatgaccaattaattaataatagtctataatgtaatttatgtttgtttaatgtatattttaaggcttcaaattaaacaagtttaataaccaatcaataagtactattaattgcatggatgataatttgttaaggtaaatgcaaatttataagaagacaaaagtttacttctaattatcaagattgataatatattagagcttgggcatcagtgataggagttcacgggtcgtatttgtatcgtgtcaagattcaagtataataaatatatatgcttgattcgaatatgaccagtttaatagtcgtgtcggaaaataattcctaaacacgactcatatatttataaatgaattgacacgacacaactagtttaatctgttataaacatatcaactaataaaacgtttaatgacatattcaacacgttttatgactcatttataacttgttaaaatctaaaata

SEQ ID NO: 387822 - DNA, 1731 bp, Cannabis indica
caaaagtgagagtcactatatagtgtcactaaaaggttaaattgtagtagtcggcttctattggaatggatgaggtggctgctgaggtctatgcttggcttattgtgtttcaatgggctaaatgaaacaattgggatgattttgccctggtaaccgactcttcagtcgtcctccaggccttttctactgagagatacgccaattggaaatgtattccttggttttctactgctatcaagcttaaacataatttttctaatgtgtctatgcaatctattaaccgcacttatttagcttttgtcgactctttggctaataatgctcgttgttctgagagcgacaaactatctcctttacatacaattcagcgtattaacccactgaataggtaatcattactggtagaaaatgagctgactttgtgaatcggtccactatgacccacactgaatcaaacattcccgtggttctagaaaaaccaaccacaaaatctattgtaatgtttttccacttccactcaggaagggctaatggttgcaataaccctcgcggcctatgatgtttagctttgatttgctggcacgttaaacacttggacccgtaatctaccacatctcttttcatcccaaaccaccaaaagtagggtttaagatcctggtacatcttggtggttccaggatgtagtgaataaagtgtggtgtgggcttcatcgaggatttttcttaagctcaccaataggaacacaaactcaagctttatacaccattgacagatatatgttaggatttcatcttcttttgttaaactttagtttcatataatgcttcactatgcaggtaactactacaaaaaagtgctacttttagtgacaactttttagtcaaaacataaattttttgtaactaaatgtgacttttaattagtcacaacaaaaaattatttgtgactaaaacataccatttaaacacaagttgtcaataatttagttttagtcaaaacaagtgttatgactaaaaatacatttagtcacaacaacttataatatttgtgactaatacttttagccacggactttttagtcacaacgtaagaatgataatttataattagtcacaacttttttacttttagtcacaaattttgttgtgggctaaaaataaaattttttgtaatgatttttatcaagaaaattaaatttcatggtatgattatttctattaattttctgaaatttagtgtgacaatatacttaattaaaataaacaatatattaaataataatgtgtgagatttaattataatatttttgaacgtgttatattattaaaatatttttaaaagtaagaatgttaaaagtaatgaggaagagagattcaaattaatgcacatctcttaaccatcatctaaatgatattaataataaatttaatttaatttattaatgctcatcatgtttatttcacaggtcatctgtgtctcaaagaagaagtcaatttgaaagaaatgatctttaatattccacattttatcctcactacttttttatatattttaaaatgaatatttttaatgtatattaattgaacataatatagggtatctcttaaattaatttattaaaaggttggtgcttgttatcgagtgaatttcgcaacaccaaaatggattatttaattaatataaaagagaattttcagggaagtgacaagtgcgagtattcgacctagaatg

SEQ ID NO: 387823 - DNA, 676 bp, Cannabis indica
ataataataataataaaactcaagggtatacttgcaatgatttttgtaatcttgagtgaaattttctaaaaaaaaaggacaaaactctatatcatagttggataaaacttgcttgcaatatgttacatatatgttttattcatatcttcttagaagacttttttacaaaaaaaaaaatggaaaaggaaaattaatataaattaaattaaactaaaggtagctatagatttggtagacattaaattgtgaggaggatagtaaagaattgctatgaactctttctaacctcgagttattcttggatatagttttttgaatatataattcttggaaatagttaacatcaaagaaaaaaaggaaaataaaacaactgcaattaatttctctatagacaaaagtgagaccctcccaactggcagataacaccccaaagggaactgattaaggcttattttggcatcaattagaaggagattttataatacacctctagcaaagacagcatgagacattgatgttgacgctcatgataaatcaaattggtcaggtaaaattactactatactattgtcagaactgcaccacatgtcttggtttatggacaaaaattagtacttattatcatctatataattggactagttgctataaagctgaagtgcaaaaaaaaaaaaaa

SEQ ID NO: 387824 - DNA, 575 bp, Cannabis indica
ctattaattcaatgatataggaaatatatttgatcacatcataaaaataattaaaaactaatagaatttgataatacaatactaacctactaatatattttctctaatatttatttgtagtactaaatcaaatgtataacgaaagtattattatgattatcttcacacgtatatatattaaatcacgaaataaaaagatgtataaaaatatttatctcttaaagcctatcagtgtattcatatttctttttgtaagttgtatccaagaacgatatagattactcacacctcaatctttcactacacacaatgattagtgttggctgagtaggatacactaaataatgagttcttatttttgtctcaacacatgagccagaattctctctgagagtgaataataataatgacttttttcaattagattttcttgagtatacatatatagggatatgattttgtcccgtgatgtactttcacggaatgtattctgtggtacattagatgggtctcagggtacattaaatgagtgtcagggtacgtttctatttttttaaccctaattacccttagat

SEQ ID NO: 387825 - DNA, 1821 bp, Cannabis indica
gaacttcttcaggccactttttccgccaatgaaataatgacagctgcgttccaactagcaaatgataaagcacctggattagatggattcaatggtagttttttccaaaacaattggcatctgttgggggtggatgttattaatgctgcccaaagcttcttgaatggagatgcaaacattgctgcaatcaacaatacgctcattattcttatccctaaaaaggcaaatcctgaacaaattgttgattaccgtcctattagtctgtgctccacggtttacaagatcatatctagggtcttagttaaccgtctcaagcccattctcagtcgcattatctccccatcccaaagtgctttccttccaaacagattaatctcaaataacattatcattggccaagaggtaatgtattccctttctcatcgcaaaacgggtcgccttggatggatggctctcaagcttgatatggccaaggcttttgatcgtgttgaatgggttttggtccgtcgagtgatggagaaatttggttttcctcactgattcattcatcttgtcatatcatggatctctactgcaactttctctttctccattaaccagcaggttcttgggcatgtgaagccttctagaggaattcgccaaggggatccgctatccccttacttatttcttttatgctctgaaggcatgtcctctttaatttgtcacaaagcgcaagaggctcaaccctgcaaacattcacttggaataaaaattgccagacgcgctccgactatctctcatcttttctttgctgatgatagtcttctttttagttcttcttctcccttagctgcgactgtcatcaagcaaatcctgcatgactacagtctggcatctggtcaattggtaaatttttccaaatctgccttgttcttctctccaaatactagtgttgagaccaaaactagtattaccaccatccttggcatccctgtaagagacgctattgataaatacgtgggcctccttcaaacttttgggagaactaagaaggatgccttcaactacattaaagatcaggtttggtctaatttaaacaaatggaattccaagcttttttccaaagggggtaaagatgttctcttgaaatcgtctgtccaagctatcccctcttatgctatgtcttgcttcaaactcccggcctcttttcactctaagctcaaatccatgatggctcgcttttggtggggaggaatggaggaaagccgtaaaatcaattggaaaaattagtcttccctttgtgtttcaaaatttcatgggggtcttggttttcgcttaatgaaagctttcaatcaggcgttgttggccaagcaagcttggtggcttcttcagtctccaaactcacttgttgccaccttactaaaatcacgttattttcctcatactaatttcttgattcgggtaagggtcatcgaccttcacttatttggtctagcatctcttggggcaaagaacttctcctgtcaggtctttgaagaacagttggtgatggtaccacaatatccatttttaatgatgcctggatcccaggttatggtaaactccattatcttagacacagctcagatgtatacacaacagtggcagatcttttaacacctaccaaggaatggaacctcacctgtcttcaaaacaccttccctacgaatatttgtcaagccattttaaccattcccctaaccaacatagccacaccttcccttgatgagtaaagcatatagtaaaggatgtttcataattgtatttatgaactagtttccagaagtttgggtggattca

SEQ ID NO: 387826 - DNA, 994 bp, Cannabis indica
cacagccttgggatctcttccatcgataataatctgtacaaagcatatatgcatgggaaaggaatgagcatgctaacatacataatatagttacttgttatttaactttaatcgcagacgattacttttacaggatttaattatcaagatcctaatttctacttttagtaagtaaagcatcaaattataatggtagtaggatattaattaatatgtacgaataggtaaatggtaatgcctggataatagtgtgatgatctcgtttgcttgaaacagagtcccagtcaagaaaccccttgtgtgttcttcgtaacatttctgaaattttaccaacttttgtagcactttcaattcttgtcttcatgtcttcatatagcctctataaaaaagaaaaaaaaatacttgattctctttcacatatgatctaattaattttcaaataaaaatataactactccctgttttgattagatatctatgttttattttgtttttatgacaaaaggtgtctctcttttaattagtatgcaaattagatttattataatatgtgagagaactatgacttgactctcatattcatatacatgagaatttaaaaagccatatattttttagaacttgaaaaaaaaaattgtacaaagattaacaaattgaaatttcaataaaaataattaaaagccatgcaaattgcactacatagaaaagtataatgcaaacccagacaaccaccatgtagaagagaagagttgcttcacatataaatataatataccttgatggaggtccattgatcacgatggtcatcgacatcgagtggctgagaagctttattgttggtgaaataagcctcaggagatctgggttctactttgaacttgttacagaaaggaagccatttctttgagaattcagaggcctctaacaaagcataaaatgtcaattccgaagcaccatcgtcagaaaggtagacgctaagcttgtgtggagggta

SEQ ID NO: 387827 - DNA, 923 bp, Cannabis indica
ctataaataaaggagcaacctgctgatttgaatagagagactcggcccagccattgtgagttgcagcatccatttttctttggagaatcacctcagaaatcagagagaaaacaaagagagagttagagagatatattgtaataaaaccagaaaaataaaggaagaagaaaagagagaaaaacttagagattacctgctcgtttgtgtcatggaatctccataatcttgtaactcggttttgacattcatagtggagatttaagaaactttgagggtcgcttgacggatacgtacctctgatttagagggaactccaaaatcaattattgtggtgtctatagttttttctctttgctggttttatttttgctttcttctctgtgttattctttggtttttctactggttttaaagcttggagaaagaaagggagaagaaagagatattcggctgaagcttttctttgagaagaaaatggagtggctgctagtgtttcaaaggaagaagagaataagaagaagagaggctgaaagggtcctttcggctgctaggtttagaggaaaagaaagtgatttggctgctagggtttgaaccaaataaaagagtttttatactgcctttaaaggctagtgttttgagggaacctctcttgatccgcacaagagatggatggtcaattttgaccttgggttttttaactttgtggtgttggtgcaggggcattactggaatgcttaatttcctacagtggtatcagagatcgaggaagcaagaagattcaacaatacctggaaacaaagtcaagaaacaagaaagatcatcaaaactttgaagatgccaaatttgaaattatcacgaaattgataaacaggaaaactctaacctaaactttatcttgttacattcttgcttttattatcttg

SEQ ID NO: 387828 - DNA, 2351 bp, Cannabis indica
cgtgggcaacaacccccaggaacagcaaccgggtctcatctccagtattatgcagaagagacaggaccaataattggtgagactgcgattaacgagccccatgtggacttgggagaagatctcgagttagccagactcagagaagttgtaggccatgcaagcccaactgaagaaccaggtgctactaactgcgatatattcactcagcagagacataaatttttgagatggatggatgactaggagtacatcctttgatctcaccaagtagaattggatcaccacatataagaggccaacaatttgataaggtgattcaaccagagaatcgaagggagaggcaaggatcttattagagatccacttcaaggaagactggttgatagatcagaaagggtctatcgacaagctaaccaacttggttcctcaggaactaggacaaatcttctctgccagagggaggacagacctttcctcaaaggtctaatggcgagaatagatcgataccgacaaccaacagcatggggggccggccagggatctttagctcaacatcaccacccattgtacagcctatggccgatcagccaccagcaggagcaccctgggctggctagaggacaacacttcctccgtaaggggagcgaggcaccgagaggttaattttcaaccgacaaggaccaacagcgggtggaaacacccaaaatagagattcgtgaagtcaaactgattatttcagacacctagagccaccaaacctccaacaattggtgtgatctatcttccatcaacgcataaccaacatcaatcaactggggagtcgcgagcggctagaccttgccctttgtaggtctggctggccatggaagcattgcgggcggccaaaccctaccctttgtaggtctggccagcattaaaggagcaatgggtgaccggaccctacacaaagcaagtctggttggccaacgacagctataacgccctatcccatagggacgccacatgtgagatttaataaactagtttattgctaatagattaattaaatattaaaaacagtgatgatattaaaaacttggctaaaataaaatactaaaaataggcatcataacaaaattaaaaacgcgttctgggcatccttgttataaaatgtttacaaaagactatatacgacaacaattcaaaacacaaaatcaaaatacacaacagatacagctagcccaagaaacttcctggcaactcatcacataggctggtggggtcaatatgtacattgctggagaagactatcatctaatggttgatctagcctttttttacctttacctacaccatatagcacctgtgagtcacaaaaactcaacaagaaaagtaataacaataatcatataatttattattcaaatattattatttatactcagacaataagaatcaaacgatcacgcattactcataagatgagatccaaatcacttctggcatctgccacgaataaatatcagtatacatatatttggtaatgcaaaactattataccaatattagaaatcatattcatttaataatataaattatatatattatctcataaagtaaccatcttcattacatcacatcgcctaataaggcaagtcgatgctttagtctgataatcctgtattgcattgcctaatcaggcaagcctgtgccatagcctggcacccaaatatcgcataactgcatcacctaatcaggtgagcctgtgccaaaaacttgcacccatatatcacataattgcatcacctaatcaggtgagcctgtgccacagcctggcaccaatatatcgatcgcctaatcagacgagcccgtacctacgcccagtactcacatgtcactactgcctgtacctaataaggtacgccgctagaaagaaacccaataacaatttcagtctatgccatagtctgacattctcatatcactgtcgcctgtacataatatggtacgacacccgacatatcgcatcacctaatcaatcaatcttttattatatatcaatattaaccatatcttaatctcaatatcaatcaattcacaacaatattaattgtattatttttcttatttttaatctagattcatgcatgtcggccaacccaagtgaagaaatatccctgatgatctcggccctatgtcacaacaacggtaaaccaataagtgtttatcccaaaatactacttaacactcgcataagacaatctagagttttctaccaaatactgcagtataaatatactaaaataaaacttatattttggctctaaatcatacaccatattgtagagttcattgcaagcttcgaaacgata

SEQ ID NO: 387829 - DNA, 2414 bp, Cannabis indica
taacttcaatttataccccagcctagaatttcttaaaaccttcaccaaaacctaaactaaactcaagaaaaatcaaaggaaaagtagtaagatcatacctccacttggctagcttctagagttaatgatttgcccaagaatttgatgaaatggaatgaacttttccctggttttcagcttcttctagggctcggcagaaggaaaggaaaagagagactatggttgacttgtgtttgtttttgtttcctaagttatccttaaatcgattaatgtttgaaaccttaatgttaatataaataaaccttatttatttaattctaactccagccataaattttaaataagacaaggttatagcttaacaccaaaatgactaatttgtcctttttataacccttaaaccttaaatcaaccctagggtatcttggtcatttcttagctaaccccgctcaactcacaacttaaaattctacaccagtccagaataattccaatacaatacaacttaattaccgtgacattttgatcatttaactagtttccacagtcgccgggcccgaaaatacttcattttagaaatggtatccttgataccaaaataattcaaaataatccccgtaattaataaattacgctttagttaatcaattcaccctaactattctaagtaagatcataatcttactccaatacccaaaataattacatatttcataaaatatgtctaattaaatatcattttattttccgggatattacaattatcatatataaataaaataagagagaccacaaataatctcaaaatcaagcttcaaatgcatatcacattgtccactagacccctagctctcaatgtcaatcataaaaaacgtcatcctaaatcgagtagtcgcgaaccaccaaaatactagggctcaaattcaattcacttattgtacaaattctaagtcttacacttataggtgagtgcacacatgctctatctataatgacacagagactaggtcgtgaaataacaatatgcacaagacatgataaatatggctctcatcagcaaaaccaaatacatgcatcaagaatggcactagtacatattccctttattttagaaaattcggcagcataacgactgtaatttgaaaaaaaaatcataacctgcataaatatttgtaaaaaatatatatttggcactcaatgccccagaacagttctgaaaaaatatgcagattaagtttttgattttataagcattttataaatcataaaaattagaatatgtctaatgtcattcaacacatataaaaacacgtctaataatcaagttgagtccctacatattccgagtcattaaactttgttcaaaactaaaatttataatgactgcatacttaggtatggtatcgaattagcagacaattaacagattattagcgagttaatagttattcatgattatatgtgcatttataagacatattgtcaaaaatatgcattagagaaataatttctcaattatagaaattttattgaattctaggtgtatcatgctatatatgaattttattatttttatgatttgtgctcattaacagtgaaactcgacaatttagctattagtatcacaaagatatggtttagtattttcattagctattagtattactttttctttttctttgaaaaaaaaaacattattttttctttaatgcttaaggcaggtacggtttctatagaaacctaccttttatttttattttttatttatttattgatgacaacagctagatttgttgttttttttaaaaaaaaaaattgtgatatagtgaattgctaagcgtgtcggaatacatttatccagtcacacttggcgtgtcactatagactagtatttttaaaattaataaaaaaagagaaaattttaggttttactctatagtgactctctattaagggtgttcatcgaaccgttcaaaccgcccgcaccgcacaacaccacaccgcaaaaaaatgcggtttgaaattctttgcggtgcggtcgcggtttgaatttttcctaaaccgcgcggtgcgatacagtttacggttttgatttgttaatatgctgttcaaacagcaccgcactgcatattataaaaatactaatatttatattaatttaggtccaataagtgaaggcccaacctaagcccactaattattgtattgttgaaacttgaaactttttttttcatatttattttcaagccttatgatatttttgacaagtgttgctcaatctttgttgtatttgcgatagtttaattatttacatatcccaaaccgcaaaaaccgcaccgcaccgcaccatttttacggtgcggtttttgtgattttttagtttcgcggtgcgggtgcggtttgagaaattaaaa

SEQ ID NO: 387830 - DNA, 1338 bp, Cannabis indica
tctctctctctctctcaaactcttattaactcagctatggcagtaagtagcaggagaagaagaagaagaagaagaagaagaagaaggaaagggctttcagctttgatgggtgaaaggcattacagagaaagacagctttctctctctctctctctctttccttcgaactctggctcagtctctgttttgtaggcaagcaaacgacaatgctcaaagtttgactcctctgcgacaaagaccacggtccactccctgtaccaaacctctgattcacgccacgtcagaatgggaccaattgaatgatgacgtggcgtaatttagtggtcggcggagttccttgaccatattattataacccgaggatttaccgatttcttaaaaaataataaagtaaaatgtattaaatttttcttttttttttggaaggaaaggtattaatttaataagcgagtaattacgacacctcttcaaagatttcaaattttaacctcattctctaatttataatgaaattaggaaacaaatcgcgcttctcgtgcggttgtatttattttagcgacaattaatttataaaactacattaaatatcaaattttgatatttttttttttcatataatatatatgaaaaaaaaataagatttcaaaaattactaataaatttataaaaaactcatgataatttcaaaatcattgttctcactgtatctcagttgtagttgctactacatacatttaaaactgatgtgatcactatatctcacttgtaatcactactatattgaaagtcgttgtcatcaccgtattaacaattgagaacaaaacaataagataaaagtttaaaagtaattgagaacaaaataataaaataaaactttgaaatcgaagatgaccttgtaggctatgagatgatggttagatcttatggcttatgatatatatatatatacacacataaatatatattttttaacttattaattaaaaaataaataaacagataatgatttattagtataattataaatattttttaaattgtagataatttattttttattttaattttttagactataataatatatatacattgatgtaggtgaatgaaatatatatttttaaaagaattagtatatataattttctgtgaattttttttaaattaagaatatatataatatttttacaataagaatacatatatagattgatagttgtagcatatttttttaattaatcatctaatatttataaatctagaggagtgaacaaacaatattaattagagagattttaaactgtcatatacaccgcatcatatctcttatttatatat

SEQ ID NO: 387831 - DNA, 645 bp, Cannabis indica
aaaaaaaaaaaaagacaattaaaatcgtatacataatattatttattataatcgcataaagatttattttatgtgctaataagataaaaaaatgaaaaaaaaaaattaattaaattatgatattctcatatttttaatatattaataagaaaatattgggaagtataaaaataataagtttatgaaactattttaggtagtgtctaatttcatataaatttataagtataatattataaaaaaaaattaataaataatatagaatgtataaatttataatattcttttatttaaatttataattaactaaatatataatatctagttatctcaaattctacacaaggtgacgtaacatctatttgagtgacatatggagagaatcctgcaacctagacagacaattccactcgtaatgagtcttgtagggagatttgatacttgaagtcataacagaagctgtaacatccgaccagcttccatcacgcaagcagctcgcatacaccgtctgaaggatgcaagttgggcaattttagagatatatctcatatatcttctaacttgcaagtcatggcaatatccctaaattcatgggatagattcacaataacaaagaagaaatgaaacctacctagtttcccattt

SEQ ID NO: 387832 - DNA, 1232 bp, Cannabis indica
taattttatataacttttcactataattcatcaaattcttatatttaaccaaacaatataattcaattaataataatctaattaattattttaataaattttcaaacaattatattctccactttaatatttctattaatctttaagtactcatactaaatgtcctaatttatatatccaacgtggaacacactatattgtaaaaaacaataataatataattttaatgtgcatattattcatcacataccattaccctctctatatatataaatatataatattacttgtcatattctacatatcacataagcttctcttgtgcagtcccttattagcattttccaattaataataacacataataaaagctctgaaaatggccaaagcaacatcatcattctcaaccattgaacctccaaagtatggaaggctcatcacaattctaagcattgatggaggaggaattagaggaatcattcctggtgttattcttgaataccttgaatctcaacttcaagtaagactctaataatatataaacaatatatatgtatatataatattaatgtacatattctttatatatatatataggaaacagatggggaggaggctcgtcttgcagattactttgatgcaatatcaggaacaagcactggggggtcttattgcagcaatgttatcagctcccaatgcccaaaaacgccctttgtattccgctaaacagattgtcccattttatcttgagcactgtccatatattttccctcaatcaaggtacattcctacctatatatgctgcatatatatatatatactttttgcattatatatatatatatatatgttaatcagtggaatatttggttcacttattgggtcggtgaaagacgcaaggggaccaaaatatgatggaaaatatcttcataagcttgtggagaaactgttggggtcaacgaggttgcatgaaactttgactaacgtagtcattcctgctttcgacatcaagaagcttcatcctactcttttctcctcttatcgggtatatatatgtttatgccttctttttataaatatttaaatttatttaaatatctaatttttattttttacaataaaaataagttatattttcgtagatatagctgaatgaccagataattatctctcatgggtctaagtacataaattttaatttttattcaaaaattattttaaatataatatta

SEQ ID NO: 387833 - DNA, 713 bp, Cannabis indica
ctatgatcataaataagcttttgagttgtgtctgagattttgatttgtttcgtaagaagaaactatcatttagatctgcagcgctatatatgatcataaataagctaattttgttaggaaaaactatgtatgattgctaaaagtgcttttaagttgagaaatattttgagttgtggctcagattttgacttgaaattcatgtttcttttcagaaaaaatgaacggattgacaaacaatatgtcatttgttcatgaagatgctctaaaagagcattctctgaacacaatgcttattgtattgttggtggtaatgctggtaattacacttattttgggtgtaattactttcctatgccgcgctcggtattcaaatccaagagctagcgcaagggtccatccggtttcggaagaagagatggccaacaacaacaacaacaatgcacaataagcttagtgtttaggactatatctataactataataaaaataaatgagaatgtttataggtttatactaaattactaaaatagcttttattaattatgaaattacaacaacaatgcacaataccttgtttattttttgttatgtgaaatttgagtatttaattatagacttctaatttttgtagtttaatatcaatcacattattttgatgtgatatttttaatttttaatcacttcctattgataattatattagctaataatca

SEQ ID NO: 387834 - DNA, 653 bp, Cannabis indica
tttttttttccttctttttctcgacctttctcaccttggcttcccaaaccttgataaccctctctgagatcagtttctcttcaccacatgccatggaaacctgcacctccaagccatctaaacccaacccatattcgactcgacacccaaacaacccatcccaaacccctaaatacctcccaaacacaaccttatacaaaccggagagatgaacacgatgacgtgtttggtgctagaaaaattacgtgagagagcagatctgagaaggagaaagtgagagagaacatatctgacatgaaaatgacacttgcaatggcaatggtgtgatggcactggagaatagtgttgggagatctcgaggtttgggtcccttagagttcttggtgatggcgacgaaggtggatctcgaggtcttgggttttcggtgacggtgacgacaccagggtctcggggttctcagtcaccggtgtgggattgatcggcgacaacacaaatgtctcggggtcagcttagagggaggatgtgagggagagagaaaaaaagaaagaaaggaggaggaggaggaacctcgttttgttcctgttgatggtgacggttattggtgattgttctagattaaacaaaaggaaaggaaaaagaaaaagaaagaaaaa

SEQ ID NO: 387835 - DNA, 1971 bp, Cannabis indica
tttaatttaatatacatataattcatatattacgtgcttagcacgcgaaactacactagtagaattagatgaaccaaaaatggtataaacatcattctctctcttcaacctcttctctctttttggccctaagaagaaccaataacccaagttgtaatttcagagctaattcaactttccagcaaggaattcatgttaaacttaaggatgaattggatggaagagcaaggtacccctagactcttttgttttgttagttttggaaagaaaaagtttggttttatgtgagttttggtgattttgattctatatgagtttggggatattagaaattgtttgtaagctgattataaggttgtttgaagttaattttgtaagctaatagcagttgtatgttggtttgagtgagtttgagtttttgaactcagacttagcactctaatggtggattttcattgaggggtttattgttgtgtttgattgttggattatgtttagaacttgatgttaaagtgttttgaaaagtttagtgtggtttggttaagatttgagcttaagaactcgaggtttggggatttctgctatgaaacggtccaccatttctgtagaaatggtcaaccgtttcccaagccaggaccccaataaacgattcactgtttggggattcagtccaccagttggggtggtttttaggtacctcaatttttgtgttttctagatatttagtgtaacgccctatttacttaagcaagttacagtgattttttacttactgtgcaggcctttgctaattaaagggtttctcgaaaatcgtatcaaatttaaacttttaactaaactctagacttttataaatatttaaccgtacataaaagttgggatcccattttaaaagtttatgaccatattcaaaatacattttataaacatgtcgctccatgactacaaaataaaggcccaagtcgtgtcgaaaccgaactctccaggtctaccatcctgatatgtacaaccatcctcgagctctgcactcactggtgatcaaccttagcctttcctttaactacacacgcaaataatgtctgtgagttgacaaattcagtatcagtaagaaaagcacaaaacatataacataataccgacttgtatctaggtgcccatgtgtctcaagaaacccacttggtttagccataattcacatttgaaaaatttagcatacatctttttctctcagagacgctgtaaaactttccttacgtgttcttcatgctcttctagactacgtcagtaaatgaatatgtcgttgatatatatgatcacaaacttatcgaagaactcagcaagcactctatgcatgagatccatgaaagatacatgtgcgttaataagtccaaatgacattaccgggaactcatagtgactataacaggttcgaaacatcgctttagggatatcaacctctctgattttcaactgataataactagttcttaaatcaatctttgaaaatactacgactccttataattggtcaaataaatcgtcgatcctaagtaagggatatcatttttttaatcattaccttatttagttcacgataatcgatatacattctcatggaaccattattctttttcacaaataaaaatggagcttcccacagagaatgactcggtttgatgatactcttgttaaagtagtcctaaagttgcgctggtaactcctttaacttcgtcgatgtcattcagtatggggccttagagataggtgtaatccctggtatgaattctattaccaactgtattccctatccagaggcattcctaatagatcttttagaaatacatttggaaaattagacaccagtctaatattcaatggttatttcttgctctctttacttttatccataacagtagctagaaatttgacacatccaaaaaataagagagagagagagatatgagtaatgtg

SEQ ID NO: 387836 - DNA, 2894 bp, Cannabis indica
tttattgagagtcactcatatagtttatatttaatattcgttgtaataattttcaaatttattttaaatcaccaaatcaaataaactaaaacaaatataaaaaaaaatacaatatacactatatgataaataaactaaatcaaataaaaaaaaccaaaataatcacaaaataacatgctaataaactgaatcactcccagcataaaaaatcaaaatcaaaatctcaactaaattgtaaacaaaatagacccatgatcactacaaaaaaatttacttttagtaacaacaaaatttgtgactaaaagtaaaaaaaattgtgactaattataaatcataattcttatgcatgttgtgactaataaaaggtcagtgactaaaagtattaattacaaaaattaaaatttgttgtgactaaatgtgtttttggtcacaatacttgttatgattaaaactaatttagtgacaacttgtatctaaatattatattttagtcacaagtaattttttgttgtaactaataaaaagtcacttttagttatataaaaatttagtttgtaactaaaaagtaagtcactaaatatagttatttttttgtttagtgcattattaatacaaaattaaaaaaatcaattaattttaaaatgttactcaaaatggtataatataggtattaaatagacccatgatcactacaaaaaaaatcccaactaaattgtaaacaatatagacccatgatcactacaaaaaaatttacttttagtcacaacaaaatttgtgactaaaagtaaaaaagttgtaactaattataaatcattattcttatgcatgttgtgactaataaaatgtcaatgactaaaagtattagttacaaaaattaaaatttgttgtgactaaatgtatttttggtcacaatacttgttctgattaaaactaatttagtgacaacttgtatctaaatattatattttagtcacaagtaactttttgttgtaactaataaaaagtcacttttagtcatataaaatttttgttgtaactaaaaaattgctactaaatataattatttttttgtagtgcattttaatacaaaattaaaaaaatcaattaattttaaaatgttacccaaaatggtataatataggtattaaatagaattttgaaaattaattccaattaatgatttaaaatgtaagttttccataacaaattgtctaactaacttgtaactatctatcttcataaaactaaagggattgctaaaaggtattattggttcctagcatcctatttcgtgtcatatctcctcctaaacttaagaaaataacttttaaagaatattgctaactaaataggttttttagatttctaagttaactttaataaaatatttcaattacctagaatattctttattaattttataatattattacatatatatatttaaaataaaaattatttttttaatccctcattccctttttaccctcgactcactttcagtcaaaatcgttagaatcaatcgaaacaacaattgtcttctccaccattatcgcacccaacagagttgctacttttcttcatcgtcatggacatcgatcaaaaatcgattctcatcatccaaaacacatctttgatagttgagagatcagatattccatgctctctcatctttatacgcaccactggaaaaagtaaattaaattgtcttacttttgaggtctttgtacaatatacattattcacatatatgcatatggttttgacttttctattctgacccaatcaaaaaaatccaacgttatcagtgccaaaatagctcagaaaattctgatcccaaactcgtctcaggaaggatttggtggtgaatatgtcattgcatctcaaattggacttatgttggagctaattaaagcaccattgatagggcccttgctgaagattggattttacattttcttagctatgtctttaatgcttttcatggggagagaaaagatacaactatgaacccattcaagatcgaattggggtcctctaatttccctgttgtcttgatctaaatccccatatttaacgaacgagaggtatagatataaacatatatatatatatatatttcaaactcatttcttactttatttcttccttgagaacttaaaagtttggtatttttatttcttttttcaggtttacaaggtctccattggagctgcatgtgggctttcatggctgtccgatcgtctattgatccaagtcctcgacgatttaactgacccaataattaaggtaatactttttttctaaaccacattctaccaaacatggtcttaaagtttggatttttaccatttctaataagaattgttggtgaaattgctattgaaaattatttatttattactttcgcagaaaaccaaaggaattggaagatgattgcaacagagataaaggtagaagaatcgcataattaatcgtactttgactgtgaagaatcgtcacctaagcctaatagttatgggcaaaatttccatatgattatagatttttcaagtgtatatatttatttaataggttttaacgaagttgtttcaggcgtatatatttatttaataggttttaacaatgcaacccataaataaaaacgacaacttttgaacaaaatgactaactttttttggggtaattttctaaagcaaatgatggaaactgagtgtgaaagtcaatacgtgagtttgttaaataatacattacttccattcaaactgcttcccctcaaaattaaaattatgtggctgtttagtcagttaagtcagtgtcatatcatataattttatttacttttacaaaacaaatcgttcaaataatcatatctgttatagtgagatttttct

SEQ ID NO: 387837 - DNA, 683 bp, Cannabis indica
aggttggactcaaagtattatgtcctttttttttaaataaagaataaggattgcaacttaataaaatagaaagatcgattaataactactacaaaatagagatatcaaaattgtgcgaaatgcaattgtgttttctatttgttttatatattattatattaaatggagtacggtgacaacatcaaatttgaatatagagataacacaacaaaaaattactcattaatcacaacaaagtaaaagtgatgtctaaaagaatgaaagagactatttaacttttattttttagttatgtatatttttgactcctcatttattagtttgacatattaattaatactttaaatattattattttgtaaataaaggtcaggctgacctatttgtacactttaacttctcatattatttaaagaaatttatatgaataaataataaggttaaaaattgatacaattttattacatggtgaaatggtggcgtttgacgagattgattggagggtcgaaacgacgccattcgatggtatgattaattgcaggcagtgaagtttgagaggggattcgatgggaaaggtggtggtgggtttaactgtaattgttgatgtcaatcgttattaatttgaatcttgtagttgtttttttgttcgattatcgtttgtgccaaccgtctctctatattga

SEQ ID NO: 387838 - DNA, 2163 bp, Cannabis indica
tctctctctctctctctcgatggctcgtctttctcgctcaacagttccattccaaaactcatccatgcttcaactattcctagtaaaatttcttcatctccatctctctctctctctctcaattttttttctaggtttgaaaatatcttttttactgggtttcagattttatctttaaaatgagttttaagtttaatctctaaaatgagatttcgagtttagttcctgatctaaaatgagttcttagagaggttgaatccacacatttgaaagattaggccatctaccctaatatttttgacctttcaaataacacagattgtggttcttaaatagacttatagaaataatttattatttgagaaacagtctttaatggggattatacatgtatcgttacatactatttaatgcttcaattgctactttctttcatgctcatatatatcatatatatagacataggtatttatagttatggaatagagaagatttttgagaaaaatatcgaaattgattggtttaatctaattcaacttattggatttgtttaacagttttgttttccagataaattgggctcttaatttttcggtctgcttttttttataagaatttaaaattgagatttatatattggaaattgaaagtctaaatagagattgctcaaaatttgaagtgtttctcgttcttgctgaaattttcggtttggtctggctagctgctggctttgaaattttcagattgcttgttttgaggtacacattttatctagtactctattcataacaacaaaaatttcttttgaatttgatttcatatctgctataagttttgatgataatgtgggtatcatttagtcttaatatatgttggattatatctattgagtaataatacctattaagtcagtgactttgaataataaaaagttaaaattgttgttattctaatgaaactttgttacaaaactgttctacttaacaaaatatcattgagtagttgatgggtttgtggttctttagtgtttgttctggtgtaagtaactagtattcctaacacaattacagttgggttgttcaacattttttctaataaattatctgtaagataagatgttgtgctctgtgatattgaataccctgtaaattattttcattcctttttgaatcagataaatttgtatgtatgtatatttaaggatatataaaaattatttcttatgtttgcatatataaagcatacaacctttggaaataaaattcttgcctcaagtaatgcatggaggtgtttcctctttttaaatgctcatatgttcccccattactctttggttgcctcacccaacgctggtggaagattagcatttggtaagaaaattagcatttggaatgtagttgagaatgggtttaccagactatgtgcaatactttgagatgtagttgagaatgagtttaccagactgagaagtgagaactttgataggccacccttaacttttttgtatgctcgaaagaataggaggagtgtcgtggtcaacatcacaggggattgactgctgagctggtagagttgttaggaaatgagtgtttgtgtgtgtgctattttggggtacacccgttggtttgattaaagggggcaggatttgtcttttgtaggtgggaatcaaccatttttcatctaaattactctactactctcttcttttccttgcatctatattggtttggcaggttatccctattaaactcattcatccatcttccctcttccacatttattctccaactcctgcattttggttgatttttttggcgccaaccctatctagttggtgatgaagccttatagtttgctttatcaacattctcttatataaaagcgcaagttcagtataataatattttgtatattattaaaatatgtagttaaaactataaatattggaatcaatattcagatcgtaatcctacaggaaaaaggatgttgttcagttatcgacattcatctttgagaaatttcattgagcggtgttttggcatgttgaaggctcatttttcgattttaaagcaaatgcttgttgggttttgtgccctaaataaaacctattttaatataatcagatttactagttaataaagatcagaaataacattttatgtt

SEQ ID NO: 387839 - DNA, 1300 bp, Cannabis indica
aacttgtaacttggtacaatcacttgctcaaagtcctcaggtgatgaatttgccaatgactttcccagaagatgatgccaagcatgtacatttttctcacaacaatcctttggtgatagaagctcagattgtgaataaaagagtttctagaattctcataaataatgaaagttctgttaacatcattttcaaagatgccttcaaagccattgatcttgtggaagaaaatttattaccttgtctaattcaactacaagtctttaatagacacacgctaattccaatgggaaaaatacaacttccaatgatgataaatggagaagtctctagaagcaatgcaatatcctctttcaagtacagcacctttgtagtagttaattgcccaacaacttacaacatcattctaggacgaccatttccagttgattttagagcagtaacattcatccatcatctatgcataaaattcccaagtgatactggaattattggaatgattagaggcaaccagaagagtgcaagaagctactacaatgtttcaaccgagactgttctcatggtccgagaaggaaacataacagaagctggaacatcttctgatccacaaagaggatgaactagatcaatgggtaggcgtggaaagaataatggaagatgtagaagaagtaggcattgatgatgaagatcccactagagtcgtcaaagtgggaaagaatttacctctagttgttaaagaaaagatcgtctccacagtcaaagcaaatagtgatgtattggcctggagtcattctgacatgactggaattagttccctagtgatttttcatgcactgaacatagatctaaaggcagatctagttcataaagcaaagaccctagatccagaagagcgaaaccgtgaaaaaatggaagtaggtaagttgaccaacatcgattttctcagggaagctctatatatatgtctagacaatccagttttggtcctaatgcctaaacggacatggaggtgtatagatttcacaaatctaaacaaagcttgtccaaaagattgttttccacttccgcaaattgatcagatggctgaggcaacctccgggtacaaactcttaagcttcatggatgcatactccggttacaatcaaatcaaaatgcatgtgactgaacaagagcatacaagttttcaaactgacaaaggcatctataactacaaggtcatgccctttggattgaagaacgccgaagctacctaccagcgaatggctaataaaatgttcaaaaatgtactaggaaagaacatgga

SEQ ID NO: 387840 - DNA, 1136 bp, Cannabis indica
aactttttccagaatatatagatcataacacacaatccttttataatgaaactcatttttagtaaaaacaatcctctaataattagatttgctcaaactaagcaatcaaatagccctacatatatgatatatttatatttatatatgtatatatatatagagagagtgagatgttataaatgagttggtgatcttgtttgattgaatgggggaaagttcataaacataaatgcaatttatgcaacatatataataataatgcaaactatatactattcatatagtatatgtttctgaatttaatgacataaatttagtatttgtcttggatgatatataggaaatttatgtaggaggttctcttaaagtttccttctaataaatttttttatttatttcagcatctaaaaaacaattttagtctatttttttcgtgataatatatatatattttaattatttaagatcacttataaattttcacaaaattttgaatgtcgaaaaaatatttaaacagtacttacttatcatgtgtgtaagaaaagcagttgcgtatacattaaaatatgtaaatcttattttcagtattataaattatttagaattttctaaaactttagataagattttaaataattataacataaatgaactaaaaaaaactaaaaaatttttctaaataccgaaacagataggaggtctactaatcgaaactctttcaattaagggggtgtactgtaaacttatcctatatactatactacattataactttcaagtaattagattaattaatgtgtgtactatatatatattgttattctttgtatgttatatgaataatatttgaaagcttattttatattcaatttaggtatacataattatgttcatgcattttataatctaaatatatatgtaccatatggttgtattctttgtgctatataaatattaagagcataaattatcggttgttaagatttataaaacactaaatatatatatatcacagatttaaatatattctgtaacatccccgcttcaagcctccattgggcccttacacccacggaatgaatggctcttatacacgagtacgccactctagctgcttcatggactgatgactgacc

SEQ ID NO: 387841 - DNA, 728 bp, Cannabis indica
aattgatttgggaaaatgactcttatcaaaagaatatattttactatgctgttaagtatcgtcaagtgaaaatatttaagctaatacatgaggttggtttatcaaaacaagtggtacaaaattatgaagataatgatacaaaaaacaacttgttgcatattgctgcctgtaaaccaccggagaatatgcttcgcagtattgtaggatcggcgctacaaatgcgagaagaaatattgtggtttcgggtaattattttattattattataattagtaattattgtggtataagtacctaaatttataattaatcagttgtctattacaaactcgaatttttttttttttgagtatttatgttattatttttaagaaaattattttctatattattttttattttttttaaatttataatttgagttgctctaatattttgttatatatatatatactaaagcctagataaacttatgggcaaaatataattttatggagtgggaaaattttttttttcgtattatagctagggctttaaaagatgatttcaataatttaatattagctagttttattacatataacactatttttgtaaagtgttataatttataaatttatgtagaaagtgataattaaaaacgtacgtgagtaatatatagtacacatttcactcatatgaatggtcatttcttcttttttagattctttttccatgaaaaaagcata

SEQ ID NO: 387842 - DNA, 578 bp, Cannabis indica
cttctattgacattttggggcagacgtgacttccgtgtggggagtagtgtgagattacttttttccatcctagtttggaggggctaaggtcaatcaaattatggtgggaggggtgtgggtgtgggatgatgaaattcttgaggatttgtccaatgcttctgaccaacggttaattgagagtattgtgttgaatgataatcttggatcagatcatctgtattgatttaaagagacttcaggagtttattaggtgaagattgcttacaagcttctccaagtgcttcatggtaggtggtcagaagataataagttgggcctttggagggtattatggcaactcaaaattcctcctaaggttaaaaagcttactctagagggcatgttttgggtgtttaccaatactgacccagttaaaaggttggcatgttgatgtggtcctcatttgcctggtgtaccaaggtattagtgaatcaatcctccaaatttttgtcgagtgttctttagccaaagcttgttggcagcaggttgatagggctatttgcaaccttttgaccatagatttttcaggatgattttat

SEQ ID NO: 387843 - DNA, 726 bp, Cannabis indica
attctgtaataacaatattatatatataaacaaataatttcactatatagtaatatatggcaaggaatttgtacacattttattacgtatacgcgcgtaccttccgaaagtcatcatcggaaagagtttccacaatcttggggccagctgacatgaatcctcttccaagtggactgtatgccacaataccaatacctagttccctaaataaaaacataagattgtgtaaatatataaaaattacaaggtaaatatactttggctgtaaatttcacaataaaaataataataatattaagtgtaattctattcacctgcaagtaggaataatatcttcctcagtatctctggtccacaaagaccattccaactgaacagctgtaattggatgaacagcatgagctcttcttatggttgaagcggatgcctccgataatccaatgtactttattttaccttcttcaactagtttcttcagctctccaatctatttgtatcatttgataaataatataaaaaactatatacatctatctattcaaccaacaatatactattcattgttaacactttaaagtgtccctttgcatttcttgatgtttaaacattagagagtaagaaaaataattcatttttcattataatactatacctatacaaagagtttttgtgaccatatgggaaaaatattaagagatttatatgctgcttatttgatcaattaat

SEQ ID NO: 387844 - DNA, 1189 bp, Cannabis indica
attgcaaattatcatgtcactctaaatccagtgaactgacaaatcaatgggaattaataaatgtgattagatgtttatttgatgaagtagagctttgtctgcccttaaaaatttgctctgtggcagttgtgttttgtttttctttttaactgttttcaatccatcttccccactaatttttccattaaccaccttctcaaacgctcctgctttccttttaccgccgtgttcctccttcccttgtcattctccaagtctactccatcgctagaattttcttttgattacccatggataactttcacccagacatttcaaatgcactctccactaaagaatgtgaagtcatcactatcaatgacatttccactcctcctccacgccctgtcacttatcaagtcccttgcagaattttttcaagcaaaggtcataatcctagacaactcaaaaacttcattcttaaccactggtttgctgttacaatttcagactatgacactaaatccaattcttatatggtctcctttgactgtgaaggagatctaagaagggttctttctaaagaaccatgacacttccataactaacacataattttgtgctctccaaatgctctacaaaatgcccctctgacttcaaacactactactcccttttggattcaagtttttcgtttaccctttctaagtaaatctgaatctcttgctcgaatacttggtaatttgattggtacttacttagatgttcatgaagattctcttaatgaaaggtgggaccccttccttagaatccgggttggaattgatgtttcaaaactattgcttagaggtcaaatggtctctttccaatggatggaagatgaaatgtggcttgattaccgttatgaaaggcttccggacttctgttatgagtgtggaattatagggcatgtgtttgatatatgccctatattcttggaaaaagttgatgaaggcatggaaccttctcttacctatgttccatggatggagggctctgatcttccaaaatctgtctatgatagatataggcaggatttttctaaggttggcccatggcctttttgttggaaattattttaccaggatctaggtttactaacaagtatgttggattaacaacctaatatgaattctaaaacaataaaaataaacacatataaagttagaaa

SEQ ID NO: 387845 - DNA, 987 bp, Cannabis indica
aaaaataaaaaataaaactaataaacaaatcaacggttggatttgaaacagggtgtccgagatcaacttgttgctgttgggaaaggtttaatggtcaaccattaccatttgaagactaaaaaactaaaagaaagaaagaatctcctgggcttctccatccagttaacgatcgattcatcaactactggttttctcttctatctcctgattttcagagcttaacacttctataaggtgattctcattcattttctcttcctctgttcgcattggaaaatcttatatttttgaaatttgttcatttcttttggggattgagagaattagggtttggttctttggaaatttgtaggtcatgcattgtgatggaatgcccgtaaatttggaatacgattggatagcataattttcagtggacatgtgtttaaatttttcccaggaatcgtttttggacttgaatgctagtgcttttgaaattcaattagatttgcttttcattttttttgtttgatcacgttcattgtgtatgttttgctgtaaaatctgagaaaatctgtaagtattggtcactatttttagttctgtatttgtcaagacattgctacattattagcccagtaacattgaagcttgtccttttggatcaactgggcatatcgtcaaatacagaatatagtaatttgagttttgatattgaacagattttctcaaagttcccttatgataatcatagctctcttatttaaagattggatcttttgcatttattggaaagattttgctttgctggtcgaggggaattatttctgcactgtcttttgtgagatttaataaaattcaggcacctgacatatctgtggagataagacaatatagctaaagtagtggtgaaaagatatttaatcttccattcttagtttatatgatgtttcatatatatattatctatatgtattttaaattttgtagatacttggatggaagagg

SEQ ID NO: 387846 - DNA, 4837 bp, Cannabis indica
caaagttaagtgtacaactcaccgcggataaatccagaaggctagtagaatagagcatgtcagggttgctatcatcgagctcttcatgctaatcatctacagaaggaaaggctctctttagatgcctgtgagctgcatccatggctctctacctcgtggctgagcatgctcccagactaggcctcaggcaacctttgcctgaaggccgttccctcttagctggagggtcatccatcacgagttgcccgactggtgcaggccctagagaaggaggggagaaatgatccagtagcatctttggcacgggtggtctgagccaccttggccctcagacgacctaaaggctcctctgatggtccatcaacaagacctctcaacttggaagtcatatctacagaaagaaagtaggaaagttagaatgcaagttacaaatattcaatgcaagacaagaatataaaagatggtacaattagttatcaaataccattgtcctcagaagaggaatcatttgaatcctcaacaaccgccttgcccttgcctctagatgcaagcaagggcaagtaggtcctatggagctttggcctcttagcttggttagaagagaagcatcaccaactgttccccacaagccaagtgctggcggagggccctctctcttcttcaaaccttgagctatccgagatagaggaacatcatcatccatctacagaactttatagctagggctccatccacaccaactgatggacatgggcccgcataactctagaggcaggagggtatatggcataccttttaaagttggccacactagccaatataattatattcttcttctctgtgaggagggataggatgtgatttgccctatccctcatctacaatgtagggatggagcgcttgtaaagcggcatccgctggaactggtggtgtcgaatctcatggatgtcccaagcaatgaagtagttctaaacatacccaccaacatttcacatagttgtgttcaaccactgatggccaacctgactaaagtagatgtacctagtctagttctgctttgaggcagacttcagatcaaagtaatatccaatctcatacagagtaagctaaggccaacctagctctgcatacaaaataaacattgtcaaaaggtactttatacttttcggggcgatttgtgttggacaaatcccgaaataagcatcaatgtctctaaagtatgggtgtagtggtaacaccgcccctgctgtatatgacgctctgaccatgccatccaaacaagggcaagtcggtgtgccctctagtctctagtggaagatatgtcacaatgaacacccctcactagaccactagccagtatctcgtcaaaagtctaaatagagaggacagatgcgggagaaacttacctatctccatgtgatctagcatccaatatcttaggctcagaaggctaaatcaagacatggcctagacccatcactgaaggctgaccaagcctgtttaacggctccctgtcgacatcatatccacccaaaggacaactgcgaaggacaaaacaagttttgtaggtccttctcctaacaagcacatcctccacttcagatttagagtcaaaactcttgaccccttggtcgacctcaaggccctctgcctgaccaaaacctcttgatctatatcctcacaagtctgtgtcgcctcctctacaactctgactctacccattgttgccaccctggaaacatgaggatcataggtgctctatgacatgattattttgttttggccatgactgtcagtctagaatcacacaaaaggagcaaagggacaaactaaatgctctctctgaaaagcaaggctaacaggacctatgacacaacagttgtcaccttacaaatcaacacttaaaatcaccttcatagaagagatataggaggaaggtgagcaacctgacaaagctacaaaaaaaattccaattaacaatacccaagggtaccttccaggtaaatcacattgtacaaggctgggtgtcagcgaagtaccatcttaagtacatctacttagataaatagtgagtcctaagttgtgcactcgactataatggactcactatcaagtcctagatagtgttcccaaggggaaccacgcataagactatagttgtattacctccaaggctatcacgagaccctagttgaggtcaatagaggacaaaagattggccgcttacttggaaccttggccttggtcggccagggttcctaagccctagaaggccgaccaggtcccatgacacccagcatagggccagccaagaacttcacttccaggcataggtcaacaagcctatagggtatccccccacgactgaccgaacccaattgtgaccacccatggtcagctaggtctctaacaagacctccttggtcggtcaagaaatgtataggatctgtacacgtgttttttcaactcaaacacgttcttcatgactcaaggagtcaagaatcacaaacaaaggtcaaatcagatcttttttgtctagaaattacacattacaaatcctaagactaccatgcggatcaaaatacctaaaggattacaatctaatgtgagaattaaaagacactcaaagcaaagaacaaggttcatacattcatggcaaaataaactaaatcaagtaaataacatgaataaaaaccttacccataacaagaaactattgatgaagaagatggaaagcttggatcgccaaaatgacacaaaaatcccaagggaatggagcaatgtgggttaagcctatagagagaaggaggagcttcttcaaagtttctatttctagagaaataattagaagtgtaaagtgaagagaggtttcccccaaaaagacttaaatagattttgtggggccactcttttacttgccacgcattactcaattaaaagacatgtagaagtataatgcagttaatttactgcaacaaatgagattagatagtcaagagtagatatttcaaagactaaaattgaagcagcatttattcagtaaaggctacatcaatttaaacttagctagtaagtccctatccatacagatgtccacatagggacttcggggggcaaatgttatcccaatttttgcccacctaatgtggcatgattacatggaaaatatcagggtcacatggcagtacaactcaccaataaggagttcaagtcagcaccttagccaatgggggtctcgacaatgagcgacacaccagccacttcaagggggctagccaactacccctacgaccatccagcctgtatcttgaaggtacatggctggccaagattggacttggtgggactttggtgcatagccttacacatggactgcaagctacactgcaaattgggccttaacatcccacgaaagtaaatagaaaaaacctatttttaaggggcattgtaatattttgtattttaccaatttaatatgtgaatatatcttattttacttgataattagggtttaagctctcttatataaagaaccttaactcaaccccaaaactctaagtctcactttaggccgtaaatctctaagtcagataattcactttctctctctctctctctctcacgctcattatagcatctctcaacacttgagatttggcatatttggttcctactttgtaacctcaagagagctatatcagatcccacttatagtgatctaaatagtgttatctcttggtatcaatacaattaaaaggggagtaggtcattactcgctaactaagggggtcaaacctctataaaaataaaatcgttgtgttcttttactttttagttctaattgtgtaatatgtggcaagcatcaatttaatacaaccttgtcatcagtggaacaatttctgaggtcaacacatgtgttgatctgaaaagaatgttggaggaagatccgtcatcaaccatgcaccatgcaaccatcatgctctcgatttctacagcaatgaccaggggtcattgtgtgggaagttgacttaggtagcatctccctctataaaagagatggtggcctctccaagcttgcgttgcttggagcccctctttttgacggctaggatatcacttttaggctcatgaaagattgtctgagcatagcctaaacttgctagttttgcctacaatttggggtccgccaataatgacccctagctgacccgcctttgggggtggtataaggtctccattttgggtaacttgtgcctaagattggttgtcctgcacataacgatgcaagtggggattgtacctcttataaggaattcaatctccctcctcaagtattgacactcgattgtatcatggccaaagtcaaagtgatatcgatagaatttttacatgtctcgcttgctcatctcctttttgatgggaagggacttcttgtatgggacagtgctctgagtggccatgtagatggtctcaggtttctccattaggagggtgaagtaggtgtacttctcctctttatctttctagtttcgtggcatgggagaagtgttgtaattcccctttttgccactatttattttggagttgttattgttgtgcttgtccccaatgttcttgccactagaggtttaggcgacattgctagttccgacctgtgcacctgacaactcctagagctatagggcgccttgagactactgattgctgactttccctatctaggcttgtcagacagcttcctctagcttgataaagccatccactctgtcaaggaactccttcatattgttggttgagatcctttagatatctttctagaagtcactcaatggaagga

SEQ ID NO: 387847 - DNA, 2940 bp, Cannabis indica
ctcgtttcatgttaggaatttgacacacaagtgaaaaatagaagttactacttttaagtcatacaaggctgaccgacctagcataacattaaaagcagaaggaatgtttatcgctaaaaattgtatcatgattgttgttgtggctggagatttccctactgtgagtggtaggcggcacattctgagtggtgttatgctctggctggagaattcataaactagctacgtgcagggaactaaatctttgagatgaagatccattttctcataagtagtcttgaacaagatattagatgaggctctattgtcaatcattgtccaggccactattttgtttgtaatctacacatacactacaagaggatcattgtgtgaataaatcacatgattggaatcttcatcgctgaaagttatagttggatcttccctccatggttgtttgggttttttttcttctacggccaaaacttcttcaccttactcgtactgaagagttcgagcatatttttctcttgaatttttagaatctccagcaatatgtggcccctataataacttgtaattacccatccacaggtggtggcatcaagtggttttggttattattaggttgggcagccttttgttcctggtcgacctttacatacctatgtatgtgtagattgttctatccgattaaaattcaatcttttcttttaattttttacactcgttagtatcatggccgaaatctttatgaaaacgatagtacttagaatgatcccttttgctcacgtccttcttcattggtggaggtctcttgtacagaactactgaatccatggtcgtaaggatggtttctatgtcctcagtaagaacagtgaagactgtaaactttggacctttctcacgaggatgttggtgtttgggattgttgttaaactttcccttttttcatttccctaattatttccaccattccacattttcctgccttaactactttgatcttggcttggaatagaagtatccaaggtcgcactaggagtttgcttttagccagcagaatctactattcaagcagttgtccatactgcctcttctagttttatgaatccatctgcctagtctaaaaactctgccatggatcccactgttagcctcttgatatctttccataactcccccaatgataaaattcctccaagtatgactacaagtcttccttccttgctcaatccctttactcttgtggcttcgatcataaaccgactaatatagtctctaaggggttcatatggcagttgcacaccgaacaaatcctctaagtgtcaagggagttttctggaagatgagaattgtacatggaattctgatatgaagatattccatgaatcaaacttgtctggtgttattttgaaataccattgttgggtggcatttgccaatgtttctagaaaaactctacaacacacgtcttcgtgcaccgcatgcaaatccatttgcatctcaaagttctttacgtgggacaatgggtcctctttacaagtatatgccttccaggtaggcattttgaacttgggcagcagaagaagtataattatttgaatagtaaatggtgaacctcatgctcgttgaaggtcagtgagttttggtccggccaggctttgtactatgctcttaagatgatctatttgggcttgcagcccatcaacttggctccggtctatgtcacctgttgtcctctttgaacttcaactggcacatagttatctacattaatgggttacacttggggaggaattaccctatctctctgctctcttcggtggttcaaggtgtttctgagatcaactggttgagttccaattctctcaaagattgactgacttgagggtcttcttgtagcaccagcattggtcgggggaatttccctccaagcacgtcgatctcgtcgtctttaagcacgagttgcactatctgccccattgtcattgttacttatgaatgactgactacaagcagttgtagtctaaccttattgtggggctgtgtacgggacatattagaaatattgaacttgcccattctaatcataaagggctatcggatcttgaaacattgccctaggctggttgggtgtttctttacaggaacaaaagttctgactactttgcccaaggtgctgccctagtagtacctggtcgtctaccgtggggcccacatttgtctgtggcctaggatttgacggtccaggttgtaggggattttagacgtaagtcattgggggaacttctgacctagactaattcccaggtgggacatatgcctctttccctctgttaggatccctaatgagagggatatcctcttgcaatttctatctgattcgttgattgaactgtcttatcaacttcgtggtttcatgtgatcgtttatttattgcctcttgctgggctcttaggctttctgcttgcctatccatccactcctggaaaagcctttcttgctacgcaaaagcttcattcatggctactcaggtatctacctgatcgtgatgaagggtattcgtgtgattttgaatttgagacactgcctctctcaaattttgcagtttagtgtcatcatcaactatcacctgaggttcatcaactggtggcactctagagttcaggctagtttctccaacactgtgggtattggtatttccaatactttgagtgcctggagtcacgccaatcccaagagaggtgctgctcgaattaattacatgaagattgctcgaaattgcaagagtttggacattcgggtcagtcaccatggaatctatagaatcagtagtctgacttctttgagttgatactgttggaattattttaccaggatctagatttactaacaagtatgttattaacatcctaaacatgaacttctaaaccgatatgaaataaacacatataa

SEQ ID NO: 387848 - DNA, 1313 bp, Cannabis indica
gatcatctcataaacacttgccgttatcgaaatatgatctatacttattcagtctatgtatacaaattgattaagtaaaaaatagaaaagttaatatttcaatcaattgtaaagaaaaaaaaactatctaatataaataataactaattataataaaggtttaaaactattattattatccatattttgttgttgctatctatgtgataacttacttcctttttttatttttttttttataataatggtccaaaattacatttaaattaatgatgaaaggaaaataaaggtaggggttttcttctcaaaaaaataaaataaaatatttttatgtatgtagttttggatgaaaagaaaagggtaaaagttgagaagtaaaagtataaaaaaaaggtaaataactaaagagacaaaatcaattccataaaaataaaggtaattaatttgttcctatattatatatatatatttttcatcgatatgtattgtatgcacataaatatacaccatcaaattatttacaaattattgtatctaaaaatgtgtgtatcatatcaatcatatattttcaaaccataatatttttgataattgtacttcttgcccatgctccatgcctcaattgcaagaatatcttctttcattttgtttattattattatattaagagataaacaaaaaaaaaaaaaaaaaaaaaaaacacaattacaaaaaaaatatatataaaacaacaaaaaaaatcaaaaatagaaagatacaaaaataaaaaatttaaacttaatgaaaaatcaagtttataagaaagagtagaaagaagagaaaaaaaaaatagtagaaagagagatatatgatgaaaataaaaacaataaagattagtgataatctttcaaagcaagaaaaacattacctaatagtttttagtgcaaaatatctattagagagatttgccaataaataacctgaaattagaacattaagaattagaaagaagatgaaaagaaaaacataacaaaatcttaaaaaattaaggagttttttcattaatgtacaacaaaaattaatatgttacaaaaaatgtgcaaaaaaatttaattataaaaactcatacattttagtaacatatttactaatatttagatcattagatataatatttactaaacttactataaatatatatacataatattctttaaaacgtggattatagattaaggagcattaatgtgtagtcattataacatgtaattttaaattttattattttacgattattgatttgtatacttataatagttactaatatatgtatg

SEQ ID NO: 387849 - DNA, 1669 bp, Cannabis indica
cattatcaaaatacatttataatttggtcacaaagtgactacaaaattaaacctcatatgtcccgagactgaacactccaggtcgcatcgtctctacatgtacaatcttcatccaagcccaaagctcactcctgttcagccttcaccaaacctttacctacacatgaaagtagcaacagtgaactcagtaaaagacatacaaccatataatcacgacttgtgtctaggagcccatacacccatccacaaggcttatcagatgacttaagaacgttcttaacgattaatgctactgaccatgatatcatccactatttgcactatggttgcactgcaggatcgacactatgttcgtgctgctatgacagcatcaatagcacccaaaagtatacttggccatgatatcactcttaaccagtacgatgcatgtattgctgaaccgacacaatggttatgtcgctatgatagtgccaattaatactttctgaggtgaatatcactcttaaccagttagatgcccgtactgctgaaccaacacaatggttgtgtcgctatgatatcacccaaacatatatatcataaacacagcatgcatatatatcacacatacataaattcacatatctataatatgttctacgctattcttacctcattttttaattcaattgagttggctaacccgaacagaatacctcgcgttggatggatgccctagtcacattcacgtatacgggtaaatgacatgccaaaaccctaatccaggaaagccaaacccctaactaaaggttctgtgattaactactaataccatagtaccctaattaacaatgatttaaccaaccaaggcttttaaaatagcacgaattgacgaattgaacaattcagggaacctgcacctgttctagttaaccggttcgcaccaggtaacccaaacaagtttgaaacttgctcaattcgtgcccaaactttaccaaaccttccagaacacctaaaatgacctcaaacaacatactccaagcaatagaattcagaaatacatcagaatcaaaatatgccatagatgaaccaagcttgagttttcaaactcgaacttgtgcattcaccataccaaacccctaaaccagcagctagaacttaaacctaactcaaaatgaatttagaaattgaactaaagttcatacaaaccctaacagccacagtttcacaaaattgtacacaataactaaacttaagcttgaacaactaaaggattaaagtgctagggcttacctcaatttgattcccccttgatttcttgttaaattctagtaaaaatggtgaaagttgttggtttctttctggttattgtgggtgttcgaacacaaaggaagaggggagatgaagttttagtgtttatcttgaatttttgattttttctaatttcttaattgaataatttctaactccactaaaatcaaactgaataaacaaatagccagctgtccaaacctcaagcagccaccaaatcacaccaaataaaattaccaaaatgccattgcaacttataacttaagcaatttaagcctaggggtaaaatggtgtaaaaccacaaccctgctgatacctggtattctatttattccaaatatttatctctctgagaaaaaggtgttggaaattattttac

SEQ ID NO: 387850 - DNA, 980 bp, Cannabis indica
gtccctggaactggtcatgggaggagtcttaaaggaggctactcaggtgagtgtttttcttctttatttttactgtctttttcctagttcgggttttaacattttcccgtgcaggtcaacctgaagatggcatatgcctattcccgaaccaaatccactgcagccaagaaccttgttacaaccaacacattacagagggaggtggatgcggggaagaaagagattaaggatgtgaggaacgagctcggggaggtgaacaaaaagctccttgctgtcaacacccgagtcaaggagctaacaaaggaaatgcaagggatgccctctaccgcccagcttgaggcaaacaacgaggctttgtcctgggatgtcaattctcttaaggaaaagagggagggtctccagactcttctttccaaattggaggaggatgccaagactaggaagatcagtgaggaggagcttgtgaaggaggtggagaacttggaaactaccgccctggaggttttttacgagttttgaaaggctaaccccaaaggccactttgattaccttggagattccaaggaggcgttccttaactactgtgcaagtcaagcagccaaggaaagcctcaaggtagacgattccacggttccagccgaccagatcaccgagacacctgcggttcagaatgtcgaccctccagccccttcagacccagttgatccgtacagagagcccgggacccctgccgtttgagacacacatatatattttgttttaatctgctcgacccataggccctttttagagacaaaactaaccagccaagcggtttttaaacttgggttatgtttttcattttaagacaacaagctgtccgggcagcctttactcccgggtttaccgtgttttgtttatcttttttcagtaaatagttcccttgttttgataataatctgtgcaactgttatgtttttttagcttgttatttactttta

SEQ ID NO: 387851 - DNA, 528 bp, Cannabis indica
tagtatgtctctgcatatgagagacaataactctagggaaagagaataaaagataacgaataacaaagattaaatctgaaaaggaagtcaaatcaaaagatattgtagataatgcagtagaaactcgtaaggcatcatttcaacggttcttatgggaatttgtaattgacttgcccagttgatgatatgaaaaagagcctttgcttctatctcgtctgaccaaaaacaaccttgaactagtttggataaggcaatgacatctcaattgtcacgaataattgctctaatgcccaaagtttcagtagacatattgaccgatgcatctaaatttagtttgatgccattgagatcaggttttcatggaactccttacgtcggcttggagtgatgacttgttttaactggaacagccatggcaatagttgttttagcacggtcactactacaaaaatgggttttctcgatgtttttaaacagacatttaaagtattctcatcggtttctgtaaccgtcgcctattcgaccgtc

SEQ ID NO: 387852 - DNA, 1436 bp, Cannabis indica
gacctttcacgaaaggcaaaaccttaatcgtcctaagaccttttacgaaatgcgaagtcggtaatatttaagacctttcaggaaaggcatacataattaagaccttttataaaaggcaatcaatgtgagaataagcaaaccactaaaagcataaggtgataagcaacaattaaagcatacaaatcttacgatgataaaaataaaaatccgtacaaagtttaagtccataaataaacaagtactcactaaaatgccaggaaaataagtaaattaaacattaataaaaggagttgaactacacaaatagacaactactgcctccttacaaaaaattaattaaagttttttgaatagagtagtcactctatttcaaaaactaggggagaagtggcctatacaaaatacggcgccgacgcaaacttacaaaatatatatatagcaaaataggcgccgacgcaagcttacaaagtgtataaatataaaacttaataagccccctatacagaaaaactttcccttgttgaaatgtcctccgcattacgagccaccctcgacggttggaagaagaaggagggtgtataatcttggaaaccacccgaggtaattcctgaggaaaggaagaagcggatatacaaaaaaccaaaagtgaagcatcggcagaaacaggaacctcttcgaaattctcagactaagcagtagacgcaagctcgggataataagccgctgtcgtttgagttgagctccactctgacacctcgggttcctccttaaccgccttgactggtgccaatacaggaggaaatacagtgaagggacacattgccaaaggtggcacaacctcaactcgagaagtggcgtaagtccctaaacctagcgcagcctgctcgaaacatggacaactgcaaacctccgagaaatatagtgggggaaacgtaacgggttcaaagtcacgaaaacttgaaaaaggatccagggaaaggaaagcaggatccaagggctctaagcctaaaaaaatgttggaagaagaaaggtccttcgagtgaggtatctggtctttgagtgaggaagcaataatgcaaaaaggataaaacaagaagtggaaaagattacccaaaaaaatgttgaaaggattgttagaggaaaatggctaaactagaaacttatttatacacagaagactgcatgcaattaataaagatgccatgaaaacggaaacgaaaaatcacttttgcactaaaacacgtgtcaagcaaacacgtgcacccgaattgcgagaagcggctccaagagtatttatgtctttccactttccaaagcaccccatccaaaaggaaataaatatatataaatacatgtataaaaatgctgagtacacaatggggaatgccgaggtggaagccctgaaaatggtcctacgggaggctcagcaaaattcc

SEQ ID NO: 387853 - DNA, 543 bp, Cannabis indica
atatatatattttaaaaaacacactttagtttgaattaatttttcttattcaattttttctaaaagaagcatcactgttttttaatcaggcatatttttacttatttttctttctcttttaaattttgtttgatccctttttttatttatttttaaaataaaaaatctctcccctgtactccatttgttttacctatttttttttaatctcttgtgggtttttttcttcaattttgtttgctattttttaagtttttttttttcaaattttcttatttcttattaataaagaagagtgtagaaaattatatgagattgatatttagttttatggaatgtaataataatagtaatagtaatgtaatggaatagaaatagtaatgagaattgattactatatttaggtgccgtttggtaacacttttattttctaattttttaatcacaaaatggaagtaaattttttacttttaaaaattttgtttttgaaaaacaaaaaagtgttctgtaaccacttttgtttttcaatgttaaaaacagaaa

SEQ ID NO: 387854 - DNA, 1538 bp, Cannabis indica
tggaagattttagtaacttggtgtgcacctattgttagtctaatttggtaatctattagatgttgcaggtatgtctactcagttctcgagttagttattttagttaaatgaactaggctacccctcatattgagtttcctaataaggctttgtgttctacttctttagggtatgatctagagaggaatttagatgattattacgtttctaatgagtgagtagggttgttaaagaggatgtttgtgtttaatcacatctctagctctcatgtgagttaatttttaaggtgcatgatagcattgttgaaatgcaagacacccttgttgatgagattaactcttgttctcctctgtattcctctaatattgaagatcgaataaagcttggtcaaatgatagttcctcccgagaattagtcaccacaaaaagggtgattaacctcgttatattttgtctctttagttcttattttattttattctgggtaggtgttaattcaccacaaatagtatcagagcttcatggttagatcaagaattcaaggatcatgttttgaagtttcaagaacttatcaagatttaggaaatcatcaagaatgactaccctacatatgaagtagacaagtttacaggtcttaatgactttggattatggaggactaagatgaaagcactccttgtgcatcaaggacttgcagaggcaatcatggtgactagttctaaggaaaaacaagatgccaagaaggtttctcaagagatcaaggtgaaagcacatagtgctattattttaagtttaggagatgaagtcctttgagaagttttcaattaagaatctgcactggtattacagaactagcttgaattgatttacatgaagaaatcattggacaataagctctacttgaagaaaagactttacacgatgaggatggatatgaaactaaagagcttcgaaggcatctagattatttcaaaaagtactaaaaaatatggggtcagaattgaagaagaatatcaagccatactgctagttagtttattccctaaggtaaatgaacactttgtcgatactatactttatgggaaagaaacactaactatgcttgaagttaaaacaaccttgaatttaaagaaaatgaaaaggaaagttgatgaaagacttgaatcaagtagcgatggtctatttgttcgtggaagaacagagaagaagcaattcaagaaacccaagaatgggtacaagccaaggtcaaatttaaaaacaccaatttgaaagaagtgttattactataagaaagatggacaattctgagatgaattttcggcattgaagggtaagtggaagagagaaaacatttaaaggaagaacaagaataagaatcaaggagaagctaatattgtagaaggatatgaaacttcaaagtatctagttgcacctatttaaaaattaggtggagagtggatcttggactcagggtgtgttggattttgtgccctaaataaaacccatttcaatataattagatttactaattaataaaag

SEQ ID NO: 387855 - DNA, 2745 bp, Cannabis indica
tctttactgtctttattttttttgtgcaattttatcactgtttaggctcatatttggttaacgaaaatctacgtaaatattttggtactttcattgagagcctacgtgaaaaagctcaaaaaaaaccctccttaattacataaaaaaaactaaataagataataatcctctttatgtctgacaacgaagaaaataatcctcacggaggaaccactcatcgtcttggaaaagagccaatgagtctccagggatgtatcgactcatgaaacaacccacaagttcaataaaatcccagaatttgggaaccaaacttgaagggcctaagatgagcaatggccggtctcttcctaatctagttgatggggatgacacctatgatccaacaaagtacataccaatcgtcaaattggaaaactgttatctcaagcatcgactagaggaggcaaactggcataatgctgaattaaagcgtgaggcagctgcagccagggcggtacaagggaatagctcccaaaactaacctgaccccagagaaagagaaccatgaggcagacctcaagactcacgaaccagggggcaagaggcagcccgaaggaacccccagaacgctcaggaaaggcaacctggggaaactgagggataccttgaaggcgagatgccatatgatcaaccaagaactaaggaaccaaaaattcctcgtagaaataagggaaatatgggggcacaacctgaggtacgtgggtcatcgttaagggatcaccaacattctttccaagctcataggaaaggaactcgcacaaatctcaatagggggaacgagacgaatcgaacccaagggagaagagtaaggcgtgaagagacgagtgttaccacaaggcacacgataacccatggttgatcaatgcaaggaggagagaataccgatcgcaacaatgatcaagaaggcaaaatatggtctatgggtggaacaagatttgccagctgtcatcgctaatcggacctacgagaaccctttgaactagaaaaaacttgatttttgccaacaacttagtccaaagcaaggggattcaatctatttctgaatagatgagttggagaataagttcaggaggcatcaagtcagggagccaggaaaacaatcgggatgtgattctgttgaagaattcgagttgaaagcttcagggtcaaagaggaaagacgactctaagaggttgtccaaagataagaaacaaaagaaacacgacaaatatgtacccatttatactgtctataccgagattaatgaaacttgagagagtatctacctcgcacatgaacagaaggtcgctttcaataaactaaagcccatgaaacacgcaagacgtaaaaggacccaactagacgatgtgaataccatggagatattgggcatacaacgaaagaatgtcgtcggttgaaagatcagatagaaggtctcatagcgtgatgacacttccaacaatatgtaaaggggcaggacaatgtccatgaccaacccgatctacccagtaacccaagcaaccagggaccataatcttcctctgtaagaggaaaggattcctcggttatctcgagaggataacatattgcaagaaaaattggacaaggggaaattagcccggtgaggcaattacgtaaaggtactacagaataatcagatactagcttgcgatggctgttggatggggctgcgacccaaaaaagccagttgtcacccagtggcagttaggacaaacaaccgaaaccaggattagttcacctagagccgttggggtatggcagggattgaccctgaatatcgaaacccccgtggggatatggcagggattaaccctgaatatcaaaatccttgtgggaattatgttagggattaaccctgaatattaaagcccattttttcaaaaccagatgcttctagaagattgataaaataagcaattgaactaagaaatctcttatgagattaaatcgataataaattggtgatgtaactcacattgttaatgtaatattttaaacttttgttatgaataaagagaatcatttctttcgacaagtaattataaagtgcgaccctctaaaattacttgaggggtatatgcgtataattaactggaatttatctggaaatacatagtataatgtaaacccaccactttaaaaataaatttttttcttaaaaaaatcttttttaaaggttctcgaccaaacttttttgacgagaaaggggtcaaactgttatgacttccttaccaaacctttttggcgagagagggatcgaattgttataacttcttgatcaaacctttttgacgagaaagggatcaaacaattataattttttgattaaaaacctatttgacgggaaagaaaaattaatagttataaatgagatataactcgtaactcgcgtgtaaagctgaatactaacggctcgcactaaaggaatgtattaaatgagacatcaaggtgtcttaaaaaagtacttaaatctaacacatgggaagaggatctaactattcatgtaagcaataaaaatatatatacaaagtgacaaggtcattaaaaatacattcaagtttgcttggatcagataataactgattattgcaagacagaatcaatgactgctcgcaaatcgagtgcatggcaaatgataaactgctcgcacgtaaaagaggctattaactacttaatgtcaaaaggatatacgagcgatggaaaccc

SEQ ID NO: 387856 - DNA, 1457 bp, Cannabis indica
ttacttttttcaataaaaataaaaattcatgacctcgaccaatcatggattgtcacgtgacaatttacttaacacttaacagtcaggtacctacagaagttctagaattataacttagatattattactgttaaaaattaaattaaggtatttatttacaatcaaaagttaaacttgagtatttataccgtaaattactcttgaatttaatacaaaattatgtaaaaaaaaattaaaaaaatattaagaataattttttaaaattaatttaagtcaatattttaaaaattttacgatgtgcttataattttatatggggtgtaaatataaggaatgatttcataaaaatataaaagtgacaattttttttacatttttacgaatttgttgattttcttacatttttacaattttattatttttcacaaatatatgaagtgttgtctttctaatgcttctaaaagaaataaatattattttacaatatagtttgtttatacaaatatatagagtattatttttttattgtttcagaataatgttattgttcatgaaaatatagtaaaaaaaaataaataaaaaagaaaagtgtgtaaaaaatatataaaaaaaattcaataaaattataaaaaaaaaatgaaagtatattgtgtaaatttctttaaatataactccccttccttttgaaacatactcaaaaagtattttggtatgcattttctttaattaaaatataaattcaatctaattaaaataaagttaaatataaggaaagaaaaaaattaaaagctaggttggtaattagccaactggtctttagctgtctttgaaatttgcacattagatattttaaaacattactttttttattccaaacggtggaataataaaaaaataaaaaataaaaataaaaaattgtaaaaatgtggtaagagtgtaaaaaagagatgtagagatatacattgatgagatgatgaaagattcaataattgttgtaaaggtactaatttgtcgttgtcgtggggtcttgagaattgtccgagtaggtgtgcagcataactacatttcctaggaaaccttttgtgcagttgtgagacaactcatgactaattactcctgactcatctaatgctttggggcctcatcattcaccgctttctaatatttttcttcccaaattgttttttagatgatgatataatgtataatatttttatttataaaatggattttattttaatctgtattattttgctcatagtgtattcgattcacattaggtggcgtttggttgaaggtaataaaatagaatggaatagaaatgaaacaattttcattccattcatttctttagttgcattttatggcatgtttactaaaggggaatgagaatcaattgtatgacattggtttgtttactaaattttggaatgagagaaattagtggggcctacaca

SEQ ID NO: 387857 - DNA, 1127 bp, Cannabis indica
aattttttcacaatgggtacctctcggctgacctgtttgagttgagtgaattggtatagattcgtgtatccgaaaaatagctatttatttattttttaaaaataaaagaaagtagtaataatactaataaaaataataataataaaagaaataagtttttattctctgtatttacggctccaattttgaaacgggaaacaaaaaagcatcgcatgctattgttgattaaaaatgtttaataggacctcccatatttccatgctttcttgcaggtggaagatgctacaaaagctctagaaacaacaaatgggacaacactcgaaaagaatggccagattttgagagtagcatacgcaaaaagcattcttggtccaggatcaggaacatcaggacattcacagtccagtagccttgcggccgctgcaattgaggcagcggcattttctcaacaggttccttgctccaactctaatagaacttttcattttttctgttgcgcccggcattatattttgttttatttatctgatcttgaaggaaggattagagtttgtaaaggaaattggaaattgtcttggaattgtttaatctcctcttcttagtgcccacattaaactaacttgctcatactggatttaggccagttatactaactaataactgtagacctttattaaggtttctgggcttttcacaatagccacatatgaacttgcgagtgtaggaataatttgcagaacggcaaactaactatataaaaaggttaaggacctattatgatctctgagctccatgcaattgtcactggagaagttggaatgagtgattaagattggttttcatttttcttctacatggcaggtgtatatattttttgtttatattattgactaaaggttttgttccccttgttaattgacttctctttcccttcattcatgggtgcacttttaatgggtattaccccttcatagataatattagaaaaatttgagtttttatgcttattctttttattaaattagaaaaatatctcatttttacaatatatggactggagttgttccatcggctgaaataaataataaaaaaagttttttcggcaaaaaaagataaaaaaaatagtt

SEQ ID NO: 387858 - DNA, 671 bp, Cannabis indica
aaaaattcacaaatgtcaataaacctacctaccctacatttattttatttatatcttctaacaaggatacttatattattgagaaaatatatagtactatatcattatttaaaacaaaagtcactattttctttttcttaaacaatgaaaaagagggaagatattaatattattctaagaaaagaagaacgtggaataagtaaactattccctctgccagaagtatactcagattcttttctccattatctaacaatttctcaattcatataatttactttgttaaaattttattttaataatatgtaaaattataatataaatatatcatataacaaaaagtaatttaaatttaatcaggatataaaatttacatcataaaaaatattatatttttatatttattattatattatttttaatattttattattaattttagttaacaaactttttacattaaataacttatattattattaaattttatatttatttttgtattattttatattttcataaaaaaattattaaatggatattaaatattacattaaattttacatcaaaatctataatctatatttaaataggattataaaaattgggacataattttgtactttcacggaatgtatttcgtggtatttagatgggtctcaaggtacatt

SEQ ID NO: 387859 - DNA, 1181 bp, Cannabis indica
gagatgaagtatttctgactatgcatgtgaatccgtgtatggactatatatatttgtatgtataatttatagtatttcaaaactcttatggacaaagttttgacagacttggagattttctttctcttaatacaatccacacaagtgtcaaagtcaataaaatctaaagtattaagtaccccatcttttactaaccttttgtttctattaatggagatatgtcacaatctttggtgccataaagtacatgaattctcattcataacacatcttttagtgccaacgtgaacatgcatagcatcatgagttgtattgttttgtaaattattacagtaaacaccataataaaatacaatttccagcacattcaaatttatcatataaattgaaagatttgtttgaaaatgtaaaggaaaaatcaaaaggtacaagtctttaaattgaaatcaagtttttagagagacttagtacatataaggtcttttctaacttcaaaataaagcaactactttaaactaaattgttgttggaagcttatttaaccaagaccttatttactattcaagtatgttaaataatatctaaattaacaacctaacatggatacttgaagcaattgtaataaacatgagtttaagaaaatcttacaatgatcgcaacagaaattaatgtctctttccgttcaattctcttacccttgatcatttatgttgtagagtgtaattaagaactgaacctcaattttccttcaggatgtgaaagattacgtagtcttccacactaacttgagtattgccttaatataggcatatactcaacacttatatagcactcaaaaatatagaagaagaaaataaagagattttaaaaccataatgatatagaatagtaatagctctaatttcacttttctgataaggagagtcaaaattctatctatgttatacacagtatatgaacatgtatacagatatatatatatatatatgtatataggcatgtggctatatatatatcatatattgtattgtgtatatagtaagagaacataaaaatgtatatatattgttattgttattgctattaggtaagagctatatcattcaatttatagtattattcttagggttaggtttagactctttaaattagggggtgttcataaaatagccgatctaatc

SEQ ID NO: 387860 - DNA, 822 bp, Cannabis indica
gttttttttgattcagaatgttaatatttaatgaaattgattattttagttaaaaaaaatatattgtttgatagttactaatgataattgattatgttatagtagaaagaaaaataatattaattatacaagaaaaaggattagtgaagaaaaaagtaagattactaatgtattttgttcttttctttacattttttgttttttttttacgaaaaattaagcatagcactataaatttttaaaactacaaaattttataaaaatcaaaattgtataactatttgtaatataattttttatatagtctctaaattttatttataaaatggatatggttacaaatttaaagcttcaattgcaaacaaaattatattgttatcccttacaaaaaaaaaaatatatattgttacaaatttttaaaacaaatttcataattatgattatgtccttttatatatttttaaaaaattttctaactatatatttatagtatttttttaaacgaaaaatctcaaagcaattttttttctaaagatctcaaagcaattttttaaattcctttttttttttcaatttccactaaaaagggaaaaagtaatagaataattaaataaataataaagtgataaaaatgtatctttatttaataataccttgtattaagggaaagaagaaaaggaaaaaaaaatgtataaatattctaggaagaaaaggagccataatttgaggaggtgtaaagatcaacctagttttcagtttaaataaaagtaaaaaaattaattatttatttatttatttttagaaagaaaaaataaaataaaa

SEQ ID NO: 387861 - DNA, 1137 bp, Cannabis indica
ggaaaaattgctaattgaaaaggaagttatttaggttaatattggatagcttgcattaacaatactcggtatatcgtttgtcccttgctgcaaccataactacctcaggcaataaaatacctagtgaaccacaagtgaagaccggaaaatccttaaataatccacaatgactattctcactactgcaaccataactacctcacccattacttttactcaacccgaccttcttcatccaaccccatggtcttctttccccagttcccgccgaaatggttcatttttctcttctgggttcaagaagagcagctcgtacttttccaagagcacgaacaactctaccaacttagctgccttgccctttgacctttctcctccccctattgatcacgaccttgttgtaagctttctcttcctattttcttacctgggtcttgtttgtatttcttggaaacctcaggaaattaaagaatttaatgttgcaggacgccatggaagctgctggggcaaaagtctcggagaaggggatcatcgagtcatttgataatgacgatgaagcactggatgcggtcgataatggtgttgcggtgagtatttgaatttgattaataataaaattttcttgtgaagaatgtttgtctatgcttttattgtgatatatgtaaatattaatcatgcagaacctgtatttaaattctggggtatgttttgttggaactgatagaataaaaatagtccattttcattgattactttgattggttattccttccacaaatgggaggaaaggccattccaatgcataacgacagtacattttcattttcatttttgcaatatgtagcaatgacactaccattcctccagaaaagaggcatttattttataacaacttatgtaaatctgcctatatatgtacacagcaagacatatgcattgtgtgtggcaaagctcaaaactttttttcagttaaatgaatcaggttaccaattagtttcaattactatcgcattcttagttgtaatgctatagttttccttagttttgaaaggtcagattcattagatcaacctgtgattagttatcgagtgtttgttctttttaaatgcatattgttatttcgggaatggaatatat

SEQ ID NO: 387862 - DNA, 933 bp, Cannabis indica
attgaaatgactgtaaatagtgtttgttataattattaaagcaagagaataacatttcttggcatttcttactgtgcgtgtgaaaccctaaatattcagtcatggaaaatgaagatccaatattatgaatttgaaaacttaaattctgtggggcccatagtaatatctaattgataccaagtttttcaaaatcaaatccaaatccatattcggattttggcttgtaaaattgaaaacataaaaatgaggttttctccgttttgtaaagtttttcccaaaaaccagaaaacaagatcaatctcctctgatctgctcccttgaaaaagaccaagcatctctgtttcccttcaatactctcctaagtgtatgtgaaacagaatgaaagaagacgagattgagatctccaccatgattttttttagatgacattacattaacaagacatgacatttttcatttatatatatatttatgtttttgtcatttctatttatatcaattttcaatagttggtctagtgatctaactttacagatatttactttactttcaatagttagaaggtttcaatggtcagaactaagccccaggatttacaagaccgtatcctcaatgctatcattgctgcaactttgtatcagttatgaaaaaatcgtgatagatgtgtgtttgatcttacttgttcagttgttaaaaatattaatttggaagccaataatgttgtcaagctagcttagaatattaagcaagagtccctataaagattgtcgaaaaaacaaatgtgctcaatatgtaattaatagttggtaataatagggcgtttggagctgctgttgctgctagtttttgctgcagcagtttgtattatttgagattttcggcctcctttgttttgttttgctgagttttgtatttcatatttcaatttttttt

SEQ ID NO: 387863 - DNA, 2352 bp, Cannabis indica
gagagtttgggttttgtaaaattcgccaagtttgttttgcaagcaaggcttggttaaatgaacatgagaacgaaatccattctcccatctatcttagatgtacaaagaaactttcattttttctaatgtgttcttctcttattgttagttgtaccccaccaaaactgagccatcatagtgtctagttgtttacaaaactttgctgataatctgaagcaactaatggcatacgtagggatagattgaaccacaactttgagcagcacttcttttcctccatggggaaaagtttatcattccaagcatgtaacgatttccaaatacgatccttgatttcaggaaacaactggttttattttgctttgaatatgcaagaaggcttaagtatttttcatgacactcactgataggcattcccaagatttgagtaaaagaatgcttagggttttcagatgtattaggagagaaggaaatgcctgatttgtactcattaaggagctgaccagacgcacgatgataaatatccagagcatgcttgatagcaccacaagatctatcatttgcttgacaaaaaagaagactgtcattaacaaaaagaaggtgcgaaatggttgcagctcttcgagaaatagccagtcccttaagatgacctatagactcatcatattgcagaagacgggatagaccttcagaacatatcaagaacaagtatggtgagagtgggtctccctgacggagaccgcgttgaggaaggactgaacctgtgacaacaccattgataaggaatgagaaagtatttgggtttaagcaagtcataatgagagagatccaacagatattgaaaaccgttttgcccattactaccgccaaataggaccactcaacacgatcaaataggccttactcatatcaagtttaagggctgcatatcctttagatccatgctttcgatgtttcaaactgtgaataagctcaaaagcaacaagaacattatctgtgatttgcttgtttgggagaaaagcactctgagtttcagaaatgacatgagaaaggacatctttgagacgaagagccaacatcttagaaatcaatttatagatcacattgcacaaacttattgacctaaaatctttcatagtcattggtttttttatcttaggtattaaagtgatcaaggtcttgttaaaagttgttggtgtggcaccattattcaacacatttaagacaactttggtgaccaaattaccaacgatatgtgccaattatgttgataaaacattgcggatattccatcaatgcctggacttttatcactgatttccatagtttttaaagcataaaaaacctcatccttcaagagaaattcattatggtcggatgttattgtagttagaatcgtggataacacatgggataaagcccaataatcctcttctgaaactgtgaaaagcatgatcatcaaaatatatattttgtaactatatcacatttaccctccaaaaagagcaatttttatcaatcgaacaaaacaaaaatgaatttatcataattttcatattttattagtttagaggagtgtatatatgaatttattaaatataaaagtgatgttatcaatattcttatttatcagtatatacgaatatgcaaataaattcatacaccatattgatgtacatgttctctcagttgtcttattttctttatttttcttttgtattccttgaatgtctttttatgtgtaagagcatctctaaggagtatattaaatttggtgtcacattatcactaaatttagtgtcgaaaattattttcacttcaaccacagcacaaaaaattatactcaaaaaatattccgtattactatattaattttttaataaaataaaaaattaatattatattaattaactaaaatcaccacaattgttatatctaaataataatttaaataaaatttttaattattttaaagataataatactgtaaaatcaatgaaactcgataaattaaaatgtcatattgcaataacataaatattatattactagaaaaaaaacatgacgaaaaatttacattaaatttaatgtgtttaaatttgtaatattttttattgtgacaaaagtataataattttttacttaaattatagttgaaaataataataatttatgatatttacatttaaatttacacataatagatcaaaaatgcttctataatgcacccctctaaataaaagaatcacgcatgcaatagatagtttgaaccttgtttccggcgtgttaaatttttttgaatttttcaaaattttacagaatgtcttaaataattacaatctacataaccat

SEQ ID NO: 387864 - DNA, 927 bp, Cannabis indica
tttttttttttttgttagatttgagcaaagtggtttaaataaaaattatgtcaagcccaataaaataggcccaattcaaattctatatacttgcattactctatctctctctctctctccaatcaagatacattaacttgttaaagcttcacaattcttcaacgtccaaagcccaagtcatacaccatttcaaaataatagaagaacccaaattgatcatgataatgcacctgagggaagtcttcaattagccatgtggtcgcttgttttccttcaagcccaacatcaattggtgcagctatcttttctctcactccacctgacccactttcctcaaacaaccacttacacataagcccaccatcttagctgaagtaattgatgtggccccattatccactacatcaaagtttttcgtcactttctccagtatgtgtatgaaaaaactatcaagtgtgggagcaaaatctgctctataattaagatgattgaagagagcaaaagtcatcagatttttagagtagtaaaattatactatctttattatttttttatttctctcttagttttacttattttatgtgacaaaaatgagtgaactattttagaaatattggtgaggttagagggtagctattttactttttattctttatattgatattgattcttttgtgcttcatcttcgtatcttatttattaacttgttcttcatcttctaatttttctttcaaagttagcagtatcttttatataagttcagtcatacttttcttatgtaagttaggctattaatattttggtatatttattatattttatgtcgtttactgccaggcccggccctgggcataggcgggctaggtctgtgcctagggcccacctatcccaggggcccaaaaaaaatatttaccttttaaaattata

SEQ ID NO: 387865 - DNA, 777 bp, Cannabis indica
attatatttttaatttttaaaaaatgtgcatgttttttagtgggtttggaaataatgtttcccatttaattttcttttctccacttccaattgacataagactatataatttattaattattttttgtattttccaaaatgtattattaattttttaataagtattaggggtgagtaatatccaatctaatataattgaattaaactgatcaaatttaatttaattacaaaaaattagatatctaattacaattaaattaaatagatgttaaaagttgaattctaattgtattagatcgactattagatgtcaatatcaaaatctaattaaaaatcaattcaatccaattacatgtatttaaaaaattattatttatttatataataaaaatattaaaatatatatatattcattatatttttagtggattgtcttgtgttaaatttgtaatacttagttattttgtgtatttattttcatgatattttgttaaattttattacttagcaatattgttattttagttatcttaaacttttagttacattatacttgtaatgatgatatttttatggagtattaaacttaaataaatagtgacatttactttttacgtaattttcttcatatttataagttaatattaaaattaagtgtgtaattggatatcctattaaaaaatcgatccaatccaattagtaagagaaatttgattttttatacttacatttggttaaattttttttcctaaacacataataactaatatttgtagg

SEQ ID NO: 387866 - DNA, 1483 bp, Cannabis indica
ggttatatgtaataataattaaaccttacgagtttatgtagtggttaatgatctcactattgattttgacaaattttttattggaatgactaattattataatagagtttcctcaaccatcttgatgaagtaaattttaaatgactgcttgtcttttttttttttttctttttttgtatagttagaactgaaaaatgagacagaatacatctagcttctacaatctatattgtaaacttatataaatataaatatatataataattataaagtagctgcctagagaatgagtcttatgaagaaagagtatagaatatgactattccaaataaatatattatatagtctaaatgattttataaagcatacgtatcttatcatactaatgaataaatatttatattcttttactatgtctaaattatataaatcttaatctgtatttgcagccttgtgtgactaataagctgccaattaagttggtagtctagttgtcatatatatatatatatatgtataatgtattgatgctaatatattcttcatattgtatataaatatatatatctgtcaaagtccaaacttttacatggacaaatggacaatacaatatagaatatatgcccacatcagatggctattaatttctctatctgggattctctctatctggttttctttttaaatataacttattaatttatttatgacactacatttgtattcattattaactaataaaaatccatcaacgttaacataaacataagtcataaagtgggccacggcaaaatcagtttctaatggaccatcaatgcttatagattataactcatccaccatattaatttttagaactacacactaaaattaaattatgttaaaaataaaataaaattcattacatcttataataatgatatacattttgtgatagcacatgtatccatgggaggtagtgtattttcggcatgcttttgctattaaaaaagaaattgttgaacctcttcataatgaaatatataagtatatatacagatggtgtgtattaaataacaagtaatgttatgtttgaataaagtattgtattattatattattgtattaattattataactatagattttaatacaatgtaaatcgtattattcaatacgtaacaaatgatttgtattagtttgtatttaatatttataaagggtccgggaccctaactcgaaccttgaattggacctggaccccgacccaaaccctgaaccttgaacccagatccgacccaaaccctgaacctcgtacccgaactccgactcgaaccctgaacctggccccagaccccaaacccagacccgaaccctagactcagacttggccccggtcccaaatgtcggacctagactcgaaccccaaactcaaccttagaccccaatcctgaacctcggactagaccctagccccagaccaagacccaatcccatacctaga

SEQ ID NO: 387867 - DNA, 957 bp, Cannabis indica
aaggtaagatgagtcttctcctctttgacaaaacacacatcatcatgaaattggaaatagacatcattgaaattggtttgagaaatagacagacatgtgccatctccaacaaacaactaatcagaactagtgttttctgttggtgtcgtgatgttttgaggatcgactgtgcagtgattggtggcaccaaagttagggtaccagtttgtatcccgtccagtatttgagcttgaaaatgcctgcatttgagctgtattgatgttgctagtgttgccagtaggttgtgtgttgctggtgtaggctttgttaaatctgtagaagcaatcaagtgcagcatgaccagtcttgaagcaaatttgacactgaagtcgattgttattaccactgggaaatcgtcctcctcgatcgccattgaatcctcctctttgattactgaatccaggtggtggtgagggccaggactgggatcattgaatcaaacctgtgttgatctaggttggccagagttatatgggggaaaaatgagcctgagttgttgtagccattgtagggaaattgagagccattgaacctaggataggcagctctgaaatttctattggtgttggtgtaatttgcttcaggaaaatcaggttcagtgtaggccctattgacattgagatcaattctttgtcatttttctcaattcttgattcggatgcaaggagcagagcttcaatctctacaacagagtagctttcaatccaagtgttagtagaaatgacaaaggtgtcatactcactagggaggcctttgagatagctgcaacatgatcacgagtgctaagaactgttggattatattttaccaggatctagattttactaccatgtatgttatttaacatcctaaatacgaatttctaaaaacgatgtaatttaaacacctataaagtttgagaaaccttacagtggttgc

SEQ ID NO: 387868 - DNA, 685 bp, Cannabis indica
aaagttttggagtgaaatttgttttagattttcttctatcttttcatttttccttttttaggatagattagattagattttttttttttttacatgaaacaaatcaaatgtatgtcgtttatagtacagaaaatgatagtacttcccatttgaatactatccagccaggaagaaaattttggaatttaaaaaagtttagaaataacacatatatttgtcttaatatatgaaaattaatgattaaatctgtagaaagaatcatacaatacaacacaattatatcaagaatcatataatacaatacaatcacatcatattgagtaaaaataacatctaatataattaacaagaaaaaaaaaacaaatcatatccaattaattcacatttagaaagaagaaaaaaatcatagatatgatataatatttttggaagttaagtgttatacttatatagatgtatattgaggagttcacattttttttttctctcttatataaaaagtggttattgaaaattattggttaacatttatttttttctcattaaaatttacagttgaaattaatatcgtttaattaattaattaattattttttaaaaaaattaattttaaatatctaaatttaatttatttattaaaatataacttacataattatttaaaaatatcaacaaaattaaataa

SEQ ID NO: 387869 - DNA, 1229 bp, Cannabis indica
gaatattttttttattcagatatggttcattcactaataatcattctataattacttgagtagtgttgacttaaaaatttgaactacacttttaagttaaactcactcgttattagattagcgagaataaaataattgttaagtaattataagagagacacaatatatttatagtagttcactccctgtatcgtgacagtattacatgtcagataaggctaagtgtcagaagacaaactagatagagaagctctgaccctgtgggtagttttctgaatgtgaataatgagctaagtgagctcttattttataggtgaaggagacccacaaaataaggagaaaatataaattagacattttcgactgtagataatgatccaacggtgaaaattagattttgatggtgatagtaatttttgtagcctgacaagacccgctgcgggtaactcggagcttatttttgtaactctcttgggatgaaatttgacattgatagcttcagaattacgattgaagtgtgagagatgaattcatagagcattgaattagcaaaatgcaaattaaatcacgtcaatcggatcaatattgagtaagttatggttgttttactgaaggcagttcatgacctaatacccatgcaaattgacattcagcgaccaagttgacatcccagtgcctaggttgacatataacgtcaacctagacgttgggtaagtgtaaaaacgtccaagggatgtactttaagattcctaagtgatattttagcatcacttagtctgctttcgtgttctggcaaaggtggtcaccagttctcagagatgttgttgttctgcggaaatgagagactcgaaactcttcattggagtctctcattttcgagtgagtttcccgtgttaaaaatgagaaatgcaaagttatgaattatacttccctgacttcatgaatcttagttactgtgaaaaactagatgaatggtcgaaacaaaatcaaaataggataagctagggctgtacaaaaaagtttgtaaaccgcctaaaccgagtaacctgcccaaaccgaaccgaaaaaaccgataaaaattacaaaccgaaataacccgaaaaaattacaaaccgcccaatctgttaaaaataggtccaatccgcccaattaacctgaccaacccgattttgcacctttattttttaaaaaaaactttttagtttttattatatataatataaatgatt

SEQ ID NO: 387870 - DNA, 889 bp, Cannabis indica
gaaaaattcaaactgcgacctaactgcaaagaattttcaaaccgaattttttttttgcgatgtggtgtggtgcagacggtttgattaacacccctaagttttaaatataaatatataaatatctatgaatttcaatatatatatatataagcactgtataacacttctatggatagtaaacatcaactgttatttaaaaaaataattacaaatattaatttcaaaaatattaaattattaggttttaattcaataataaataataacaaaaaaaatttaagattttattattaatttagctgcttaattaaataaatatctattttatattttatcagaaatttatttatttaaaaaaataaactaattaaaatcaattttttttatctctctcaacctgaatgaacacccctatcataataatagtacattgtaaaaataagaaatatctttttacttacgttacaaaattaaatataggaaaacaaattattctaataatactcattcatggatcataccaatatatacataaaaatatatatggaataccgcttcttattacccatcttcaataaacatgggattccatctcaaaccaattggtgatgagtggaggagcccattttcttatatatgatttaatacttttaaatttaatcaatgatggacaatgttattaaacaactttaacgataaatattaactttaaaaatataaaatcattagattttgatccaatgacgaataataaaagagaattttaaatttttatacttaatttagctatttaatcaaaaaaaaaaatacatataaaaaatagagtaaatactattttggaccctgtgttttgtcaaaagttacagattggaccctgtattttgttaaa

SEQ ID NO: 387871 - DNA, 2436 bp, Cannabis indica
cggccaacctgagtggaactgttgttcgacgattaacatgcccctaaattacattattcgtaaaacggatgagtgacacactaaatcacttttcaaggacttaaaaacaaaactaaaagttttcctatcaatggataacatgaaaataccctaaacatcacaaaaacagaaaaaactagggttcccaaaattgccccaactggcagaccggttccccaaccgaaagaccgatactgagggatttcctgtggatcaaccggaactccagttcctacaagtcccactaaaccggtcgacagattcagtgcaggaaacacctaaaaccccacaacaaccacaattcgatcccaaatgcaaccaaaccttccagagtacctaattacaccataatagacataatccaagcaataaaataacccaacacatccataatcaaaatccagcattagagagcaaagcttgagttcataaactcaaaccttgctcaatcaccacaacaacctacaaatctaacataatagagcttaaataacatcaacacaacaccagaacttaaaatcaaacacacttaacaaccatagaaccctaactcacaaattcatgcaataacttaacttaaagcttaagtaatcaaaggggaaatgtgctaaagggtttaccttcaattggaaacaccaaaaacttgctagattacccaaaaatgaagctaaaaaatcccaaaaccttgttgcttctagggagctcgagaaagagagagaatttggagagagaaagagctaagtattttcttgatttttttctagttgtgataaaatgagataaattctaaaattaaacattaaaataaaattcttacataaaacaaaacaatatactaagtcactaaaagacaaaacctcatttagggcaaaagaccatttcacccccacttataccaaaaagcttctaaacttcctaggggtaatttggtcatttctaaaatcctgacaatttctaacattcccaatgtctatctaagtgtccccactactacaaaaaaaaattattaaatgtgattctattggccaaacgccgcgttttaatgttgtcgggcaaaaaacatgaaaatataaaatttcatacatagcataaataatacaccctgaattcaaataaatctcaataatttcataaataataaataataatctcaaactcataattaagccataattatctactaattccatattaaaattaagcggtctttaaaaattggctagcgatactctctaaaagttattaaattaaactatatgtgggactcgatacttaatcgaaccttatagcgatattgacacataggagggtgctaggcactactgatatcttttagcatttttctttttttttttattggaaaaatacaaatagttttaactattattgtaataattaaatatacaaataatgattttttttcacaaaatgcctcacgaaatagaaaaactagaaagaaaagaatgtaagatgccacataaattcttttgttcttttctttattttggatatataaatatagatatagatatgctctaagatatttttgcgttgaaagtaagtgctacaggagtatatattttgagattaatgtagtgtttattattaatatcaatatacgtaacaattgtttataaaacaatcgtgttttacttactaaacacactgacctaccgtttgcttttataagaccaatcattcatacgatcataccactttacatagtttttcttttcatttataattacattacaatactatgcttaaaaaacctaaaaagaacatcctaacattttaatattaaatttatttgtaatttcttaactatactcattgtttttaatacatttaaataattttttgagtatatatatttttccttcaaacaaaacacactatattctttattaaataaaaaacatagttaaaatttggaaaaaaaaacagaaaaaatcttaaataaagtcgcttattacataacatccacctaatatatatatatatatacatatatatatatatagtatttaaatatattttttttctttttaaaaaaattactcattagaacaactaaagtatgataagtataataaaataaaacttgagcaatttgtgacgaaactctcttatatcaactgaatgaccactgtataaacctatgtatatgtaacagtaaaatttcgaagtcaatatagtagtaatccagttagtatttaactgacaccttaaatttgtaaagaaaagtaaatttaaggggattttgccaccaaaaaaaaataaaaatattaagtgtataaaaattaaaacataaaaaaatttcaccgcaaatttctcaaaaaaatttgtaaagattttggtttgttggagtgtttgctatgtttgtcacaactgctt

SEQ ID NO: 387872 - DNA, 1455 bp, Cannabis indica
gaaaatattaaaattcctacatattgtttgtaggtgaaggatgaaggatggattccttgctcagtaaacctagaagaacatgtgatcgttccaaacattgatgatccaacaatggatgatccagataaatttatggaagactacatctcgcacatgacaacaacaccactcgacagttgtaggcctctatgggagcttcatatacttaatttgaaaacttcacaatctgaggcatcagtagtgttcagaattcaccactccgttggggacggagtttctctaatgtctcttctattggcttgcactcgccaaacctctgatcccgaaaagctacccacacttccaggccaaaacataaattctagtaagagaaaatcatcatcatcgccttggagttggatttggggattgttgttgggtgtttggttggcagtgtcattggtttggaatacttttgtggattttgtaatgtatgtggctaccattttgttcctcaaggatacaaatactccaatcaaaggccaaaaagggtctgaatttgctgtcactcgttttgctcatcgtacacttagtttggatgacatcaagttaatcaaagatgcaatgaacgcggtacattttttatatatcataatatattgatagtgttttttaatttttttttttaaatttgacagaatatttttagttaatttaaaataaataatgataaataatattttagtattttagattcatgaattttgatgtagagatctaattttatattttcaagataattttaaaaactataaatttaattggaataatggttttaggattcacattgaagctggtcataagttacataatatgtttatcatggaaataatgcacaattaatcttagtattttagttatcacttttaattttggaatctcatttcaatgaattaagcattaatgttgaaagtttattagttagcatgaaatattatgttcagatttacaatatttaacattgaaaacaccttataaatttttttatatatgaaatatatttaattatctaatataaagtgaaataatagtaatattcgcatattaaaattaacatatattactccaaaagtattatattacttatatatttattaatttatattatttttagtcacttttaaaatcttgaagaattttaatgatacattttaacatcttttctcaagtttataatttaataaacatgtatatattttcagacagtgaacgacgtcttagtaggggtaacacaagcgggcttttcgcgatatttgaaccgcagatatggtgagttgatctcttgatcattattcataattgtaataataataataaataattaattcttaatctacttgtaactattatagagaaacacaacttattagggttttatcagaaaagaaaaaaaaaatatttagtcaatgttaacat
